United States Patent Application Publication US 2018/0126003 A1 - sequence listing, part 180

SEQ ID NO: 319702 - DNA, 2187 bp, Artificial Sequence
  derived and/or modified sequence
atgctgagcagcgtgtgcgtgagcagcttcagaggcagacagggcgccagcaagcagcagcccgccccccccccccagccccccgagagccccccccccccccccctgcccccccagcagcagcagcccgcccagcccggccccgccgccagccccgccggcccccccgcccccagaggccccggcgacagaagagccgagccctgccccggcctgcccgccgccgccatgggcagacacggcggcggcggcggcgacagcggcaagatcgtgatcaacgtgggcggcgtgagacacgagacctacagaagcaccctgagaaccctgcccggcaccagactggccggcctgaccgagcccgaggccgccgccagattcgactacgaccccggcgccgacgagttcttcttcgacagacaccccggcgtgttcgcctacgtgctgaactactacagaaccggcaagctgcactgccccgccgacgtgtgcggccccctgttcgaggaggagctgggcttctggggcatcgacgagaccgacgtggaggcctgctgctggatgacctacagacagcacagagacgccgaggaggccctggacagcttcgaggcccccgaccccgccggcgccgccaacgccgccaacgccgccggcgcccacgacggcggcctggacgacgaggccggcgccggcggcggcggcctggacggcgccggcggcgagctgaagagactgtgcttccaggacgccggcggcggcgccggcggcccccccggcggcgccggcggcgccggcggcacctggtggagaagatggcagcccagagtgtgggccctgttcgaggacccctacagcagcagagccgccagatacgtggccttcgccagcctgttcttcatcctgatcagcatcaccaccttctgcctggagacccacgagggcttcatccacatcagcaacaagaccgtgacccaggccagccccatccccggcgccccccccgagaacatcaccaacgtggaggtggagaccgagcccttcctgacctacgtggagggcgtgtgcgtggtgtggttcaccttcgagttcctgatgagaatcaccttctgccccgacaaggtggagttcctgaagagcagcctgaacatcatcgactgcgtggccatcctgcccttctacctggaggtgggcctgagcggcctgagcagcaaggccgccaaggacgtgctgggcttcctgagagtggtgagattcgtgagaatcctgagaatcttcaagctgaccagacacttcgtgggcctgagagtgctgggccacaccctgagagccagcaccaacgagttcctgctgctgatcatcttcctggccctgggcgtgctgatcttcgccaccatgatctactacgccgagagaatcggcgccgaccccgacgacatcctgggcagcaaccacacctacttcaagaacatccccatcggcttctggtgggccgtggtgaccatgaccaccctgggctacggcgacatgtaccccaagacctggagcggcatgctggtgggcgccctgtgcgccctggccggcgtgctgaccatcgccatgcccgtgcccgtgatcgtgaacaacttcggcatgtactacagcctggccatggccaagcagaagctgcccaagaagaagaacaagcacatccccagacccccccagcccggcagccccaactactgcaagcccgacccccccccccccccccccccccacccccaccacggcagcggcggcatcagcccccccccccccatcaccccccccagcatgggcgtgaccgtggccggcgcctaccccgccggcccccacacccaccccggcctgctgagaggcggcgccggcggcctgggcatcatgggcctgccccccctgcccgcccccggcgagccctgccccctggcccaggaggaggtgatcgagatcaacagagccgaccccagacccaacggcgaccccgccgccgccgccctggcccacgaggactgccccgccatcgaccagcccgccatgagccccgaggacaagagccccatcacccccggcagcagaggcagatacagcagagacagagcctgcttcctgctgaccgactacgcccccagccccgacggcagcatcagaaaggccctggtgaccgcctag

SEQ ID NO: 319703 - DNA, 1629 bp, Artificial Sequence
  derived and/or modified sequence
atgacctacagacagcacagagacgccgaggaggccctggacagcttcgaggcccccgaccccgccggcgccgccaacgccgccaacgccgccggcgcccacgacggcggcctggacgacgaggccggcgccggcggcggcggcctggacggcgccggcggcgagctgaagagactgtgcttccaggacgccggcggcggcgccggcggcccccccggcggcgccggcggcgccggcggcacctggtggagaagatggcagcccagagtgtgggccctgttcgaggacccctacagcagcagagccgccagatacgtggccttcgccagcctgttcttcatcctgatcagcatcaccaccttctgcctggagacccacgagggcttcatccacatcagcaacaagaccgtgacccaggccagccccatccccggcgccccccccgagaacatcaccaacgtggaggtggagaccgagcccttcctgacctacgtggagggcgtgtgcgtggtgtggttcaccttcgagttcctgatgagaatcaccttctgccccgacaaggtggagttcctgaagagcagcctgaacatcatcgactgcgtggccatcctgcccttctacctggaggtgggcctgagcggcctgagcagcaaggccgccaaggacgtgctgggcttcctgagagtggtgagattcgtgagaatcctgagaatcttcaagctgaccagacacttcgtgggcctgagagtgctgggccacaccctgagagccagcaccaacgagttcctgctgctgatcatcttcctggccctgggcgtgctgatcttcgccaccatgatctactacgccgagagaatcggcgccgaccccgacgacatcctgggcagcaaccacacctacttcaagaacatccccatcggcttctggtgggccgtggtgaccatgaccaccctgggctacggcgacatgtaccccaagacctggagcggcatgctggtgggcgccctgtgcgccctggccggcgtgctgaccatcgccatgcccgtgcccgtgatcgtgaacaacttcggcatgtactacagcctggccatggccaagcagaagctgcccaagaagaagaacaagcacatccccagacccccccagcccggcagccccaactactgcaagcccgacccccccccccccccccccccccacccccaccacggcagcggcggcatcagcccccccccccccatcaccccccccagcatgggcgtgaccgtggccggcgcctaccccgccggcccccacacccaccccggcctgctgagaggcggcgccggcggcctgggcatcatgggcctgccccccctgcccgcccccggcgagccctgccccctggcccaggaggaggtgatcgagatcaacagagccgaccccagacccaacggcgaccccgccgccgccgccctggcccacgaggactgccccgccatcgaccagcccgccatgagccccgaggacaagagccccatcacccccggcagcagaggcagatacagcagagacagagcctgcttcctgctgaccgactacgcccccagccccgacggcagcatcagaaaggccctggtgaccgcctag

SEQ ID NO: 319704 - DNA, 1299 bp, Artificial Sequence
  derived and/or modified sequence
atgccccacagccccctgatcagcatcccccacgtgtggtgccaccccgaggaggaggagagaatgcacgacgagctgctgcaggccgtgagcaagggccccgtgatgttcagagacgtgagcatcgacttcagccaggaggagtgggagtgcctggacgccgaccagatgaacctgtacaaggaggtgatgctggagaacttcagcaacctggtgagcgtgggcctgagcaacagcaagcccgccgtgatcagcctgctggagcagggcaaggagccctggatggtggacagagagctgaccagaggcctgtgcagcgacctggagagcatgtgcgagaccaagatcctgagcctgaagaagagacacttcagccaggtgatcatcaccagagaggacatgagcaccttcatccagcccaccttcctgatccccccccagaagaccatgagcgaggagaagccctgggagtgcaagatctgcggcaagaccttcaaccagaacagccagttcatccagcaccagagaatccacttcggcgagaagcactacgagagcaaggagtacggcaagagcttcagcagaggcagcctggtgaccagacaccagagaatccacaccggcaagaagccctacgagtgcaaggagtgcggcaaggccttcagctgcagcagctacttcagccagcaccagagaatccacaccggcgagaagccctacgagtgcaaggagtgcggcaaggccttcaagtactgcagcaacctgaacgaccaccagagaatccacaccggcgagaagccctacgagtgcaaggtgtgcggcaaggccttcaccaagagcagccagctgttcctgcacctgagaatccacaccggcgagaagccctacgagtgcaaggagtgcggcaaggccttcacccagcacagcagactgatccagcaccagagaatgcacaccggcgagaagccctacgagtgcaagcagtgcggcaaggccttcaacagcgccagcaccctgaccaaccaccacagaatccacgccggcgagaagctgtacgagtgcgaggagtgcagaaaggccttcatccagagcagcgagctgatccagcaccagagaatccacaccgacgagaagccctacgagtgcaacgagtgcggcaaggccttcaacaagggcagcaacctgaccagacaccagagaatccacaccggcgagaagccctacgactgcaaggagtgcggcaaggccttcggcagcagaagcgacctgatcagacacgagggcatccacaccggctag

SEQ ID NO: 319705 - DNA, 1299 bp, Artificial Sequence
  derived and/or modified sequence
atgcctcacagcccccttatatcaattcctcacgtgtggtgccaccctgaagaggaggagaggatgcacgatgagctattgcaagcggttagcaagggacctgtgatgtttcgggacgtcagcatcgatttttcccaggaggaatgggaatgcctagacgccgatcagatgaatctgtacaaagaggtgatgctagagaatttcagcaacctggtctcggtcgggctatctaatagcaagcccgccgtgatctctctcttggagcagggaaaggaaccctggatggtcgatagagagctgactcgcggactgtgcagcgatctagaatcgatgtgcgagaccaagatcctgtctctaaagaaacggcacttcagtcaggttattatcacccgcgaagatatgtctacattcatccagccgacgttcttgatcccaccccagaagaccatgtcagaggagaaaccctgggaatgcaagatttgtggaaagacgtttaatcaaaattcccaatttattcaacatcagcgcatccactttggagagaaacattacgagagcaaggagtatgggaaaagcttctccagggggagtttagtgacaaggcaccagagaatccatactggaaagaaaccatacgagtgcaaggaatgtggtaaagcatttagctgttccagttatttcagtcaacaccagcgcatccatacaggggaaaagccttatgaatgcaaagagtgtgggaaggctttcaagtactgctcgaaccttaatgatcatcagcgcatccacacaggagagaagccttatgagtgtaaagtatgcggtaaggcctttactaagtcctcacagcttttcttacatctccgaattcataccggagagaagccatacgagtgtaaagagtgcgggaaggcatttacacagcattctcgccttattcagcaccagcggatgcacaccggcgaaaaaccctacgagtgcaagcagtgcggaaaagctttcaactctgctagcaccctgacgaaccatcacaggattcacgccggcgaaaaattatacgaatgtgaagagtgccggaaggcattcattcagtcctccgagctcatccagcaccagaggattcacacagatgagaaaccctatgagtgcaatgaatgtggcaaggcatttaacaagggttcaaaccttacacggcatcaaaggatccacactggcgagaaaccttacgattgtaaggagtgtggaaaggcattcggcagccgcagcgacttaatcagacacgagggaatccatacaggatag

SEQ ID NO: 319706 - DNA, 1299 bp, Artificial Sequence
  derived and/or modified sequence
atgccccattcccccctgatctcaattccccatgtgtggtgccacccagaagaagaagaaagaatgcatgacgagctgctccaggctgtgtccaagggcccggtgatgttcagggatgtgagcatagacttctctcaagaagaatgggagtgtctggacgccgatcagatgaatttgtataaagaggtgatgctggagaacttcagcaatcttgtatctgtgggtctgagcaacagcaaaccggccgtcatctccttattagagcaaggcaaggagccctggatggtagacagggaacttacccgcggcctgtgctctgatttggagagcatgtgcgaaacaaagattctgtccttgaagaagaggcacttttcgcaggtcatcattactcgcgaggacatgtctacatttattcaacctacattcctaatccctccccagaagacaatgagcgaagagaaaccctgggagtgtaagatctgcgggaagacattcaatcaaaatagtcagtttatacagcaccaaaggatacactttggcgaaaaacattatgagtctaaagaatacgggaaaagctttagccgaggctccctggtgactcgccaccaacggatccatactggcaagaagccctacgaatgtaaagagtgcggcaaggccttttcctgctccagttactttagccagcatcaacgcatccatactggcgaaaaaccgtacgagtgtaaagagtgcggaaaggccttcaaatattgttcaaatcttaacgaccatcagaggatccacactggcgaaaagccgtacgagtgtaaggtttgcggtaaggcttttacgaagagctcacagctctttttgcacctgagaatccataccggggagaagccttatgagtgtaaggagtgtggcaaggccttcacgcagcacagccggcttattcagcaccagcgaatgcatacgggagagaaaccctacgagtgtaagcaatgcggaaaagccttcaactccgcttccactctgacaaaccaccataggattcacgcgggagagaaactctacgaatgtgaggagtgtaggaaggctttcatacaaagttcagagctgatacagcaccagcggatccatactgacgagaagccgtacgagtgtaatgagtgtggaaaggcctttaacaaagggtccaacctgactcgccaccaacgcatacacaccggagagaagccctatgattgtaaggaatgcggtaaagcttttggatcacggagtgacttgattcgccacgagggcatccatacggggtag

SEQ ID NO: 319707 - DNA, 1299 bp, Artificial Sequence
  derived and/or modified sequence
atgccccacagccccctcatcagcatcccccacgtgtggtgccaccctgaggaggaggagaggatgcatgatgagctgctgcaggccgtgtccaagggccctgtgatgttcagagatgtgtccattgacttcagccaggaggagtgggagtgcctggatgctgaccagatgaacctgtacaaggaggtgatgctggagaacttcagcaacctggtgtctgtgggcctgagcaacagcaagccagctgtgatcagcctgctggagcagggcaaggagccctggatggtggaccgggagctgacccggggcctgtgcagcgacctggagagcatgtgtgagaccaagatcctgagcctgaagaagaggcacttcagccaggtgatcatcacccgggaggacatgagcaccttcatccagcccaccttcctgatccccccccagaagaccatgtctgaggagaagccctgggagtgcaagatctgtgggaagaccttcaaccagaacagccagttcatccagcaccagaggatccactttggagagaagcactatgagagcaaggagtatggcaagagcttcagccggggcagcctggtgaccaggcaccagaggatccacacaggcaagaagccctatgagtgcaaggaatgtgggaaggccttcagctgcagcagctacttcagccagcaccagaggatccacactggagagaagccctatgagtgcaaggaatgtgggaaggccttcaagtactgcagcaacctgaatgaccaccagaggatccacactggagagaagccctatgagtgcaaggtgtgtgggaaggccttcaccaagagcagccagctgttcctgcacctgcgcatccacactggagagaagccctatgagtgcaaggaatgtgggaaggccttcacccagcacagccgcctcatccagcaccagaggatgcacactggagagaagccctatgagtgcaagcagtgtgggaaggccttcaacagcgccagcaccctgaccaaccaccaccgcatccatgctggggagaagctgtatgaatgtgaggagtgcaggaaggccttcatccagagcagcgagctgatccagcaccagaggatccacacagatgagaagccctatgaatgtaatgaatgtgggaaggccttcaacaagggcagcaacctgaccaggcaccagaggatccacactggagagaagccctatgactgcaaggaatgtgggaaggccttcggcagcagaagtgacctgatcagacatgagggcatccacactggatag

SEQ ID NO: 319708 - DNA, 1299 bp, Artificial Sequence
  derived and/or modified sequence
atgccccacagccccctgatcagcatcccccacgtgtggtgccaccctgaggaagaggagcgaatgcacgatgaacttttacaggccgtaagcaaaggaccagtgatgtttcgagacgtaagcatcgacttttcccaagaggagtgggagtgcctggacgccgatcagatgaatctttacaaggaggtgatgctggaaaacttctctaatcttgtgagtgtgggtctttccaactcaaagcctgccgtcatcagtcttttggaacaggggaaggagccctggatggtggatagagagctgaccaggggtctgtgttctgatctagagtccatgtgcgaaaccaaaatcctgtccctcaaaaagagacattttagccaggtgataattactcgtgaagacatgtcaacttttatacagccaacattcctgatccccccccagaaaaccatgtccgaagagaagccttgggaatgcaagatctgcgggaagacatttaatcagaacagccagttcatccagcaccagcggatccatttcggagagaagcattacgagagcaaagaatacggaaagtcgttctctaggggatctctggtgacgcgacaccaacgtattcatactggtaagaaaccttatgaatgcaaggaatgtgggaaggctttttcatgtagttcgtacttttcacagcatcagcggattcataccggagaaaaaccctatgaatgcaaggagtgtggcaaagctttcaaatactgttcaaacctcaacgaccaccagaggattcacactggtgaaaaaccttacgaatgtaaagtttgtggtaaagcttttaccaaatcaagccagctgttcctgcacttacgtattcacacgggggaaaaaccctatgaatgtaaggagtgcgggaaggcatttacccagcacagccggctgatccagcatcaacgcatgcataccggcgaaaaaccttatgaatgcaaacagtgtggaaaagccttcaatagtgcttccactctaactaatcaccatagaattcatgccggagaaaaactgtatgaatgtgaggagtgccggaaagcattcatccagagcagtgaattgattcaacaccagcgaattcacaccgacgagaaaccatacgagtgtaacgaatgtggaaaagccttcaataaaggttcaaatctgacacgtcaccagaggatacataccggggagaaaccgtacgactgtaaggaatgcgggaaggcgttcggctcgagaagcgaccttatccgtcacgagggcatccacaccgggtag

SEQ ID NO: 319709 - DNA, 1299 bp, Artificial Sequence
  derived and/or modified sequence
atgccccacagccccctgatcagcatcccccacgtgtggtgccaccccgaggaagaggaaaggatgcacgatgaactgctgcaggccgtttcaaagggacccgtaatgttccgagacgtctctattgatttctctcaggaagagtgggagtgtttggatgccgatcagatgaatctttacaaggaggtgatgctggagaacttctctaacctcgtttccgtgggactgagcaattcaaagccggctgttatcagtcttctggagcaggggaaggaaccctggatggtcgaccgcgaattgaccagaggactctgttcggatttggagtccatgtgcgaaaccaagatcctctcccttaagaagcggcacttcagccaggtgatcatcaccagagaagacatgagcacgttcattcagcccacctttctgattccgccacagaagaccatgtctgaagagaaaccatgggagtgtaagatatgcggcaaaacttttaaccaaaatagccagtttatccaacatcagcggatccatttcggcgagaagcactatgagtctaaagaatacggcaaatcctttagcagggggagcctggttacccggcaccagaggatccataccggcaagaaaccatacgagtgcaaggagtgcgggaaagcattttcctgctcctcctacttttcgcaacatcagaggattcatacaggagaaaaaccatacgagtgcaaagaatgcggaaaagcattcaagtactgcagcaacctgaacgatcaccagaggatccacaccggtgaaaagccatacgaatgcaaagtttgcggtaaggctttcaccaagtccagccagctttttctacacctgaggatacatacaggtgagaagccatacgagtgcaaagagtgtggtaaggcatttacacaacactccaggctgatccaacaccagcgaatgcatacaggtgaaaaaccctacgaatgcaagcagtgcggaaaggcttttaatagtgcctcaacactcaccaatcaccaccgtatccatgccggcgagaaactatacgaatgtgaggaatgccgtaaggcgtttatccagtcctccgagctgatccagcaccagcggatacacaccgatgagaagccatacgaatgcaatgaatgtggcaaggcttttaataagggctcaaacctcacaagacaccagcgaatccacactggagaaaagccgtatgactgtaaggagtgcggaaaagccttcggctcgcgcagcgacctgatcaggcacgaaggtattcataccggttag

SEQ ID NO: 319710 - DNA, 1299 bp, Artificial Sequence
  derived and/or modified sequence
atgccccattctccactcatctcgattccacacgtgtggtgtcatcctgaagaggaagaaaggatgcacgatgagttgctgcaggctgtgtccaagggacccgtcatgtttcgggatgtgagtatcgatttctcccaggaggaatgggagtgtttggacgctgaccagatgaatttatacaaggaggtcatgttggagaactttagcaacttggtgagtgtggggctgagtaatagcaagcctgccgtgatctccctgttggaacagggtaaagagccgtggatggtggatcgcgagctcaccagggggctgtgctccgacctcgaatccatgtgtgaaaccaagatcctgagcttgaagaagaggcacttcagccaggtcatcattaccagggaggacatgtccactttcatacaaccaacctttttaattccccctcagaaaaccatgagtgaggagaagccatgggagtgtaaaatttgcggcaaaacctttaatcaaaatagccaattcattcaacatcagcgaattcatttcggagaaaagcactacgagtcaaaggaatatggcaagagcttttctagaggctccctggttaccaggcaccagcggatacatacagggaaaaagccctacgagtgcaaggagtgcggcaaggcgttctcatgttcttcgtatttttctcagcaccagcggattcacacaggtgagaagccttacgagtgtaaagagtgcggaaaagctttcaaatactgctcaaacctgaatgaccatcagcgtattcatactggcgaaaaaccctatgagtgtaaagtgtgtgggaaagcctttactaagtcttcccagctgttcctgcatctgcggatccacaccggagaaaagccatatgagtgcaaggagtgcggcaaagcttttacacagcactccagactcattcaacaccagcggatgcacacaggcgagaagccctatgaatgcaagcagtgcgggaaagcattcaatagcgcttccactctgactaaccaccatcggatacacgctggagagaaattatacgagtgcgaagagtgcagaaaagccttcatacaatcgtctgaactgatccagcatcagagaatccataccgacgagaagccctatgaatgcaatgaatgcggtaaggcattcaacaagggatccaacctcacaaggcaccagcgtatacacactggggaaaagccgtacgattgcaaagagtgcgggaaggctttcgggtccaggtcggacctcatccggcacgagggtattcatacgggatag

SEQ ID NO: 319711 - DNA, 1299 bp, Artificial Sequence
  derived and/or modified sequence
atgccacactcacccctcatcagcatcccacacgtgtggtgtcaccccgaggaggaagagcgaatgcacgacgaacttctccaagcggtcagtaaaggcccagtcatgtttagagacgtgtctatagacttctcacaagaggagtgggagtgcctggacgcggatcaaatgaatctgtataaggaggtgatgctggaaaatttcagcaacctggtgtccgtcggactctccaacagcaagccagctgtcatctcccttcttgagcagggaaaggaaccatggatggtggatcgcgagctaactaggggcttatgttctgacctcgaaagtatgtgtgagactaaaatcctatctcttaagaagcgacatttttcccaggtgatcatcactcgggaagacatgagtactttcatccagcccaccttcttgattcctcctcaaaagactatgtcagaggagaaaccatgggaatgtaaaatctgtgggaaaactttcaaccaaaactctcaattcatccagcaccagagaatccatttcggggagaaacactatgagtcaaaagagtatggtaaatctttcagccgcggtagtcttgtgacccggcatcagcggatccatacgggcaagaagccatatgaatgcaaggagtgcgggaaagcctttagctgctcaagctactttagccaacaccagcggatacacacaggggagaagccttatgagtgtaaggaatgcggtaaggctttcaagtattgttctaatctgaacgaccaccagcgaattcacaccggagaaaaaccttacgaatgtaaggtatgcgggaaagcatttacaaaatcatcccagttatttcttcacctccggattcacaccggtgaaaaaccgtacgagtgcaaggaatgtgggaaagcctttacccagcactctcgcctgatccaacaccagcggatgcatacaggagagaagccctacgaatgtaagcagtgcggcaaggcttttaacagcgctagtacactgaccaatcatcacaggatccacgcaggcgagaagctgtacgaatgtgaggaatgccgtaaggctttcatacagtccagcgagctgatccaacatcagcgtatccacactgacgaaaagccgtatgaatgcaacgaatgtggaaaggccttcaataagggcagcaatttgacgagacatcaaaggattcatacgggagagaagccttatgactgtaaagagtgcggcaaagctttcggatcgcgcagtgaccttatcagacatgagggaatccacacaggctag

SEQ ID NO: 319712 - protein, 160 aa, Artificial Sequence
  derived and/or modified sequence
MSLLENHTRQADEDYSHDLMLLRLTEPADTITDAVKVVELPTEEPEVGSTCLASGWGSIEPENFSFPDDLQCVDLKILPNDECKKAHVQKVTDFMLCVGHLEGGKDTCVGDSGGPLMCDGVLQGVTSWGYVPCGTPNKPSVAVRVLSYVKWIEDTIAENS

SEQ ID NO: 319713 - DNA, 483 bp, Artificial Sequence
  derived and/or modified sequence
atgagcctccttgaaaaccatacaaggcaggctgatgaggactattcccacgacctcatgctgcttaggctgaccgagcctgccgacaccatcaccgacgccgtgaaggtcgtggagcttcccacagaggaacccgaggtgggctccacctgcttggcatcggggtggggctctatcgagcctgaaaacttttcgttccccgacgatcttcagtgcgtggacctcaaaattctgccgaatgatgagtgtaaaaaagcccatgtgcagaaggtgactgattttatgctgtgtgtgggtcatctggagggcggaaaggacacctgtgtgggggactctgggggccccctgatgtgtgatggggtcctgcaaggtgtgacaagttggggatacgtcccctgcggaactcctaataagccctccgtggccgtgcgggtgctgagctacgtgaaatggatagaggatacaattgctgaaaactcctag

SEQ ID NO: 319714 - DNA, 483 bp, Artificial Sequence
  derived and/or modified sequence
atgagcctgctggagaaccacacccggcaggctgatgaggactacagccatgacctgatgctgctgcggctgacagagcctgctgacaccatcacagatgctgtgaaggtggtggagctgcccacagaggagcctgaggtgggcagcacctgcctggccagcggctggggcagcattgagcctgagaacttctccttcccagatgacctgcagtgtgtggacctgaagatcctgcccaatgatgagtgcaagaaggcccacgtgcagaaggtgacagacttcatgctgtgtgtgggccacctggagggcggcaaggacacctgtgtgggggacagcggcggccccctgatgtgtgatggagtgctgcagggcgtgacctcctggggctacgtgccctgtggcacccccaacaagcccagcgtggccgtgcgggtgctgtcctatgtgaagtggattgaggacaccatcgccgagaacagctag

SEQ ID NO: 319715 - DNA, 483 bp, Artificial Sequence
  derived and/or modified sequence
atgagcctgctggagaaccacacccggcaggccgacgaggactactcacacgaccttatgttgctcaggctgacggaacccgccgatactatcactgatgccgtaaaagtggtggagctgccaaccgaggagcccgaagttggtagtacctgcttggcctccggttggggaagtattgagcccgagaatttctctttcccagatgatcttcagtgtgtggaccttaagatcctaccgaacgacgaatgtaaaaaggcccacgtgcagaaggtgactgactttatgctgtgcgttgggcatctcgagggaggaaaagatacttgtgtcggggacagcggtggacctctgatgtgcgatggggtcctccagggtgttacgtcctggggctacgtcccatgcgggacacctaacaagccgagcgtagccgtgcgggtgctcagctacgtgaagtggatagaggataccatcgccgagaacagttag

SEQ ID NO: 319716 - DNA, 483 bp, Artificial Sequence
  derived and/or modified sequence
atgtccctccttgagaatcacaccagacaggctgacgaagactattcccacgatttaatgctgctacgcttgacagagcctgctgacaccatcacagatgctgtgaaggtggttgagctgccaactgaagagcccgaggtcggcagcacctgtttagcgtcaggatggggttccatagaacccgagaacttcagttttccggacgacttgcaatgcgtggacttgaaaattcttcctaacgacgaatgcaagaaggcacacgttcagaaggtgactgatttcatgctgtgcgttggtcaccttgagggaggcaaagatacctgcgttggcgattccggaggccctctgatgtgcgacggcgtgctccagggggttacttcatggggctatgtgccttgcgggacgccgaacaagccaagtgttgctgtacgggtgctgagttacgtcaagtggatcgaggatacaattgccgaaaactcctag

SEQ ID NO: 319717 - DNA, 483 bp, Artificial Sequence
  derived and/or modified sequence
atgagcctgctggagaaccacaccagacaggccgacgaggactacagccacgacctgatgctgctgagactgaccgagcccgccgacaccatcaccgacgccgtgaaggtggtggagctgcccaccgaggagcccgaggtgggcagcacctgcctggccagcggctggggcagcatcgagcccgagaacttcagcttccccgacgacctgcagtgcgtggacctgaagatcctgcccaacgacgagtgcaagaaggcccacgtgcagaaggtgaccgacttcatgctgtgcgtgggccacctggagggcggcaaggacacctgcgtgggcgacagcggcggccccctgatgtgcgacggcgtgctgcagggcgtgaccagctggggctacgtgccctgcggcacccccaacaagcccagcgtggccgtgagagtgctgagctacgtgaagtggatcgaggacaccatcgccgagaacagctag

SEQ ID NO: 319718 - protein, 179 aa, Artificial Sequence
  derived and/or modified sequence
MGRPGLGAAVSDLGEAVSLSQGLLLLLLLSMGGAWASREPLRPWCHPINAILAVEKEGCPVCITVNTTICAGYCPTMMRVLQAVLPPLPQVVCTYRDVRFESIRLPGCPRGVDPVVSFPVALSCRCGPCRRSTSDCGGPKDHPLTCDHPQQASSSSKDPPRSLPSPSRLLEPDTPILPQ

SEQ ID NO: 319719 - DNA, 540 bp, Artificial Sequence
  derived and/or modified sequence
atgggcagacccggcctgggcgccgccgtgagcgacctgggcgaggccgtgagcctgagccagggcctgctgctgctgctgctgctgagcatgggcggcgcctgggccagcagagagcccctgagaccctggtgccaccccatcaacgccatcctggccgtggagaaggagggctgccccgtgtgcatcaccgtgaacaccaccatctgcgccggctactgccccaccatgatgagagtgctgcaggccgtgctgccccccctgccccaggtggtgtgcacctacagagacgtgagattcgagagcatcagactgcccggctgccccagaggcgtggaccccgtggtgagcttccccgtggccctgagctgcagatgcggcccctgcagaagaagcaccagcgactgcggcggccccaaggaccaccccctgacctgcgaccacccccagcaggccagcagcagcagcaaggacccccccagaagcctgcccagccccagcagactgctggagcccgacacccccatcctgccccagtag

SEQ ID NO: 319720 - DNA, 540 bp, Artificial Sequence
  derived and/or modified sequence
atgggacgccctggacttggtgccgccgtttctgatcttggggaggccgtttctctgagtcagggacttttgctgctcctcctgctgtctatgggaggtgcttgggcctctcgggagcccctgaggccatggtgtcatcctattaacgcaatattggcggtggagaaagagggatgccctgtgtgtataaccgttaatacaaccatttgtgctggatactgcccgaccatgatgcgggttcttcaggccgttcttccacccctgccgcaagtagtttgtacataccgtgacgtgcgctttgagtcaattcgacttccgggctgccctaggggcgttgatccagtcgttagcttccctgtggctctgtcctgccgatgtggcccatgccgcagaagcacatcggactgcgggggcccaaaagatcaccccctaacctgtgaccacccccagcaggcttccagctcctctaaagaccctcctagaagcctacccagcccgagccgccttctagagcccgatactcctattctgccgcagtag

SEQ ID NO: 319721 - DNA, 540 bp, Artificial Sequence
  derived and/or modified sequence
atgggccggcccggcctgggcgctgctgtgtctgacctgggggaggccgtgtccctgagccagggcctgctgctgctgctgctgctgtccatgggcggggcctgggccagccgggagcccctgcggccctggtgccaccccatcaatgccatcctggccgtggagaaggagggctgccctgtgtgcatcaccgtgaacaccaccatctgtgccggctactgccccaccatgatgagggtgctgcaggccgtgctgccccccctgccccaggtggtgtgcacctacagagatgtgcgctttgagagcatccggctgcccggctgcccccggggcgtggaccctgtggtgtccttccctgtggccctgagctgccgctgtggcccctgccgccgcagcaccagtgactgtggcggccccaaggaccaccccctgacctgtgaccacccccagcaggccagcagcagcagcaaggaccccccaagaagcctgcccagccccagccggctgctggagccagacacccccatcctgccccagtag

SEQ ID NO: 319722 - DNA, 540 bp, Artificial Sequence
  derived and/or modified sequence
atgggccggcccggcctgggcgccgccgtgagcgacctgggcgaggctgtaagcctgagccagggactgctcctgcttctgctcctctccatgggcggggcttgggccagccgggagccgctgcggccttggtgccacccaatcaacgcgattttggccgtagaaaaggaggggtgcccagtatgtatcacagtcaatacaaccatttgtgcaggatactgccctacaatgatgagggtactccaggccgtgttacctccccttccccaagttgtgtgcacatatcgtgacgtaagatttgaatcaatcaggctgcccggttgtcccaggggcgttgaccctgtggtgagttttcccgtggcattgagctgcaggtgcggaccatgcaggcgttcaactagcgactgtggaggaccaaaggaccacccgctgacttgtgatcacccccagcaggcctcctcctccagcaaggacccccccaggtctctgccaagtccatccaggctactggagccagacacgcccatactgccccagtag

SEQ ID NO: 319723 - DNA, 540 bp, Artificial Sequence
  derived and/or modified sequence
atgggtcgtcccggattgggagccgctgttagcgatctgggagaagctgtgagtctgagtcaaggcttgttgttgttactattattgtcgatgggcggtgcgtgggcatcacgtgagcccctgcgtccatggtgtcaccctattaatgcaattctggctgtcgagaaggaaggatgtccagtctgtatcaccgtgaacactaccatctgtgctggctactgcccaactatgatgcgagtgttacaggccgtgcttccccctcttccccaggtggtgtgcacataccgggacgtcaggtttgagagcatcagactcccaggatgcccacggggagtcgaccccgtagtgagctttccggtggccctaagttgcagatgcggcccttgtagacggagtaccagcgattgcggcggacctaaagaccacccattgacgtgtgatcaccctcagcaggcctcgagctcttctaaggatcccccacgctcactcccttcgccttccaggttgctcgaacctgatacgccaatactcccgcagtag

SEQ ID NO: 319724 - DNA, 540 bp, Artificial Sequence
  derived and/or modified sequence
atgggcagacctggacttggcgccgctgtgagtgacctgggcgaggctgtgtcactgtctcaaggcctgctgttgctgctgctgctaagcatggggggggcctgggcttctcgcgagccgcttcgaccgtggtgccaccccataaacgccattttagccgtggaaaaagaaggatgtcccgtatgcatcacggtgaacacaaccatttgtgcaggctactgtcctaccatgatgcgcgttctgcaggctgtgctgccccccttgcctcaggtagtgtgcacctacagggatgtaaggttcgagtccatcaggctgcctggctgtcccagaggagtggacccagttgtctctttccccgtagccctgagttgtcgttgcggtccctgcagaaggtctacgagcgactgtggtggcccgaaagatcaccctttgacatgcgatcacccacagcaggcatcatctagctcaaaagatcctcccagaagtttgccatccccgtccaggctccttgagcccgacacgccaattcttccacaatag

SEQ ID NO: 319725 - DNA, 583 bp, Artificial Sequence
  derived and/or modified sequence
cgggaagggtctctgggtctttgtgggtggtgtaccacgcgggatgggaaggccaggactcggggctgcggtctcagacctgggtgaagcagtgtccttgtcccaggggctgctgctgttgctgctgctgagcatgggcggggcatgggcatccagggagccgcttcggccatggtgccaccccatcaatgccatcctggctgtcgagaaggagggctgcccagtgtgcatcaccgtcaacaccaccatctgtgccggctactgccccaccatgatgcgcgtgctgcaggcggtcctgccgcccctgcctcaggtggtgtgcacctaccgtgatgtgcgcttcgagtccatccggctccctggctgcccgcgtggtgtggaccccgtggtctccttccctgtggctctcagctgtcgctgtggaccctgccgccgcagcacctctgactgtgggggtcccaaagaccaccccttgacctgtgaccacccccaacaggcctcctcttcctctaaagaccctccccgcagccttccaagtccatcccgactcctggagcccgacaccccgatcctcccacaataa

SEQ ID NO: 319726 - DNA, 540 bp, Artificial Sequence
  derived and/or modified sequence
atgggtaggcctggactcggagctgccgtatctgaccttggggaggctgtatcgctcagtcagggcctgttgttgctgctcttgttaagtatgggcggggcttgggccagccgagaacctctgcgcccatggtgtcaccctatcaatgctattctggccgttgaaaaggaggggtgcccagtatgcatcacagtaaatactacaatctgtgccggatattgtccaaccatgatgcgggttttacaagccgtcttaccacccttacctcaggtagtgtgcacataccgggatgttcgatttgagtctattcggctcccgggctgtccacgcggcgtagaccctgtggtatccttccctgttgctctctcatgtcgatgcgggccctgtcgaagaagtacctctgattgcggcggccccaaggatcacccccttacatgtgaccatcctcagcaggcctccagctcttccaaagaccctccacggtcactaccatcacccagccggcttctcgaaccggacaccccaatcttgccccagtag

SEQ ID NO: 319727 - RNA, 540 nt, Artificial Sequence
  derived and/or modified sequence
augggcagaccuggacuuggcgccgcugugagugaccugggcgaggcugugucacugucucaaggccugcuguugcugcugcugcuaagcauggggggggccugggcuucucgcgagccgcuucgaccguggugccaccccauaaacgccauuuuagccguggaaaaagaaggaugucccguaugcaucacggugaacacaaccauuugugcaggcuacuguccuaccaugaugcgcguucugcaggcugugcugccccccuugccucagguagugugcaccuacagggauguaagguucgaguccaucaggcugccuggcugucccagaggaguggacccaguugucucuuuccccguagcccugaguugucguugcggucccugcagaaggucuacgagcgacugugguggcccgaaagaucacccuuugacaugcgaucacccacagcaggcaucaucuagcucaaaagauccucccagaaguuugccauccccguccaggcuccuugagcccgacacgccaauucuuccacaauag

SEQ ID NO: 319728 - RNA, 540 nt, Artificial Sequence
  derived and/or modified sequence
auggguaggccuggacucggagcugccguaucugaccuuggggaggcuguaucgcucagucagggccuguuguugcugcucuuguuaaguaugggcggggcuugggccagccgagaaccucugcgcccauggugucacccuaucaaugcuauucuggccguugaaaaggaggggugcccaguaugcaucacaguaaauacuacaaucugugccggauauuguccaaccaugaugcggguuuuacaagccgucuuaccacccuuaccucagguagugugcacauaccgggauguucgauuugagucuauucggcucccgggcuguccacgcggcguagacccugugguauccuucccuguugcucucucaugucgaugcgggcccugucgaagaaguaccucugauugcggcggccccaaggaucacccccuuacaugugaccauccucagcaggccuccagcucuuccaaagacccuccacggucacuaccaucacccagccggcuucucgaaccggacaccccaaucuugccccaguag

SEQ ID NO: 319729 - protein, 410 aa, Artificial Sequence
  derived and/or modified sequence
MVRVRAVVMARDDSSGGWLPVGGGGLSQVSVCRVRGARPEGGARQGHYVIHGERLRDQKTTLECTLKPGLVYNKVNPIFHHWSLGDCKFGLTFQSPAEADEFQKSLLAALAALGRGSLTPSSSSSSSSPSQDTAETPCPLTSHVDSDSSSSHSRQETPPSAAAAPIITMESASGFGPTTPPQRRRSSAQSYPPLLPFTGIPEPSEPLAGAGGLGWGGRGYEDYRRSGPPAPLALSTCVVRFAKTGALRGAALGPPAALPAPLTEAAPPAPPARPPPGPGPSSAPAKASPEAEEAARCVHCRALFRRRADGRGGRCAEAPDPGRLLVRRLSCLWCAESLLYHCLSDAEGDFSDPCACEPGHPRPAARWAALAALSLAVPCLCCYAPLRACHWVAARCGCAGCGGRHEEAAR

SEQ ID NO: 319730 - protein, 152 aa, Artificial Sequence
  derived and/or modified sequence
MVRVRAVVMARDDSSGGWLPVGGGGLSQVSVCRVRGARPEGGARQGHYVIHGERLRDQKTTLECTLKPGLVYNKVNPIFHHWSLGDCKFGLTFQSPAEADEFQKSLLAALAALGRGSLTPSSSSSSSSPSQDTAETPCPLTLSQYFRHMLCP

SEQ ID NO: 319731 - DNA, 1233 bp, Artificial Sequence
  derived and/or modified sequence
atggtgagagtgagagccgtggtgatggccagagacgacagcagcggcggctggctgcccgtgggcggcggcggcctgagccaggtgagcgtgtgcagagtgagaggcgccagacccgagggcggcgccagacagggccactacgtgatccacggcgagagactgagagaccagaagaccaccctggagtgcaccctgaagcccggcctggtgtacaacaaggtgaaccccatcttccaccactggagcctgggcgactgcaagttcggcctgaccttccagagccccgccgaggccgacgagttccagaagagcctgctggccgccctggccgccctgggcagaggcagcctgacccccagcagcagcagcagcagcagcagccccagccaggacaccgccgagaccccctgccccctgaccagccacgtggacagcgacagcagcagcagccacagcagacaggagaccccccccagcgccgccgccgcccccatcatcaccatggagagcgccagcggcttcggccccaccacccccccccagagaagaagaagcagcgcccagagctacccccccctgctgcccttcaccggcatccccgagcccagcgagcccctggccggcgccggcggcctgggctggggcggcagaggctacgaggactacagaagaagcggcccccccgcccccctggccctgagcacctgcgtggtgagattcgccaagaccggcgccctgagaggcgccgccctgggcccccccgccgccctgcccgcccccctgaccgaggccgccccccccgccccccccgccagacccccccccggccccggccccagcagcgcccccgccaaggccagccccgaggccgaggaggccgccagatgcgtgcactgcagagccctgttcagaagaagagccgacggcagaggcggcagatgcgccgaggcccccgaccccggcagactgctggtgagaagactgagctgcctgtggtgcgccgagagcctgctgtaccactgcctgagcgacgccgagggcgacttcagcgacccctgcgcctgcgagcccggccaccccagacccgccgccagatgggccgccctggccgccctgagcctggccgtgccctgcctgtgctgctacgcccccctgagagcctgccactgggtggccgccagatgcggctgcgccggctgcggcggcagacacgaggaggccgccagatag

SEQ ID NO: 319732 - DNA, 459 bp, Artificial Sequence
  derived and/or modified sequence
atggtgagagtgagagccgtggtgatggccagagacgacagcagcggcggctggctgcccgtgggcggcggcggcctgagccaggtgagcgtgtgcagagtgagaggcgccagacccgagggcggcgccagacagggccactacgtgatccacggcgagagactgagagaccagaagaccaccctggagtgcaccctgaagcccggcctggtgtacaacaaggtgaaccccatcttccaccactggagcctgggcgactgcaagttcggcctgaccttccagagccccgccgaggccgacgagttccagaagagcctgctggccgccctggccgccctgggcagaggcagcctgacccccagcagcagcagcagcagcagcagccccagccaggacaccgccgagaccccctgccccctgaccctgagccagtacttcagacacatgctgtgcccctag

SEQ ID NO: 319733 - DNA, 1233 bp, Artificial Sequence
  derived and/or modified sequence
atggtccgagtaagggctgttgttatggctcgcgacgatagtagcggtggatggctacctgtcggcggggggggtttatctcaggtgtctgtttgtagagtgcgaggcgccagacccgagggcggggcacgccagggtcattatgtgatccacggtgagaggctgcgagatcaaaaaaccactcttgagtgcacacttaagccaggcctcgtttataacaaagtgaaccccattttccaccactggagtttgggggattgtaagttcggcctgaccttccagtccccagcggaagccgacgaattccaaaagtcacttctggctgctctcgcagctctcgggagagggtcactgaccccctcaagttcctctagttcttcgagtccatcacaagataccgcagagacaccttgccctctcacctcccacgtcgatagtgatagtagctcatcacacagccgccaggaaacacctccaagcgccgccgccgctcccattatcactatggagtccgcatccggcttcgggcccaccacaccccctcagcgtcgccgcagtagtgcccagagttacccccccctgctaccttttaccgggattcctgaaccgtccgaacctttggcgggggccgggggtctgggttggggaggcaggggatatgaagattacaggcgaagtggcccaccagcccctcttgccctgtcaacctgcgtcgtgcgatttgcaaagaccggagcgctgcgtggcgcagctttaggccctccagcggcactgcctgctccacttaccgaggcagccccccccgcccctcccgctagaccgcctcccggtcctggtcctagcagcgcacccgctaaggcaagtcccgaagcagaggaagcagcacgttgtgttcattgtcgagccctgttccgcagacgcgcagacggaaggggggggaggtgcgctgaagcgcccgatcctggccgcttactggtgcgtaggttgtcttgtctctggtgcgctgagagcctcctctatcactgcctgtctgatgccgagggagatttcagcgatccatgcgcgtgcgagccagggcatccccgccctgctgcacgatgggccgcactcgctgccctgagcttagctgttccctgcctgtgctgttatgcccctcttagggcatgtcattgggtggctgcaagatgtggctgcgctggatgcgggggtcggcacgaagaagctgcaagatag

SEQ ID NO: 319734 - DNA, 459 bp, Artificial Sequence
  derived and/or modified sequence
atggttcgggtcagagctgtggtaatggcacgcgacgattctagtggaggatggctgcccgtgggaggcggaggtctgtctcaagtctctgtgtgccgcgtgcggggtgcaaggccagaggggggggctagacagggccattacgttatccatggcgagcgtttacgggatcagaagacaaccttggaatgcacgttgaaacccgggctggtgtacaacaaggtcaacccaatttttcaccactggtccctcggcgactgtaaatttggtctgacgttccagtcccccgccgaggccgacgaattccaaaaatctctgctcgcagccctagctgctctcggccggggaagcctcactccgtccagttcctctagctcttctagcccttcccaggacaccgctgaaaccccttgtccgttaactctatcccaatattttaggcacatgctctgtccgtag

SEQ ID NO: 319735 - DNA, 1233 bp, Artificial Sequence
  derived and/or modified sequence
atggtgcgggtgcgggctgtggtgatggccagagatgacagcagcggcggctggctgcctgtgggcggcggcggcctgagccaggtgtctgtgtgccgggtgcggggggcccggcctgagggcggggcccggcagggccactacgtgattcatggagagcggctgcgggaccagaagaccaccctggagtgcaccctgaagccaggcctggtgtacaacaaggtgaaccccatcttccaccactggagcctgggggactgcaagtttggcctgaccttccagagccctgctgaggctgatgagttccagaagagcctgctggccgccctggccgccctgggccggggcagcctgacccccagcagcagcagcagcagcagcagccccagccaggacacagctgagaccccctgccccctgaccagccacgtggacagcgacagcagcagcagccacagccggcaggagaccccacccagcgctgctgctgcccccatcatcaccatggagagcgccagcggcttcggccccaccaccccaccccagaggcggcgcagcagcgcccagagctacccacccctgctgcccttcaccggcatccctgagcccagcgagcccctggccggggccggcggcctgggctggggcggccggggctatgaggactaccgccgcagcggccccccagcccccctggccctgagcacctgtgtggtgcgctttgccaagacaggagccctgcggggggccgccctgggccccccagctgccctgcctgcccccctgacagaagctgcccccccagcccccccagcccggcccccacctggccctggccccagcagcgccccagccaaggccagccctgaggccgaggaggccgcccgctgtgtgcactgccgggccctcttcagaagaagagcagatggccggggcggccgctgtgccgaggccccagaccccggccgcctgctggtgcggcggctgagctgcctgtggtgtgccgagagcctgctgtaccactgcctgagtgatgctgagggggacttcagtgacccctgtgcctgtgagcccggccaccccaggcctgctgcccgctgggccgccctggccgccctgagcctggccgtgccctgcctgtgctgctacgcccccctgcgggcctgccactgggtggccgcccgctgtggctgtgccggctgcggcggcagacatgaggaggccgccaggtag

SEQ ID NO: 319736 - DNA, 459 bp, Artificial Sequence
  derived and/or modified sequence
atggtgcgggtgcgggctgtggtgatggccagagatgacagcagcggcggctggctgcctgtgggcggcggcggcctgagccaggtgtctgtgtgccgggtgcggggggcccggcctgagggcggggcccggcagggccactacgtgattcatggagagcggctgcgggaccagaagaccaccctggagtgcaccctgaagccaggcctggtgtacaacaaggtgaaccccatcttccaccactggagcctgggggactgcaagtttggcctgaccttccagagccctgctgaggctgatgagttccagaagagcctgctggccgccctggccgccctgggccggggcagcctgacccccagcagcagcagcagcagcagcagccccagccaggacacagctgagaccccctgccccctgaccctgagccagtacttccgccacatgctgtgcccctag

SEQ ID NO: 319737 - DNA, 1233 bp, Artificial Sequence
  derived and/or modified sequence
atggtgcgggtgcgggccgtggtgatggcccgggacgacagcagcgggggatggttgcccgtgggggggggcggactgtcccaggttagcgtgtgccgggtccgaggagcgcgacctgagggaggggcgcgacagggtcattacgtcatccatggcgagcgcttgcgggaccagaaaactacactggagtgtaccttgaagcccgggctggtgtataacaaagtaaacccgattttccaccactggagcctgggcgactgtaagttcggactcacctttcaatcgccagcagaggctgacgaatttcaaaaatccttgctggccgccttggccgccttgggtcgtggctcactgacaccgagtagctccagtagctcctccagccctagtcaggatacagccgagaccccttgtcccctgacgagtcacgtggacagcgatagcagtagcagccattctcgccaggaaactccacctagtgcagctgccgcaccaattattacaatggaaagcgcttcaggcttcggccctaccacccctcctcagcgacggaggagcagcgcacaatcatatccccccctgctgccttttaccggtataccagaaccttctgaaccgcttgctggcgccggcggactggggtggggcgggcgcggctacgaagactacagacgatccggaccacccgctccactcgcgctgtctacctgcgtagtccgttttgctaaaaccggcgccctgcggggcgccgccttgggcccgccagctgccctgcctgcccccttaacagaagcggctccacccgcacctcctgctaggccaccccctggtccaggcccttcctccgctccagccaaggctagtccagaggccgaagaagcagctagatgtgtgcattgtcgggccctattcagacgcagggcggacggcaggggggggcgatgcgcagaagcacccgaccccggaaggttgttggtccgacggctgtcatgcttgtggtgcgctgaaagccttctctaccattgcctctctgacgcagaaggtgacttctcagacccctgtgcatgtgagcctggacatccaaggcctgccgccagatgggcagcactggcggcccttagcctggctgtcccttgtctctgctgttatgcacctcttagagcttgtcattgggtagccgcccgatgcggttgtgccggctgcggcggcagacacgaagaggccgccagatag

SEQ ID NO: 319738 - DNA, 459 bp, Artificial Sequence
  derived and/or modified sequence
atggtgcgggtgcgggccgtggtgatggcccgggacgacagcagcggcggctggttacctgtgggtggtggcggcctgtcacaggtgtcagtatgccgagtaaggggcgctcgaccagaaggcggtgccagacaaggccactacgtgatccacggggaaaggctacgggatcaaaaaacaactctcgaatgtacactcaagcccgggctcgtgtacaataaggtcaacccaattttccaccattggagcctaggcgattgcaagttcggactgacgttccagagcccagccgaagcagacgagttccagaaatcgctgctggcggccctggcggcactgggcagaggtagcttgactccttccagtagtagctcttcatcaagtccatctcaggatacagccgaaaccccatgcccactgactttaagccaatattttcggcatatgctatgtccatag

SEQ ID NO: 319739 - DNA, 1233 bp, Artificial Sequence
  derived and/or modified sequence
atggtgcgggtaagagccgtcgtcatggctcgggatgattcctctggtggttggctgccagtagggggaggcggtctcagtcaagtgagtgtttgccgggtgaggggtgctaggcccgaaggaggagcgaggcaaggacactacgtaatacatggcgagaggctgcgggatcagaaaacaacactggaatgcaccctgaaaccgggtctggtgtacaataaggtcaaccctatattccaccattggagtttgggagactgcaaattcgggctgaccttccagtctcctgctgaagccgacgagttccaaaaaagcctgttagccgctctagctgctctcgggcgtgggagtctgactcctagcagttcttcaagcagcagtagcccttctcaggataccgccgagaccccgtgtcccctcacgagtcatgtggattccgactcctccagcagccattctcgccaggagacaccgccaagtgcggctgccgcacccatcataactatggaaagtgccagtgggtttgggcctaccacacccccacaacgcaggcggtcctctgcacagtcttaccccccactgctcccctttacaggcattccagagccttctgaacctcttgcgggagccggaggactgggatggggtggaagggggtatgaagactacaggcgatccggtcctccagcccctctggcgctgtcaacttgcgtagttcgatttgcgaaaaccggcgcactcaggggcgcagccttgggaccacccgcagcccttcccgctcccttaaccgaggcagcccctcctgctcccccagctcgcccaccccctgggcctggcccatcaagcgcccctgctaaggcgagccccgaagcagaagaagcagccaggtgtgttcactgcagggctctgttcagacgcagggcggacgggaggggcggaaggtgtgcagaggcccctgaccccggtcgacttctcgtcaggcgtctctcctgtctttggtgcgccgaaagcctgctgtaccattgcctttctgacgctgagggtgatttcagcgacccatgtgcctgtgaacccggacacccccgacccgcagccagatgggccgctctggcagccctgagtctggccgtgccctgcctgtgctgttacgcccctctgcgcgcttgccactgggtggcagcgcgttgtgggtgcgccggttgtggcggtcggcatgaggaggctgcccgatag

SEQ ID NO: 319740 - DNA, 459 bp, Artificial Sequence
  derived and/or modified sequence
atggttagagtgcgcgcagtggttatggccagagatgacagtagcgggggttggctgcccgtcggaggcggagggctgagtcaggtctctgtttgccgcgttcgcggtgcaaggcccgagggtggggctcggcagggccattatgtcattcatggcgaacggctgcgcgaccaaaaaaccacactagaatgtaccctgaagcctggcctggtgtacaataaggtgaacccaattttccaccactggtcattaggggactgtaagtttggtttgacatttcagagcccggcagaagcagacgaatttcagaaaagcctcctggccgcactagccgcattaggacggggatccctaactccttcctcaagctcatcctcatcaagtccttctcaggataccgccgagacaccgtgtccgttgacactctcacagtactttagacatatgctctgtccctag

SEQ ID NO: 319741 - DNA, 1419 bp, Artificial Sequence
  derived and/or modified sequence
aagttggaggggagatgagggttgagggaacattccatgggagagcagggtttgagctcatgactgtgttgtccctgtccttccccccacctcctgcaggtacatggtgcgggtccgagctgtggtgatggcccgagatgactccagtgggggctggctgcctgtggggggcgggggcctcagccaggtgagcgtgtgtcgggtccgaggggccaggcccgaggggggggcccgccaggggcactacgtcatccacggggaacgcctccgggaccagaaaacaaccttggagtgtacactgaagccaggcttggtttacaacaaggtgaatcccatctttcaccactggagcctgggtgactgcaagtttggactgacgtttcagagccctgcagaggctgatgagttccagaagagcctgctggctgcgctggccgcactgggtcgaggctcactcaccccctcctcctcctcctcctcctcctctccttcccaggatactgcagagaccccctgccctctgacgtcccacgtggacagcgactcctcctccagtcacagccgccaggagactcctcccagcgccgctgcggcccccatcatcacgatggagtcagcttcaggcttcgggccgaccacgcccccccagcgccgccgctcctccgctcagagctaccctccgcttctaccgttcacggggattccggaaccctcagagcccctggcaggggcagggggcctggggtggggcggccgcggctacgaggattaccggcgctccgggccacccgcgcccctcgccctgtccacctgcgtcgtgcgcttcgccaagaccggcgcgttgaggggcgctgccctgggtcccccagcggcactacctgcccctttgaccgaggctgcgcccccagcgccccccgctcgcccaccccccggcccgggcccatcctctgcgcctgccaaggcctccccggaagcggaggaggcagcgcgctgcgtgcattgccgcgcgctcttccgtcgcagagcagacgggcgtggcggccgctgcgcagaggccccggacccgggtcgcctcctggtgcgccgtctaagctgcctgtggtgcgccgagagcttgctctaccactgcctgtcggacgccgagggcgacttctcggacccgtgcgcctgcgagccgggccacccgcgccccgccgcgcgctgggccgcgctggccgcgctctccctggcagtgccctgcctctgctgctacgcgcccctgcgcgcgtgccactgggtcgcagcgcgatgcggctgcgccggctgcgggggtcgccacgaggaggctgcgcggtgaggacggcctggtgggtcccctagccggcccgaggacccaaaattgagggtccaggaccccggactccgttcggacctaaaacc

SEQ ID NO: 319742 - DNA, 543 bp, Artificial Sequence
  derived and/or modified sequence
gtacatggtgcgggtccgagctgtggtgatggcccgagatgactccagtgggggctggctgcctgtggggggcgggggcctcagccaggtgagcgtgtgtcgggtccgaggggccaggcccgaggggggggcccgccaggggcactacgtcatccacggggaacgcctccgggaccagaaaacaaccttggagtgtacactgaagccaggcttggtttacaacaaggtgaatcccatctttcaccactggagcctgggtgactgcaagtttggactgacgtttcagagccctgcagaggctgatgagttccagaagagcctgctggctgcgctggccgcactgggtcgaggctcactcaccccctcctcctcctcctcctcctcctctccttcccaggatactgcagagaccccctgccctctgacgctctcccagtacttcaggcatatgctgtgcccttgacagtggccctaaccgcatccttatgaataggtactcttaggatccccgttttacagaggaggaaactgaggctcaaagag

SEQ ID NO: 319743 - DNA, 360 bp, Artificial Sequence
  derived and/or modified sequence
atgagcggttccccccaggcttcgtatccacagacccactcattcacgctgaaacatcaggagatcaggacattctggaatctcaacatgcgcggactcgggggggagggaggaaccgaagaggagagctcgctcggacaagccgggggaaaactgaagactgcagcatggccaagttgggtcgcagaggtgggagctgctggtgctctggccgatcctggcggtcaaaaaagcgggagtttccttccatcgcagcagctgcagtgcatccccgggccagggttgtatgcaggcgaggcctccaaagacccagttctgcggaagctgccatttcagtgtggtaggacccacaatccctag

SEQ ID NO: 319744 - DNA, 195 bp, Artificial Sequence
  derived and/or modified sequence
ccccggcgctggagcctgcaggtgtaccccacagcccccaagaggcagaggcccagcaggatgggccatgatgacaatggcagctttgtggagaagaagagaggaaaatgtggggagaagaaggagaggagtgactgctactacgtgtgtgtggagaggagccgccaccggcggctgcactttgtgctgtactag

SEQ ID NO: 319745 - protein, 201 aa, Artificial Sequence
  derived and/or modified sequence
MGGDENRGVTGHFTFTLYLETPKPSISSSKLNPREAMEAVSLTCDPETPDASYLWWMNGQSLPMSHRLQLSETNRTLFLLGVTKYTAGPYECEIRNPVSASRSDPFTLNLLHGPDLPRIYPSFTYYRSGEVLYLSCSADSNPPAQYSWTINGKFQLSGQKLFIPQITTKHSGLYACSVRNSATGKESSKSMTVKVSDWTLP

SEQ ID NO: 319746 - DNA, 606 bp, Artificial Sequence
  derived and/or modified sequence
atgggcggcgatgaaaatcggggggtcacaggtcactttacctttaccttgtacctggaaaccccaaaaccttcaatcagcagcagtaaactcaacccaagagaggctatggaggccgtcagtcttacctgcgatccggagaccccagacgcatcttacttatggtggatgaatggccagtcactaccaatgtcccacagactgcagctgagcgagaccaatcggactctgtttctcctcggggtgactaaatatacagctggaccctacgaatgtgagattcggaatcccgtatctgcctcacgatctgacccttttactctcaatctgcttcatggccccgacctgccaaggatttatccctcatttacttactaccggtcaggcgaagtcctgtacctctcttgcagtgctgactctaacccgccagcccagtatagttggacaattaacgggaagtttcagctctctggacagaagctctttattccacagatcactaccaagcatagcggattatacgcctgtagcgtacgcaactcagcaaccggaaaggaaagcagtaagtctatgactgttaaagtgagtgactggacccttccatag

SEQ ID NO: 319747 - DNA, 606 bp, Artificial Sequence
  derived and/or modified sequence
atgggaggagatgaaaatagaggagtgacaggccacttcaccttcaccctgtacctggagacccccaagcccagcatcagcagcagcaagctgaacccccgggaggccatggaggccgtgtccctgacctgtgaccctgagaccccagatgccagctacctgtggtggatgaatggccagagcctgcccatgagccaccggctgcagctgtctgagaccaacagaaccctcttcctgctgggcgtgaccaagtacacagctggcccctatgaatgtgagatcagaaatcctgtgtctgccagcagaagtgaccccttcaccctgaacctgctgcacggccctgacctgccccgcatctaccccagcttcacctactaccgcagcggggaggtgctgtacctgagctgcagcgctgacagcaaccccccagcccagtacagctggaccatcaatggcaagttccagctgagcggccagaagctgttcatcccccagatcaccaccaagcacagcggcctgtatgcctgcagcgtgagaaattctgccaccgggaaggagagcagcaagtccatgacagtgaaggtgtctgactggaccctgccctag

SEQ ID NO: 319748 - DNA, 606 bp, Artificial Sequence
  derived and/or modified sequence
atgggcggcgacgagaaccggggcgtgaccggccacttcaccttcacattatacctcgagactcccaagccaagcatatcctccagtaagctgaatcctcgggaggccatggaggctgtgtcactcacttgcgatcccgaaacccccgacgcgagttatctgtggtggatgaacgggcagagcctgccgatgtctcaccggctgcagctgagcgagaccaatcggacactgttcctgttaggagtgactaagtataccgctggcccttacgaatgcgaaatacgcaatcctgtgtcagcctctcggtccgacccctttacacttaatctgctgcatggtcccgacctaccaagaatttacccctcatttacatactaccggagcggcgaggtgctgtacctaagttgctcagcagacagtaaccccccagcccaatattcttggacgattaacggtaaatttcaactgtcaggccagaagctcttcatccctcagatcactacaaagcattcaggcctatacgcatgttctgtccgaaactctgcaacagggaaggagagcagcaagtcaatgactgtgaaggtctctgactggactctcccttag

SEQ ID NO: 319749 - DNA, 1752 bp, Artificial Sequence
  derived and/or modified sequence
cagaaggaggcaggacagcactgctgagagctgtgctcaggaagcttctggatcctaggctcatctccacagaggagaacacacagacagcagagaccatggggctcctctcagcccctccctgcacacagcgcatcacctggaaggggctcctgctcacagcatcacttttaaacttctggaacccacccacgactgcccaagtcacgattgaagcccagccaaccaaagtttctgaggggaaggatgttcttctacttgtccacaatttgccccagaatcttactggctacatctggtacaaagggcaaatcagggacctctaccattacattacatcatatgtagtagacggtcaaataattatatatgggcctgcatacagtggacgagaaacaatatattccaatgcatccctgctgatccagaatgtcacccaggaagacgcaggatcctacaccttacacatcataatgggaggtgatgagaatagaggagtaactggacatttcaccttcaccttatatctggagactcccaagccctccatctccagcagcaaattaaaccccagggaggccatggaggctgtgagcttaacctgtgatcctgagactccggacgcaagctacctgtggtggatgaatggtcagagcctccctatgtctcacaggttgcagttgtctgaaaccaacaggaccctctttctattgggtgtcacaaagtacactgcaggaccctatgaatgtgaaatacggaacccagtgagtgccagccgcagtgacccattcaccctgaatctcctccatggtccagacctccccagaatttacccttcattcacctattaccgttcaggagaagtcctctacttgtcctgttctgcggactctaacccaccggcacagtattcttggacaattaatgggaagtttcagctatcaggacaaaagctctttatcccccaaattactacaaagcatagcgggctctatgcttgctctgttcgtaactcagccactggcaaggaaagctccaaatccatgacagtaaaagtctctgactggacattaccctgaattctactagttcctccaattccattttcttccatggaatcgctaagaaaaagacccactctgttccagaagccctataagctggaggtggacaactcaatgtaaatttcatgggaaaacccttgtacctgaagggtgagccactcagaactcactaaaatgttcgacaccataacaacagatgctcaaactgtaaaccaggacaacaagtggatgacttcacactgtggacagtttttcccaagatgtcagaacaagactccccatcatgatgaggctctcacccctcttaactgtccttgctcatgcctgcctctttcacttggcaggataatgcagtcattagaatttcacatgtagtagcttctgagggtaacaatagagtgtcagatatgtcatctcaacccaaacttttacataacatctcagggggaaatgtggctctctccaccttgcatacaggactcccaatagaaatgaacacagagatattgcccgtgtgtttgcagataagatggtttctatgaagaggtaggaaagctgaaattataatagagtcccctttaaatgcacattctgtggatggctctcgccatttcctaagagatacattgtaaaatgtgacagtaatactgattctagcagaataaaacatgtaccacatttgctaata

SEQ ID NO: 319750 - DNA, 606 bp, Artificial Sequence
  derived and/or modified sequence
atgggaggcgatgagaaccggggtgtcactggccatttcactttcactctgtatctggaaacaccaaagccatcaatttccagttccaaacttaatcctcgagaggccatggaggcggtgtcgctgacttgcgatcctgaaactcccgacgccagctacctgtggtggatgaacggccaatctttgcctatgtctcaccggttgcagctgagcgagaccaatcggacactattcctgttgggggtcaccaaatacacggcaggaccatacgagtgtgaaatcaggaatccggtttctgcaagcagatccgaccctttcacactgaatctgctgcatggcccagatctccccagaatttacccatcttttacttattatagatctggcgaagtgctctacctgagctgtagcgctgattcaaaccctccagctcaatatagctggacaataaacggaaaattccagctcagcgggcagaaactgtttatacctcagatcacaactaagcattcaggactgtacgcctgctccgtccgcaactctgctaccggcaaggagtcctctaagtccatgacggttaaagtatccgactggacactgccctag

SEQ ID NO: 319751 - DNA, 606 bp, Artificial Sequence
  derived and/or modified sequence
atgggcggcgacgagaacagaggcgtgaccggccacttcaccttcaccctgtacctggagacccccaagcccagcatcagcagcagcaagctgaaccccagagaggccatggaggccgtgagcctgacctgcgaccccgagacccccgacgccagctacctgtggtggatgaacggccagagcctgcccatgagccacagactgcagctgagcgagaccaacagaaccctgttcctgctgggcgtgaccaagtacaccgccggcccctacgagtgcgagatcagaaaccccgtgagcgccagcagaagcgaccccttcaccctgaacctgctgcacggccccgacctgcccagaatctaccccagcttcacctactacagaagcggcgaggtgctgtacctgagctgcagcgccgacagcaacccccccgcccagtacagctggaccatcaacggcaagttccagctgagcggccagaagctgttcatcccccagatcaccaccaagcacagcggcctgtacgcctgcagcgtgagaaacagcgccaccggcaaggagagcagcaagagcatgaccgtgaaggtgagcgactggaccctgccctag

SEQ ID NO: 319752 - protein, 238 aa, Artificial Sequence
  derived and/or modified sequence
MSHRLQLSETNRTLFLLGVTKYTAGPYECEIRNPVSASRSDPFTLNLLPKLPKPYITINNLKPRENKDVLNFTCEPKSENYTYIWWLNGQSLPVSPRVKRPIENRILILPSVTRNETGPYQCEIRDQYGGIRSYPVTLNVLYGPDLPRIYPSFTYYRSGEVLYLSCSADSNPPAQYSWTINGKFQLSGQKLFIPQITTKHSGLYACSVRNSATGKESSKSMTVKVSAYSSSINYTAVY

SEQ ID NO: 319753 - DNA, 717 bp, Artificial Sequence
  derived and/or modified sequence
atgagccacaggctgcagctctccgaaacaaatcggacccttttcctattaggtgtgacgaaatacacagcgggcccttatgaatgtgagattcggaacccagtgtctgccagcaggtctgaccccttcacactcaatttgctgcccaaactccctaagccctacattactatcaacaatctgaagccgcgcgagaataaggatgtgcttaacttcacctgcgagccgaaatctgagaactacacctacatttggtggctgaacgggcagagtctgccggtcagtccgcgcgtgaaaagaccaatcgaaaatcggatattgatccttcccagtgttacaaggaacgaaacagggccatatcagtgcgaaatacgcgaccagtatgggggcattcgatcttatcccgtcactttaaacgtgctctacggtcccgacttaccacgtatctacccttctttcacctattatagatcgggtgaagtgctgtatctgtcctgcagcgccgacagtaatcctccagcccaatactcatggacaatcaatgggaagtttcaactgagcggccaaaagttgttcatcccgcagattaccacaaagcatagcggtctgtacgcttgtagcgtaaggaactccgccaccgggaaagagtcatccaaaagcatgacagtgaaagtctctgcctatagttccagtatcaactacaccgccgtctactag

SEQ ID NO: 319754 - DNA, 717 bp, Artificial Sequence
  derived and/or modified sequence
atgagccaccggctgcagctgtctgagaccaacagaaccctcttcctgctgggcgtgaccaagtacacagctggcccctatgaatgtgagatccggaaccctgtgtctgccagcagaagtgaccccttcaccctgaacctgctgcccaagctgcccaagccctacatcaccatcaacaacctgaagccccgggagaacaaggatgtgctgaacttcacctgtgagcccaagtctgagaactacacctacatctggtggctgaatggccagagcctgcctgtgagcccccgggtgaagaggcccattgaaaatcgcatcctgatcctgcccagcgtgaccagaaatgaaacaggcccctaccagtgtgagatccgggaccagtatggaggcatccgcagctaccctgtgaccctgaatgtgctgtatggccctgacctgccccgcatctaccccagcttcacctactaccgcagcggggaggtgctgtacctgagctgcagcgctgacagcaaccccccagcccagtacagctggaccatcaatggcaagttccagctgagcggccagaagctgttcatcccccagatcaccaccaagcacagcggcctgtatgcctgcagcgtgagaaattctgccaccgggaaggagagcagcaagtccatgacagtgaaggtgtctgcctacagcagcagcatcaactacacagctgtgtactag

SEQ ID NO: 319755 - DNA, 717 bp, Artificial Sequence
  derived and/or modified sequence
atgagccaccggctgcagctgagcgagaccaaccggaccctgttcctgttaggagtcaccaagtacacagcgggcccctacgaatgtgagatccggaaccctgtgtccgcctccaggtccgatccatttactctgaatctgcttcctaagctccccaagccttacatcactatcaataaccttaagccgagagaaaataaagatgtgctcaattttacctgtgagcctaaaagcgaaaactatacctacatatggtggctgaacggccagagcttacccgtttccccacgagtgaaacggcccatcgagaacaggattctgatcctgccatcagtcaccaggaacgaaacaggtccctatcaatgtgagatcagagatcagtacggcgggattcgaagctatcccgtcacactgaatgtgttgtacgggcctgatctacccagaatttatccgtcattcacctactacaggagcggggaagtcctatatctttcttgctcagccgactctaatccgcccgcacagtactcgtggaccatcaacggcaagttccagttgagtgggcaaaaactctttattccccagattaccacaaaacatagcggcctgtacgcatgctcagtcagaaatagcgcgacaggcaaagagagcagtaaatccatgacagtgaaagtaagtgcctactcttcatccattaactacaccgctgtatactag

SEQ ID NO: 319756 - DNA, 717 bp, Artificial Sequence
  derived and/or modified sequence
atgagtcatcgtttgcaattatccgaaaccaaccgaacgctgttcttactaggcgtcacaaagtatactgccggaccttatgagtgcgaaataaggaatcctgtctccgcaagcagaagtgatccgttcacattgaacttactccccaagcttccgaagccatacatcactatcaataatttaaagccccgtgagaataaggacgtgctgaattttacgtgtgagcccaaaagcgagaactatacctacatctggtggctgaacggacagtcccttcccgtgtcacctcgggtgaagcggcctatagaaaaccgaattcttattctaccttccgtgacaagaaacgaaacaggcccatatcagtgcgaaatccgcgatcagtatggcggaatccgctcctaccccgtcactctaaatgtgttgtatgggccagatctacctcgaatttacccttcattcacctactaccgctccggggaggtgctctatctcagttgctctgccgactctaatccccctgcgcagtattcctggacaatcaatggcaaatttcagctgtccggccagaagctctttattccgcaaattacgactaagcacagtgggctgtacgcatgtagcgtgaggaactctgccaccggaaaagaatcttcaaaatcaatgacagtgaaggtctcagcgtactccagttccatcaactatacagctgtctactag

SEQ ID NO: 319757 - DNA, 717 bp, Artificial Sequence
  derived and/or modified sequence
atgagccacagactgcagctgagcgagaccaacagaaccctgttcctgctgggcgtgaccaagtacaccgccggcccctacgagtgcgagatcagaaaccccgtgagcgccagcagaagcgaccccttcaccctgaacctgctgcccaagctgcccaagccctacatcaccatcaacaacctgaagcccagagagaacaaggacgtgctgaacttcacctgcgagcccaagagcgagaactacacctacatctggtggctgaacggccagagcctgcccgtgagccccagagtgaagagacccatcgagaacagaatcctgatcctgcccagcgtgaccagaaacgagaccggcccctaccagtgcgagatcagagaccagtacggcggcatcagaagctaccccgtgaccctgaacgtgctgtacggccccgacctgcccagaatctaccccagcttcacctactacagaagcggcgaggtgctgtacctgagctgcagcgccgacagcaacccccccgcccagtacagctggaccatcaacggcaagttccagctgagcggccagaagctgttcatcccccagatcaccaccaagcacagcggcctgtacgcctgcagcgtgagaaacagcgccaccggcaaggagagcagcaagagcatgaccgtgaaggtgagcgcctacagcagcagcatcaactacaccgccgtgtactag

SEQ ID NO: 319758 - DNA, 1470 bp, Artificial Sequence
  derived and/or modified sequence
agagcctaagtcacagtagccctgactacagcattcctggagcccaggctcttttccacagaggaggaaagagcaggcagcagagaccatggggcccccctcagcctctccccacagagaatgcatcccctggcaggggcttctgctcacagcctcacttctaaacttctggaacccgcccaccactgccaagctcactattgaatccatgccgctcagtgtcgcagaggggaaggaggtgcttctacttgtccacaatctgccccagcatctttttggctacagctggtacaaaggggaaagagtggatggcaacagtctaattgtaggatatgtaataggaactcaacaagctaccccaggggccgcatacagcggtcgagagacaatatacaccaatgcatccctgctgatccagaatgtcacccagaatgacataggattctacaccctacaagtcataaagtcagatcttgtgaatgaagaagcaactggacagttccatgtatacccggagctgcccaagccctccatctccagcaacaactccaaccccaaggaggacaaggatgctgtggccttcacctgtgaacctgagattcacagcacaacctgcctgtagtgggtaaatggtcagagcctcccgaagaaaatgccccaggccttcctgtgggggccgtcgccggcatcgtgaccggggtcctggtcggagtggcgctggtggccgcgctggtgtgtttcctgctccttgccaaaactggaaggtaccacagctttttcccatccttctcccaccccctaggctgactccaggccaaaagaaaggagaccttgtcctgtattcagggccaggctctccacggcctcccaagtccccagggatccttccctcttattccacggctcctccctcgtcagctcctgaccctgggttgctgcctcaacagcttcctcctctgtgaatttggcccaattaaggccccacccctgagtgtggccctagttccctcacacagcaaagccacagctgcctggagggagggagagaaggagggagggaagtagggagggagggagggagggcgtgctctgtacttggtacctcccattgttcattgaatccatccacacagtgagggggatttgcaggctccggatcctgggcaccgtcacacaatggggagtggaccagcctggacaggctgggtggggtcagtgccccccatggctgatgtggtaaccataggccctgaggtgtgagatgggagaacctgggcctcagaacagcatgtcctggagcgtcctttgtgtctcttgccaaggggttgagagagaggacaaggacactgtcctatttcagcatcaccagccctgagtgcagggtctggccacagcagggacactgagttccaggagaatccaagacacttgcggtcccctccgtgtcctgcactaaagcacagagccacg

SEQ ID NO: 319759 - DNA, 2952 bp, Artificial Sequence
  derived and/or modified sequence
atgaccgaacataaaatgtctgtggaagaagtttgccgaaaatacaataccgattgcgtgcagggcttaacccacagtaaggcccaagaaatacttgcccgagacggtcccaatgccctcacacctccaccaactactccagagtgggtgaaattttgcagacagctgtttggcggatttagtatcttgctatggatcggcgcaattctgtgctttctggcctacggcatccaagcaggcacagaggacgacccatcgggcgacaatctgtacctgggaattgtgttggcggccgtagtcatcattacaggctgctttagttactaccaggaggctaaatctagtaaaataatggagagcttcaaaaatatggtgcctcagcaagccctggtcatacgggagggggaaaagatgcaggttaatgccgaggaggttgtagttggcgatcttgtcgagattaaaggcggcgaccgcgtgcctgcagacctgcgcattatcagcgcacatgggtgtaaggtcgataatagctccctgactggggaatcggaaccacagacgcggagtcccgactgtacacatgataatccgttagaaactcgcaatattactttcttctccacaaactgtgtggaaggcactgctcggggcgtggtcgttgccactggcgataggaccgtgatgggccgaatcgccacccttgctagcggtctcgaggtcggcaagacaccgatcgccattgaaatcgagcactttatccagttgattaccggggtggccgtcttcttgggcgtcagtttttttatcttatctttaatcctgggatacacatggcttgaagctgtgatcttcttgattggcataatcgttgctaacgtccctgaggggctgctggcaacggtgacggtgtgcttgaccctgaccgctaaaaggatggcacgtaaaaattgccttgtgaagaatttagaagccgtggaaacactgggctccacatcaactatctgttctgataagaccggcaccctcacccagaatcgcatgaccgtcgctcatatgtggtttgacaaccagatccacgaagccgatactacggaggatcagagtggaacatcgttcgataaatcatcccacacttgggtagctctgtcacatattgctgggctatgcaatagagccgtcttcaaaggaggccaggacaatatcccagttttaaaaagagacgtagctggcgatgcaagcgagtctgcactgttgaaatgcattgagttgtcctctggtagcgttaagctgatgcgcgagcggaataaaaaggtggcagaaatccctttcaacagtacaaacaaataccaattatcaatccacgagactgaagatcctaatgacaaccgctacctgctggtcatgaagggcgctcctgagaggattctcgaccgctgtagtacgatactccttcaaggtaaagagcagcccctggatgaggaaatgaaggaagccttccagaacgcatacctcgaactgggcggtctgggtgaaagagtcttaggcttctgtcactactatttgccagaagaacagtttcccaaaggatttgccttcgattgtgatgatgtgaattttactacggacaacttgtgtttcgttgggctgatgagcatgatcgatccaccgcgcgccgccgtgcctgacgcagtgggaaaatgccggtctgcagggattaaggtcataatggtgaccggagatcaccctatcacagcgaaggccatcgccaagggagtcggcataatttccgagggaaatgaaaccgtggaggacattgcagctcgtctgaacatccccgtgtctcaagtgaatccacgcgacgccaaagcctgcgtgatccacgggacagatcttaaggatttcacatccgagcaaatcgatgagatcctacagaaccacaccgagatcgtgttcgcacggacatcacctcagcagaaactgataatcgtcgagggctgccaacggcaaggagccatcgtggccgtaacaggcgatggtgtgaacgactcccctgccctcaagaaagccgacatcggcgtggccatgggcattgctggaagcgacgtgtcaaaacaagccgcggatatgattctgttagatgacaattttgcatctatcgtgacgggcgtcgaagagggccgtctcatatttgataatctgaagaagtccatcgcttataccctgacttcaaacatccctgagatcactcccttcttacttttcatcatggccaatatccccctgccgttgggaacaattacgattctttgcattgatctgggcacagacatggtccctgcaatctccctggcatacgaggctgctgaaagtgacataatgaaacggcaacctcgaaacccacgtaccgacaagttggtcaatgagcgactgatctcgatggcatacggccaaatcggaatgatacaagcactggggggatttttttcatacttcgtgatcctggccgagaacgggtttctgcctgggaatctggtaggaatcaggctcaattgggacgaccggactgtgaatgacctggaggatagttacggtcagcagtggacttatgaacagaggaaggttgtggaatttacatgtcacactgctttcttcgttagcattgtggttgtgcagtgggcagatctcatcatctgcaagactcgtagaaatagtgtgttccagcaggggatgaaaaataagatcctcatcttcggcctcttcgaggagacagcactcgccgcatttctgtcttattgtccgggtatggatgtcgcattaagaatgtacccactcaaaccttcttggtggttctgcgcttttccctactccttcctcatattcgtgtatgatgaaatcagaaaactgatcctcagaagaaaccccggcggatgggtggaaaaggaaacttattactag

SEQ ID NO: 319760 - DNA, 2049 bp, Artificial Sequence
  derived and/or modified sequence
atgggaagaatcgccacactggcctccggactcgaggtcggcaaaacgcccatcgccattgaaatcgagcacttcattcagctcataaccggcgttgctgtctttcttggggtgtctttttttatcctgtccttgatcttaggttacacatggttggaggcggtgatcttcctgattggaattattgtggccaacgtcccggagggcctgctggctactgtgacagtgtgcctgactctgacagccaaaaggatggcgaggaaaaattgccttgtgaagaatctcgaggccgtggagaccctggggagcacaagcaccatttgttccgataaaacgggcacattgacacagaacaggatgacagtagcgcatatgtggttcgataatcaaattcacgaggccgacaccactgaggaccaaagcggtacaagcttcgacaagtccagtcatacctgggtggcgctgagccacatcgctggactctgtaaccgcgccgtctttaagggcggacaggacaacatacctgtgctgaagcgagacgtcgctggtgacgccagcgaatccgctctcctgaagtgtatcgagctgtcttccggctctgtgaagttgatgcgcgagagaaacaagaaagtggccgaaatcccctttaactccaccaataaatatcagctttctatccacgagaccgaagaccccaatgataatcgctacctgctggttatgaagggagcaccagagcggatacttgatcggtgttccacaattttgcttcaaggcaaagagcaaccccttgacgaggagatgaaggaggccttccaaaacgcctacctggaattaggtgggttaggggagagggtactcgggttctgccactactacttgcccgaagagcagttccccaagggtttcgcattcgactgcgatgacgtcaatttcaccaccgacaacctatgttttgtgggactcatgtccatgatcgatcctcctcgtgccgcggtgcccgacgccgtggggaagtgtcggagtgccgggatcaaagttatcatggtgacaggagatcacccaattacagccaaagccatcgctaagggcgtcggcatcattagtgaaggaaacgaaacagtggaggatatcgctgccaggcttaacattccagtgtcccaggtgaatccgagagatgccaaagcgtgcgttatccacgggactgacctgaaggactttacctcggagcagattgatgagatactgcagaaccacaccgagatcgtgtttgctagaacctcaccacagcagaagcttattattgtggaaggctgccaaaggcagggcgccatagtggccgtgactggcgatggagtcaacgattccccagcattaaaaaaagccgacatcggggtcgccatgggaatagccggaagcgacgtttccaagcaggccgctgacatgatcctgctcgatgataactttgcatcaatcgtgaccggagtggaagaggggaggttgattttcgacaacctcaaaaaaagtattgcctacacattgacctctaacatccccgagatcacaccctttttgttattcatcatggccaatattcctctacctctcgggacaattaccatattgtgtatcgatttgggtactgatatggtccctgctatatcccttgcctacgaagctgccgagtccgatatcatgaaacgccaaccacggaaccctagaaccgacaaactggtgaacgaaagattaatcagtatggcttacggacagatcgggatgatccaggctctcggtggtttcttctcctattttgtgatcttagctgaaaacggtttcctccctggtaatctcgtcggaatccgattaaactgggatgacagaaccgtgaacgacctcgaagattcctatgggcaacaatggacatatgagcagcggaaagtagtagagtttacctgccatactgcattttttgtgagtattgtggtggtccagtgggcagacctaataatatgtaaaactcgtagaactcgtagcagctcgagggcctag

SEQ ID NO: 319761 - DNA, 2952 bp, Artificial Sequence
  derived and/or modified sequence
atgacagagcacaagatgtctgtggaggaggtgtgcaggaagtacaacacagactgtgtgcagggcctgacccacagcaaggcccaggagatcctggccagagatggccccaatgccctgaccccaccacccaccaccccagagtgggtgaagttctgccggcagctgtttggaggcttcagcatcctgctgtggattggagccatcctgtgcttcctggcctacggcatccaggccggcacagaagatgaccccagcggggacaacctgtacctgggcatcgtgctggccgctgtggtgatcatcaccggctgcttctcctactaccaggaggccaagagcagcaagatcatggagagcttcaagaacatggtgccccagcaggccctggtgatccgggagggggagaagatgcaggtgaatgctgaggaggtggtggtgggggacctggtggagatcaagggcggggacagagtgcctgctgacctgcgcatcatcagcgcccacggctgcaaggtggacaacagcagcctgactggagagagcgagccccagaccaggagcccagactgcacccatgacaaccccctggagaccaggaacatcaccttcttcagcaccaactgtgtggagggcacagcccggggcgtggtggtggccactggagacagaacagtgatgggccgcatcgccaccctggccagcggcctggaggtgggcaagacccccatcgccatcgagattgagcacttcatccagctgatcaccggggtggccgtgttcctgggcgtgtccttcttcatcctgagcctcatcctgggctacacctggctggaggccgtcatcttcctgattggcatcatcgtggccaacgtgcctgagggcctgctggccaccgtgacagtgtgcctgaccctgacagccaagaggatggccaggaagaactgcctggtgaagaacctggaggccgtggagaccctgggcagcaccagcaccatctgcagcgacaagacaggcaccctgacccagaacaggatgacagtggcccacatgtggtttgacaaccagatccacgaggccgacaccacagaggaccagagcggcaccagctttgacaagagcagccacacctgggtggccctgagccacatcgccggcctgtgcaacagagctgtgttcaagggcggccaggacaacatccctgtgctgaagagagatgtggccggagatgccagcgagagcgccctgctgaagtgcatcgagctgagcagcggctctgtgaagctgatgagggagaggaacaagaaggtggccgagatccccttcaacagcaccaacaagtaccagctgagcatccatgaaacagaggaccccaatgacaaccgctacctgctggtgatgaagggggcccctgagcgcatcctggaccgctgcagcaccatcctgctgcagggcaaggagcagcccctggatgaggagatgaaggaggccttccagaatgcctacctggagctgggcggcctgggggagcgggtgctgggcttctgccactactacctgcctgaggagcagttccccaagggctttgcctttgactgtgatgatgtgaacttcaccacagacaacctgtgctttgtgggcctgatgtccatgattgacccccccagggctgctgtgcctgatgctgtgggcaaatgtagatctgctggcatcaaggtgatcatggtgactggagaccaccccatcacagccaaggccatcgccaagggcgtgggcatcatcagcgagggcaatgagaccgtggaggacattgctgcccggctgaacatccctgtgtcccaggtgaaccccagagatgccaaggcctgtgtgatccacggcacagacctgaaggacttcaccagcgagcagattgatgagatcctgcagaaccacacagagatcgtgtttgcccggaccagcccccagcagaagctgatcatcgtggagggctgccagaggcagggcgccatcgtggccgtgactggagatggagtgaatgacagccctgccctgaagaaggctgacatcggcgtggccatgggcattgctggcagtgatgtgtccaagcaggccgctgacatgatcctgctggatgacaactttgccagcatcgtgactggagtggaggagggccgcctcatctttgacaacctgaagaagagcatcgcctacaccctgaccagcaacatccctgagatcacccccttcctgctcttcatcatggccaacatccccctgcccctgggcaccatcaccatcctgtgcatcgacctgggcacagacatggtgcctgccatcagcctggcctatgaggccgctgagagtgacatcatgaagaggcagcccaggaaccccaggacagacaagctggtgaatgaaagactcatctccatggcctacggccagatcggcatgatccaggccctgggcggcttcttctcctacttcgtcatcctggctgaaaatggcttcctgcccggcaacctggtgggcatccggctgaactgggatgacagaacagtgaatgacctggaggacagctatggccagcagtggacctatgagcagaggaaggtggtggagttcacctgccacacagccttctttgtgtccatcgtggtggtgcagtgggccgacctgatcatctgcaagaccaggagaaattctgtgttccagcagggcatgaagaacaagatcctgatcttcggcctgtttgaggagacagccctggccgccttcctgagctactgccccggcatggatgtggccctgaggatgtaccccctgaagcccagctggtggttctgtgccttcccctacagcttcctgatctttgtgtatgatgagatcaggaagctgatcctgcggagaaatcctgggggctgggtggagaaggagacctactactag

SEQ ID NO: 319762 - DNA, 2049 bp, Artificial Sequence
  derived and/or modified sequence
atgggccgcatcgccaccctggccagcggcctggaggtgggcaagacccccatcgccatcgagattgagcacttcatccagctgatcaccggggtggccgtgttcctgggcgtgtccttcttcatcctgagcctcatcctgggctacacctggctggaggccgtcatcttcctgattggcatcatcgtggccaacgtgcctgagggcctgctggccaccgtgacagtgtgcctgaccctgacagccaagaggatggccaggaagaactgcctggtgaagaacctggaggccgtggagaccctgggcagcaccagcaccatctgcagcgacaagacaggcaccctgacccagaacaggatgacagtggcccacatgtggtttgacaaccagatccacgaggccgacaccacagaggaccagagcggcaccagctttgacaagagcagccacacctgggtggccctgagccacatcgccggcctgtgcaacagagctgtgttcaagggcggccaggacaacatccctgtgctgaagagagatgtggccggagatgccagcgagagcgccctgctgaagtgcatcgagctgagcagcggctctgtgaagctgatgagggagaggaacaagaaggtggccgagatccccttcaacagcaccaacaagtaccagctgagcatccatgaaacagaggaccccaatgacaaccgctacctgctggtgatgaagggggcccctgagcgcatcctggaccgctgcagcaccatcctgctgcagggcaaggagcagcccctggatgaggagatgaaggaggccttccagaatgcctacctggagctgggcggcctgggggagcgggtgctgggcttctgccactactacctgcctgaggagcagttccccaagggctttgcctttgactgtgatgatgtgaacttcaccacagacaacctgtgctttgtgggcctgatgtccatgattgacccccccagggctgctgtgcctgatgctgtgggcaaatgtagatctgctggcatcaaggtgatcatggtgactggagaccaccccatcacagccaaggccatcgccaagggcgtgggcatcatcagcgagggcaatgagaccgtggaggacattgctgcccggctgaacatccctgtgtcccaggtgaaccccagagatgccaaggcctgtgtgatccacggcacagacctgaaggacttcaccagcgagcagattgatgagatcctgcagaaccacacagagatcgtgtttgcccggaccagcccccagcagaagctgatcatcgtggagggctgccagaggcagggcgccatcgtggccgtgactggagatggagtgaatgacagccctgccctgaagaaggctgacatcggcgtggccatgggcattgctggcagtgatgtgtccaagcaggccgctgacatgatcctgctggatgacaactttgccagcatcgtgactggagtggaggagggccgcctcatctttgacaacctgaagaagagcatcgcctacaccctgaccagcaacatccctgagatcacccccttcctgctcttcatcatggccaacatccccctgcccctgggcaccatcaccatcctgtgcatcgacctgggcacagacatggtgcctgccatcagcctggcctatgaggccgctgagagtgacatcatgaagaggcagcccaggaaccccaggacagacaagctggtgaatgaaagactcatctccatggcctacggccagatcggcatgatccaggccctgggcggcttcttctcctacttcgtcatcctggctgaaaatggcttcctgcccggcaacctggtgggcatccggctgaactgggatgacagaacagtgaatgacctggaggacagctatggccagcagtggacctatgagcagaggaaggtggtggagttcacctgccacacagccttctttgtgtccatcgtggtggtgcagtgggccgacctgatcatctgcaagaccaggaggaccaggagcagcagccgggcctag

SEQ ID NO: 319763 - DNA, 2952 bp, Artificial Sequence
  derived and/or modified sequence
atgaccgagcacaagatgagcgtggaggaggtgtgccggaagtacaatacagactgcgttcagggacttacccactctaaagcccaagagattcttgcccgcgacgggcctaatgccctcacaccaccacctacaacacccgagtgggttaagttttgccgccagctgttcggcgggttcagcattcttctctggattggtgccatcctgtgtttcctcgcatatgggatccaggctggtacagaagacgatccttccggggacaacctatatcttggaatagttctggcggctgttgtgataatcactggttgcttttcttattaccaggaagctaaatcgtcgaaaatcatggagagctttaagaacatggttccccagcaggctttagtgattagggagggggagaagatgcaagtgaacgcggaggaagtcgtggttggtgatctggttgaaattaagggtggtgacagagtgccagccgatctccgtatcattagcgcgcatgggtgcaaggtggacaactctagcctgacaggagagtccgagccccagacgcgctcacctgactgtacccacgataatcctctggaaacaaggaatattacgtttttcagcacaaactgtgtcgaaggaaccgcccgcggcgttgtggtagccacaggcgaccggaccgtgatggggagaattgccacactggcctcaggcctggaggtcggcaagacaccgattgccatcgagattgaacattttatccaattaataactggagtggcagtcttcctgggcgtgagtttttttatcctatcactcattcttggctacacctggctcgaagccgtgattttcttaattggcatcatagtggctaatgtaccagagggcctgctggccactgtcaccgtgtgcctgacgctcaccgcaaagcggatggctcgaaagaactgcctggtcaagaacctggaggctgttgagactctgggctcaaccagcacaatctgctcggacaagactggaaccctgacccagaatcggatgacggtagctcatatgtggtttgataatcagatccacgaagccgacaccacagaagatcaatcagggacatcattcgacaaaagtagtcacacctgggttgcccttagtcatatcgctggcctttgtaaccgcgccgtgtttaagggcggccaggacaatataccagttttgaagcgtgatgttgctggggacgcaagcgagtctgctttgcttaagtgcattgaactgagcagcggcagcgtgaagctgatgcgggagcgcaacaaaaaagttgcagaaattccattcaattcaaccaacaagtaccaactgagcattcacgaaaccgaggaccccaacgacaaccggtacctgctcgtcatgaagggggctccagaacggattctcgatagatgctccaccattcttcttcaggggaaggagcagccactggacgaggaaatgaaggaggccttccagaacgcttatctggagctcggtggacttggggagcgggtgctggggttctgtcattattatctgcccgaggagcagttccccaagggttttgcctttgattgcgatgatgttaatttcaccaccgacaatttatgcttcgtgggactaatgagtatgattgaccctcctagagccgccgtccccgacgcagtgggcaagtgccgttccgctggtattaaggtgattatggtcacaggtgaccatccaatcacggccaaagcaattgctaaaggagtgggcattatctcagaggggaacgaaactgtggaagacattgccgccaggttaaatatccctgtcagtcaggttaacccacgtgacgccaaggcatgtgtcattcacggtacggatctaaaagactttacatcagaacagatagatgaaattctgcagaatcacactgaaatcgtgttcgctcgaactagcccgcagcagaaattgattatagtcgaaggttgtcagcgtcagggagccattgtggccgtgacaggcgacggtgtgaacgactcaccggcccttaaaaaagccgacatcggcgtcgccatgggtatagccggcagcgacgtcagcaagcaagccgcagatatgatcttgctagatgacaattttgcttccatagtcaccggcgttgaggaaggccggctgatctttgataatctgaagaaaagcatcgcatataccctaaccagtaacatccctgagatcaccccattcttattattcataatggcgaacatccctctgcccttgggcactatcacaattctgtgcatagacctgggcactgatatggttcctgccatttccctcgcctacgaggccgctgagagcgatattatgaagagacagccaagaaacccaagaacagataagctggtgaatgaaagattgatctcaatggcgtatggtcagatcggaatgatccaagccttgggcggctttttttcttacttcgttatacttgccgaaaacggcttcctccctggcaatctcgtcggcatcagactaaactgggatgacaggaccgttaacgatctcgaagatagttatggacagcagtggacgtatgagcaaaggaaagtggtggaatttacttgccacacggcgtttttcgtgtccattgtcgtggtgcagtgggcagacttgattatatgtaagactaggaggaacagcgtcttccagcaagggatgaagaataagatcctcattttcggactgttcgaggaaaccgccctcgcggcttttctctcatattgccccggcatggacgttgccctgaggatgtatccgcttaaacccagctggtggttttgcgcttttccttacagtttccttatcttcgtttatgatgagatcaggaagctcatcctgaggaggaatccaggggggtgggtagagaaggaaacctactactag

SEQ ID NO: 319764 - DNA, 2049 bp, Artificial Sequence
  derived and/or modified sequence
atgggccggatcgccaccctggccagcggcctggaggtgggcaagaccccaattgccattgagattgagcattttattcagctgattaccggcgtggctgtcttcctcggagtgtcctttttcattctctccctcatcctgggttacacctggcttgaggcagttatcttcctgattggaattatagttgccaacgtgcccgagggcctgctcgccacggtcacagtgtgcctgacccttactgctaagcgcatggcacgaaaaaactgcctcgttaaaaacctggaggccgtagagaccctcggatcaacctccaccatctgtagtgacaagacggggaccctgactcagaacaggatgaccgttgcgcacatgtggttcgacaatcagatccacgaagcggacactacagaggatcagtctggcacaagcttcgataaaagttctcatacctgggtcgctctaagtcatatcgccggtctgtgtaaccgtgctgtgttcaagggaggccaagacaatattccggttctgaagcgcgacgtcgccggggacgcatcagagagtgccctcctgaaatgtatagaattaagcagcgggagtgtcaaattaatgcgagagaggaacaaaaaggttgcggaaatcccctttaactccaccaacaagtatcagctgtcaatacacgaaactgaagatccaaatgacaacaggtatctccttgtgatgaaaggcgccccagagcgcattctcgacagatgctcaaccatacttctccaaggcaaggaacagcctctggatgaggaaatgaaggaggcctttcagaacgcctacctcgagttaggtggactgggcgagagggtcttaggcttctgccattactacctaccggaagaacagttcccaaaagggtttgcgtttgattgtgatgacgttaattttacgactgataacctttgctttgtcgggctgatgtctatgatagacccgccccgagccgccgtgcccgatgccgttggaaagtgtcggtctgccgggattaaggtgattatggtgaccggcgatcaccctattacagctaaagccattgccaaaggcgtggggatcatctcagaaggcaatgagacagttgaagatattgcagctcgactgaacattcccgtttcacaagtgaaccctagggacgctaaggcctgcgtcattcatgggacggatttgaaggacttcacatccgaacagatagatgaaattctgcagaatcataccgaaatcgtgttcgctaggacgtcaccccagcagaagctcatcattgtcgaagggtgccagcgacagggcgccatcgtcgctgtgacaggcgacggagtgaatgattcaccagcgttaaaaaaggcggacattggcgtcgctatgggtatagctgggtccgatgtgtccaagcaagctgctgatatgattctgctggatgataatttcgccagtatcgttactggcgtggaagagggacgcctcattttcgacaacctgaagaaaagtattgcatacactcttaccagtaatatacccgagatcacgccatttctccttttcatcatggcaaacatccccttgccactgggcacaataaccatactctgtatcgatttgggtacagacatggtaccagcgatctccctggcctacgaggctgctgaaagtgacataatgaagagacagccgagaaaccctaggaccgataagctcgtgaacgaacgactcatatctatggcttacggccagatcggcatgatccaggctctcggaggatttttctcatacttcgtgatcctcgcagagaacggattcttgcctggaaacctggtgggcatacgcctaaactgggatgatcgcactgtcaacgacctcgaagacagctatggtcaacaatggacatacgaacagcggaaagtcgtggagtttacttgccatactgccttctttgtatctatagtcgtggtgcagtgggccgatttgattatctgtaagactaggcggactcgctcttcatcccgggcatag

SEQ ID NO: 319765 - DNA, 2952 bp, Artificial Sequence
  derived and/or modified sequence
atgactgaacacaagatgagtgtggaagaggtttgtcgaaagtataatactgactgcgtgcagggccttacccatagcaaagcccaggagatactcgcaagggatggaccaaatgcactgactcctccacccactacgcccgagtgggttaaattctgccgccagctcttcggtggctttagcatactgctgtggataggcgctattctctgtttcctggcctatggaattcaggccggtaccgaagatgacccatctggagataatttatatctgggcatagtactagcggctgtagttataatcactgggtgcttcagctattatcaggaggccaagtcaagcaagataatggagtctttcaagaatatggtgccacagcaggcccttgttatccgggaaggcgaaaagatgcaagtcaacgcagaagaagtcgttgtaggagacctcgtcgagatcaaagggggtgaccgagtgcccgctgatcttcggataatttctgcgcatggatgtaaagtcgacaattcgagcttgactggagagtctgagccccaaaccagaagtccggattgcacccatgacaatccactggagaccaggaatatcacgtttttttccactaactgcgtggagggcacggcccgtggggtagtggtggcgactggggatcgtacagtgatgggtcgaatcgcgactcttgcaagtggtctggaagtggggaagaccccaatagccatagagatcgaacatttcatacagctgattacaggcgtggccgtgttcctgggagtgtcattcttcattctgagcttgattttgggatacacctggcttgaggccgttatcttcttaatcggcataattgtggctaatgtccctgaaggtctgctggccactgtcaccgtatgtttgactcttactgcgaaacgaatggctcgaaagaattgcctggttaagaacttagaggctgtggagacactgggttctacctccacaatatgctcggataaaacgggaacacttactcaaaaccggatgactgtggcccatatgtggttcgacaaccagatacacgaggcagataccactgaagatcaatccggcacaagcttcgataaaagttctcatacttgggtggcgctgtcgcacattgccggactttgtaatcgggcagtctttaagggaggccaggataacatacccgtcctcaaaagagacgtggctggagacgctagtgaatccgctctgttgaagtgcattgaattgtcatcaggatccgtgaaactgatgagagaacgaaataagaaggtagccgagatccctttcaactcaaccaataaataccagttatccatacatgagactgaggacccgaacgataatcgttatttactggttatgaaaggtgctccagaaagaattctagaccgctgctctacaattctgctgcaaggcaaggaacaacccttggacgaggagatgaaagaggctttccaaaatgcttacctggagctgggtggcctgggggagcgggtcctgggtttttgccattactaccttcccgaggagcaattccccaaagggtttgcctttgactgtgacgacgtgaattttaccacagacaatctttgtttcgttgggctgatgagcatgattgatccgcctcgggcagctgtccccgatgctgtcgggaaatgtaggtccgctggaatcaaggtgattatggtgaccggtgatcatcccataactgcgaaggcaatcgcaaaaggtgtggggatcatcagcgagggcaatgagacggtggaggacatagctgccagactgaatatcccggtctcccaggtgaacccgagggacgcaaaggcctgcgtcatccatggcactgacctaaaggattttacttcagagcagatcgacgaaattcttcagaatcataccgaaatcgtctttgccagaacctccccccagcagaagttaatcatcgtcgagggatgccagcgtcaaggtgccatagtcgccgtcactggagacggcgtgaacgattctccggctttaaagaaggctgacatcggagtggcaatgggaatagccggttctgacgtgtcaaaacaggcggcagatatgattttgctggacgacaacttcgctagcattgtcacaggcgttgaggaaggacgactcatttttgacaatctcaaaaagagtatcgcttatactttgacaagcaacatcccagagataaccccattcctattgttcattatggcaaatattcctttaccactgggcaccattactattctgtgtatcgacttgggtacggatatggtccccgctatctccctggcctatgaagcagcggagtccgatattatgaagaggcagccccgaaatcccagaacagacaaattagttaatgagcgtctgatctcaatggcttatggccagattggcatgatacaggcactcggaggtttcttcagctacttcgtgatcctagctgagaatggcttcctgcccggaaatcttgtgggcatacggttgaactgggacgatagaaccgttaacgacctcgaagactcctatggccaacagtggacttacgagcagcgcaaagttgtagaatttacctgtcatacagccttcttcgtttccatcgtggtcgtgcagtgggccgatctcattatctgcaagacccggagaaattcagtctttcagcagggcatgaagaacaagatcctgattttcggactgtttgaagagaccgcattggccgcatttctgtcctattgcccagggatggacgtcgcgcttaggatgtatccactcaagccttcctggtggttctgtgcatttccatacagctttctaatctttgtgtatgatgagataagaaaactgatccttcggcgaaatccaggagggtgggtggagaaagagacttattactag

SEQ ID NO: 319766 - DNA, 2049 bp, Artificial Sequence
  derived and/or modified sequence
atggggagaattgccaccttggcgtctggactggaagtggggaagaccccaattgctattgaaatcgagcattttatccaactaatcaccggcgtagcagtatttctcggtgtgtcgttcttcattctgtccctgatcctgggatatacgtggctagaagcagtgatttttttgattggaatcatcgttgcaaatgtgcctgagggtcttctggccacagtgacagtgtgcctcactcttactgccaaacgcatggctagaaaaaattgcctggtgaaaaatttggaggccgtggaaacactaggttccacatctacgatctgcagtgataaaacaggaacccttacacagaatcgaatgacagtcgctcatatgtggtttgataaccagatacacgaggcagacaccacagaggaccagtccggcactagcttcgacaagagtagccacacctgggtggctttgagtcatatcgccggtctttgcaatcgggcagtgtttaaagggggtcaggacaatattcccgtcctgaaacgtgacgtcgcgggagatgcctcggagtcagccctcctgaaatgtatcgaattgagctcagggtctgtaaaacttatgcgagagcggaacaagaaggtggcggagatcccgttcaactccacaaacaagtatcagctctctatccacgagactgaagaccccaatgacaatcggtatctccttgtgatgaagggtgcaccggagagaatactcgaccgctgctcaacaattctcttacagggaaaagaacagccactggatgaggaaatgaaggaggcatttcagaacgcttacctagagctgggcggacttggggaacgtgtactgggcttttgccactattacctgccagaggagcaatttccaaaaggcttcgcattcgactgtgatgacgtgaacttcacaaccgataatctgtgttttgtcggcctcatgtcaatgatagacccaccgagagcagcagtccccgacgcagtggggaagtgtcgcagcgccggtatcaaagtcattatggtgaccggggatcaccctatcactgccaaagcaatcgctaagggggtcggaattatcagcgaaggtaacgaaactgttgaagacattgccgcacgcctaaacatcccagtaagtcaagtcaacccacgcgatgccaaagcctgcgtgattcacggaacagatctgaaagattttacctccgagcaaatcgatgaaattctgcaaaatcataccgaaatcgttttcgcacgcacgagtccccagcagaagctgatcatcgtggagggctgccagaggcagggggctatagtcgccgtgacaggcgatggggtgaatgactctcccgctctgaagaaagcggatatcggagtggccatgggcattgctggttcagatgtgtcaaagcaggctgctgatatgattctgctcgatgacaactttgcctctatagtgacaggtgtggaagagggccgtctcatttttgacaacctgaaaaaatccatagcctacacactgacctccaatattccagagatcactccatttctgttgtttattatggccaacatccctctgcccctcggcacaatcaccatactttgtattgacttggggactgatatggtgccagcaattagcctagcatacgaggccgctgaaagcgacattatgaagcgtcagcctcgaaatccaaggactgacaagctggtgaacgaaaggctaatctccatggcttatggacagatcggaatgatccaagcactcggtggttttttctcctatttcgtgattctggcagagaacggatttctacctgggaaccttgtgggcattcggctgaactgggacgacaggaccgttaacgacctggaggattcgtatggccaacaatggacctatgagcagcggaaggtggtggaatttacttgtcacacggccttttttgtttcaatcgtcgtggtacagtgggcggatctcattatatgtaaaacaaggcgaactcgcagttcctcccgggcatag

SEQ ID NO: 319767 - DNA, 2428 bp, Artificial Sequence
  derived and/or modified sequence
ttggagactcggaacatcaccttcttttccaccaactgtgtggaaggcacggctcggggcgtggtggtggccacgggcgaccgcactgtcatgggccgtatcgccaccctggcatcagggctggaggtgggcaagacgcccatcgccatcgagattgagcacttcatccagctcatcaccggcgtggctgtcttcctgggtgtctccttcttcatcctctccctcattctcggatacacctggcttgaggctgtcatcttcctcatcggcatcatcgtggccaatgtcccagagggtctgctggccactgtcactgtgtgtctgacgctgaccgccaagcgcatggcccggaagaactgcctggtgaagaacctggaggctgtagaaaccctgggctccacgtccaccatctgctcagataagacagggaccctcactcagaaccgcatgacagtcgcccacatgtggtttgacaaccagatccacgaggctgacaccactgaggaccagtcagggacctcatttgacaagagttcgcacacctgggtggccctgtctcacatcgctgggctctgcaatcgcgctgtcttcaagggtggtcaggacaacatccctgtgctcaagagggatgtggctggggatgcgtctgagtctgccctgctcaagtgcatcgagctgtcctctggctccgtgaagctgatgcgtgaacgcaacaagaaagtggctgagattcccttcaattccaccaacaaataccagctctccatccatgagaccgaggaccccaacgacaaccgatacctgctggtgatgaagggtgcccccgagcgcatcctggaccgctgctccaccatcctgctacagggcaaggagcagcctctggacgaggaaatgaaggaggccttccagaatgcctaccttgagctcggtggcctgggcgagcgcgtgcttggtttctgccattattacctgcccgaggagcagttccccaagggctttgccttcgactgtgatgacgtgaacttcaccacggacaacctctgctttgtgggcctcatgtccatgatcgacccaccccgggcagccgtccctgacgcggtgggcaagtgtcgcagcgcaggcatcaaggtcatcatggtcaccggcgatcaccccatcacggccaaggccattgccaagggtgtgggcatcatctctgagggcaacgagactgtggaggacatcgccgcccggctcaacattcccgtcagccaggttaacccccgggatgccaaggcctgcgtgatccacggcaccgacctcaaggacttcacctccgagcaaatcgacgagatcctgcagaatcacaccgagatcgtcttcgcccgcacatccccccagcagaagctcatcattgtggagggctgtcagagacagggtgcaattgtggctgtgaccggggatggtgtgaacgactcccccgctctgaagaaggccgacattggggtggccatgggcatcgctggctctgacgtctccaagcaggcagctgacatgatcctgctggacgacaactttgcctccatcgtcacaggggtggaggagggccgcctgatcttcgacaacctaaagaagtccattgcctacaccctgaccagcaatatcccggagatcacgcccttcctgctgttcatcatggccaacatcccgctgcccctgggcaccatcaccatcctctgcatcgatctgggcactgacatggtccctgccatctcactggcgtacgaggctgccgaaagcgacatcatgaagagacagcccaggaacccgcggacggacaaattggtcaatgagagactcatcagcatggcctacgggcagattggaatgatccaggctctcggtggcttcttctcttactttgtgatcctggcagaaaatggcttcttgcccggcaacctggtgggcatccggctgaactgggatgaccgcaccgtcaatgacctggaagacagttacgggcagcagtggacatacgagcagaggaaggtggtggagttcacctgccacacggccttctttgtgagcatcgttgtcgtccagtgggccgatctgatcatctgcaagacccggaggactcggtcttccagcagggcatgaagaacaagatcctgatcttcgggctgtttgaggagacggccctggctgccttcctgtcctactgccccggcatggacgtggccctgcgcatgtaccctctcaagcccagctggtggttctgtgccttcccctacagtttcctcatcttcgtctacgacgaaatccgcaaactcatcctgcgcaggaacccagggggttgggtggagaaggaaacctactactgacctcagccccccggctgatgccatctctggttctggacaattatcaaatatatcagtggggagag

SEQ ID NO: 319768 - DNA, 2952 bp, Artificial Sequence
  derived and/or modified sequence
atgaccgagcacaagatgagcgtggaggaggtgtgcagaaagtacaacaccgactgcgtgcagggcctgacccacagcaaggcccaggagatcctggccagagacggccccaacgccctgacccccccccccaccacccccgagtgggtgaagttctgcagacagctgttcggcggcttcagcatcctgctgtggatcggcgccatcctgtgcttcctggcctacggcatccaggccggcaccgaggacgaccccagcggcgacaacctgtacctgggcatcgtgctggccgccgtggtgatcatcaccggctgcttcagctactaccaggaggccaagagcagcaagatcatggagagcttcaagaacatggtgccccagcaggccctggtgatcagagagggcgagaagatgcaggtgaacgccgaggaggtggtggtgggcgacctggtggagatcaagggcggcgacagagtgcccgccgacctgagaatcatcagcgcccacggctgcaaggtggacaacagcagcctgaccggcgagagcgagccccagaccagaagccccgactgcacccacgacaaccccctggagaccagaaacatcaccttcttcagcaccaactgcgtggagggcaccgccagaggcgtggtggtggccaccggcgacagaaccgtgatgggcagaatcgccaccctggccagcggcctggaggtgggcaagacccccatcgccatcgagatcgagcacttcatccagctgatcaccggcgtggccgtgttcctgggcgtgagcttcttcatcctgagcctgatcctgggctacacctggctggaggccgtgatcttcctgatcggcatcatcgtggccaacgtgcccgagggcctgctggccaccgtgaccgtgtgcctgaccctgaccgccaagagaatggccagaaagaactgcctggtgaagaacctggaggccgtggagaccctgggcagcaccagcaccatctgcagcgacaagaccggcaccctgacccagaacagaatgaccgtggcccacatgtggttcgacaaccagatccacgaggccgacaccaccgaggaccagagcggcaccagcttcgacaagagcagccacacctgggtggccctgagccacatcgccggcctgtgcaacagagccgtgttcaagggcggccaggacaacatccccgtgctgaagagagacgtggccggcgacgccagcgagagcgccctgctgaagtgcatcgagctgagcagcggcagcgtgaagctgatgagagagagaaacaagaaggtggccgagatccccttcaacagcaccaacaagtaccagctgagcatccacgagaccgaggaccccaacgacaacagatacctgctggtgatgaagggcgcccccgagagaatcctggacagatgcagcaccatcctgctgcagggcaaggagcagcccctggacgaggagatgaaggaggccttccagaacgcctacctggagctgggcggcctgggcgagagagtgctgggcttctgccactactacctgcccgaggagcagttccccaagggcttcgccttcgactgcgacgacgtgaacttcaccaccgacaacctgtgcttcgtgggcctgatgagcatgatcgacccccccagagccgccgtgcccgacgccgtgggcaagtgcagaagcgccggcatcaaggtgatcatggtgaccggcgaccaccccatcaccgccaaggccatcgccaagggcgtgggcatcatcagcgagggcaacgagaccgtggaggacatcgccgccagactgaacatccccgtgagccaggtgaaccccagagacgccaaggcctgcgtgatccacggcaccgacctgaaggacttcaccagcgagcagatcgacgagatcctgcagaaccacaccgagatcgtgttcgccagaaccagcccccagcagaagctgatcatcgtggagggctgccagagacagggcgccatcgtggccgtgaccggcgacggcgtgaacgacagccccgccctgaagaaggccgacatcggcgtggccatgggcatcgccggcagcgacgtgagcaagcaggccgccgacatgatcctgctggacgacaacttcgccagcatcgtgaccggcgtggaggagggcagactgatcttcgacaacctgaagaagagcatcgcctacaccctgaccagcaacatccccgagatcacccccttcctgctgttcatcatggccaacatccccctgcccctgggcaccatcaccatcctgtgcatcgacctgggcaccgacatggtgcccgccatcagcctggcctacgaggccgccgagagcgacatcatgaagagacagcccagaaaccccagaaccgacaagctggtgaacgagagactgatcagcatggcctacggccagatcggcatgatccaggccctgggcggcttcttcagctacttcgtgatcctggccgagaacggcttcctgcccggcaacctggtgggcatcagactgaactgggacgacagaaccgtgaacgacctggaggacagctacggccagcagtggacctacgagcagagaaaggtggtggagttcacctgccacaccgccttcttcgtgagcatcgtggtggtgcagtgggccgacctgatcatctgcaagaccagaagaaacagcgtgttccagcagggcatgaagaacaagatcctgatcttcggcctgttcgaggagaccgccctggccgccttcctgagctactgccccggcatggacgtggccctgagaatgtaccccctgaagcccagctggtggttctgcgccttcccctacagcttcctgatcttcgtgtacgacgagatcagaaagctgatcctgagaagaaaccccggcggctgggtggagaaggagacctactactag

SEQ ID NO: 319769 - DNA, 2049 bp, Artificial Sequence
  derived and/or modified sequence
atgggcagaatcgccaccctggccagcggcctggaggtgggcaagacccccatcgccatcgagatcgagcacttcatccagctgatcaccggcgtggccgtgttcctgggcgtgagcttcttcatcctgagcctgatcctgggctacacctggctggaggccgtgatcttcctgatcggcatcatcgtggccaacgtgcccgagggcctgctggccaccgtgaccgtgtgcctgaccctgaccgccaagagaatggccagaaagaactgcctggtgaagaacctggaggccgtggagaccctgggcagcaccagcaccatctgcagcgacaagaccggcaccctgacccagaacagaatgaccgtggcccacatgtggttcgacaaccagatccacgaggccgacaccaccgaggaccagagcggcaccagcttcgacaagagcagccacacctgggtggccctgagccacatcgccggcctgtgcaacagagccgtgttcaagggcggccaggacaacatccccgtgctgaagagagacgtggccggcgacgccagcgagagcgccctgctgaagtgcatcgagctgagcagcggcagcgtgaagctgatgagagagagaaacaagaaggtggccgagatccccttcaacagcaccaacaagtaccagctgagcatccacgagaccgaggaccccaacgacaacagatacctgctggtgatgaagggcgcccccgagagaatcctggacagatgcagcaccatcctgctgcagggcaaggagcagcccctggacgaggagatgaaggaggccttccagaacgcctacctggagctgggcggcctgggcgagagagtgctgggcttctgccactactacctgcccgaggagcagttccccaagggcttcgccttcgactgcgacgacgtgaacttcaccaccgacaacctgtgcttcgtgggcctgatgagcatgatcgacccccccagagccgccgtgcccgacgccgtgggcaagtgcagaagcgccggcatcaaggtgatcatggtgaccggcgaccaccccatcaccgccaaggccatcgccaagggcgtgggcatcatcagcgagggcaacgagaccgtggaggacatcgccgccagactgaacatccccgtgagccaggtgaaccccagagacgccaaggcctgcgtgatccacggcaccgacctgaaggacttcaccagcgagcagatcgacgagatcctgcagaaccacaccgagatcgtgttcgccagaaccagcccccagcagaagctgatcatcgtggagggctgccagagacagggcgccatcgtggccgtgaccggcgacggcgtgaacgacagccccgccctgaagaaggccgacatcggcgtggccatgggcatcgccggcagcgacgtgagcaagcaggccgccgacatgatcctgctggacgacaacttcgccagcatcgtgaccggcgtggaggagggcagactgatcttcgacaacctgaagaagagcatcgcctacaccctgaccagcaacatccccgagatcacccccttcctgctgttcatcatggccaacatccccctgcccctgggcaccatcaccatcctgtgcatcgacctgggcaccgacatggtgcccgccatcagcctggcctacgaggccgccgagagcgacatcatgaagagacagcccagaaaccccagaaccgacaagctggtgaacgagagactgatcagcatggcctacggccagatcggcatgatccaggccctgggcggcttcttcagctacttcgtgatcctggccgagaacggcttcctgcccggcaacctggtgggcatcagactgaactgggacgacagaaccgtgaacgacctggaggacagctacggccagcagtggacctacgagcagagaaaggtggtggagttcacctgccacaccgccttcttcgtgagcatcgtggtggtgcagtgggccgacctgatcatctgcaagaccagaagaaccagaagcagcagcagagcctag

SEQ ID NO: 319770 - protein, 210 aa, Artificial Sequence
  derived and/or modified sequence
MLPLPSCSLPILLLFLLPSVPIESQPPPSTLPPFLAPEWDLLSPRVVLSRGAPAGPPLLFLLEAGAFRESAGAPANRSRRGVSETAPASRRGELAVCDAVSGWVTDRRTAVDLRGREVEVLGEVPAAGGSPLRQYFFETRCKADNAEEGGPGAGGGGCRGVDRRHWVSECKAKQSYVRALTADAQGRVGWRWIRIDTACVCTLLSRTGRA

SEQ ID NO: 319771 - DNA, 159 bp, Artificial Sequence
  derived and/or modified sequence
atggccgcccggagcctggcccggcgggccctgcgggtggccggcggtgatgcgagaagcggggggcctgtagccagagacacacagctgggagcccaatggaggtggatcgcagaggggttagtcgaaaacctgaatcctccaggcgccgacgcctag

SEQ ID NO: 319772 - DNA, 633 bp, Artificial Sequence
  derived and/or modified sequence
atgctccccttgccctcctgctcactgcctattctgctgctgtttctcctcccatcggtgccgatcgagagccagccccctccctccactctcccaccctttctagcccctgagtgggacctgctgagtccacgcgtggtcctttcaagaggcgcccctgctggacctcccctcctgtttctgctggaagccggtgcctttcgtgaatcagctggagcgcctgctaatcgaagcagacggggtgtatcagagacagctcctgcttcacggcggggcgaactggctgtttgtgacgctgtgagcggctgggtgaccgatcgtcgtaccgccgtcgacttaaggggccgcgaggtagaggtcctgggtgaggtgcccgccgctggtggtagccctctgaggcagtattttttcgagacgagatgtaaggcagataatgccgaggaaggaggacccggggcaggaggtggcggttgtcgcggagtggaccggcggcattgggtcagcgagtgcaaggcaaaacaaagctacgtgagggctttgacagccgacgcacaggggcgtgtggggtggagatggatccggattgatacagcttgcgtctgtaccttgctgtccaggactggccgggcctag

SEQ ID NO: 319773 - DNA, 633 bp, Artificial Sequence
  derived and/or modified sequence
atgctgcccctgcccagctgcagcctgcccatcctgctgctcttcctgctgcccagcgtgcccatcgagagccagcccccacccagcaccctgccccccttcctggcccctgagtgggacctgctgagcccccgggtggtgctgagcagaggagccccagctggcccccccctgctcttcctgctggaggccggggccttccgggagagcgctggggccccagccaacagaagcagaagaggagtgtctgaaacagccccagccagccggcggggggagctggccgtgtgtgatgctgtgtctggctgggtgacagacagaagaacagctgtggacctgcggggccgggaggtggaggtgctgggggaggtgcctgctgctgggggcagccccctgcggcagtacttctttgagacccgctgcaaggctgacaatgctgaggagggcggccctggagctgggggcggcggctgccggggcgtggacagaagacactgggtgtctgagtgcaaggccaagcagagctatgtgcgggccctgacagcagatgcccagggccgggtgggctggcgctggatcagaattgacacagcctgtgtgtgcaccctgctgagcaggacaggccgggcctag

SEQ ID NO: 319774 - DNA, 633 bp, Artificial Sequence
  derived and/or modified sequence
atgctgcccctgcccagctgcagcctgcccatcctgctgctgttcctgctgccgtctgtgccaatcgagtcgcagcccccacccagcacactgcctcctttcctggcacccgagtgggacttgctctcaccacgcgtggtgctctcccgcggtgcaccagcgggaccccccttgctgttcctgcttgaggcaggagccttccgagagtcagcaggagcaccagctaatcggagccgccgcggagtgagtgagactgcccccgcgtcaaggaggggagagcttgccgtttgtgatgcagtcagcggctgggttaccgaccggagaaccgccgtggacctgcggggccgcgaggtcgaggtcctaggcgaggtgcccgccgcagggggcagtccactcagacagtattttttcgagacacggtgcaaagcggacaatgctgaggaaggcggacccggcgccggtggcgggggctgtcgtggcgtggatcggcgtcattgggtttcagagtgcaaggcgaaacaaagctatgtaagagccctcactgccgacgcccaaggcagggtagggtggaggtggattaggattgacactgcctgtgtctgtaccctgttatcacgtaccgggagagcttag

SEQ ID NO: 319775 - DNA, 999 bp, Artificial Sequence
  derived and/or modified sequence
cctaggtggttgccccctccctctcctgagatgtcaggaaggagggggccacctgtgtcctccacaggggccccccgaagcctggggactcccagccccagagctccgaggcggaggaggtgctgacaggtgctccgagagatgctccctctcccctcatgctccctccccatcctcctccttttcctcctccccagtgtgccaattgagtcccaacccccaccctcaacattgcccccttttctggcccctgagtgggaccttctctccccccgagtagtcctgtctaggggtgcccctgctgggccccctctgctcttcctgctggaggctggggcctttcgggagtcagcaggtgccccggccaaccgcagccggcgtggggtgagcgaaactgcaccagcgagtcgtcggggtgagctggctgtgtgcgatgcagtcagtggctgggtgacagaccgccggaccgctgtggacttgcgtgggcgcgaggtggaggtgttgggcgaggtgcctgcagctggcggcagtcccctccgccagtacttctttgaaacccgctgcaaggctgataacgctgaggaaggtggcccgggggcaggtggagggggctgccggggagtggacaggaggcactgggtatctgagtgcaaggccaagcagtcctatgtgcgggcattgaccgctgatgcccagggccgtgtgggctggcgatggattcgaattgacactgcctgcgtctgcacactcctcagccggactggccgggcctgagacccatgcccaggaaaataacagagctggatgctgagagacctcagggatggcccagctgatctaaggaccccagtttgggaactcatcaaataatcacaaaatcacaattctctgattttgagctcaatctctgcaggatgggtgaaaccacatggggttttggaggttgaataggagttctcctggagcaacttgagggtaataatgatgatgatataataa

SEQ ID NO: 319776 - DNA, 633 bp, Artificial Sequence
  derived and/or modified sequence
atgttaccattgcccagttgttcacttcccattctcctgctctttctgctgccatcggtaccgatcgaaagccagcctcccccttcaactctccccccatttctcgccccagagtgggatctcctgagcccacgggtggtcctttcgaggggggcaccagccggtccaccattgctcttcctactagaagctggagcctttcgggagagcgccggagcccctgctaacagatccaggaggggtgtctcagaaacagcacctgcgagcaggcgcggtgaattggccgtgtgcgacgccgtgtctgggtgggtgactgataggcgaaccgctgtggacctgagaggcagagaggtagaggtgctgggagaggtgcccgctgctggaggcagtcctctgaggcagtacttctttgagacaagatgcaaagccgacaatgcagaggaaggaggtcctggcgctggaggcggaggctgtcgaggggtagatagacggcactgggtctcagagtgcaaggccaaacaatcttacgtgagagccttaacagccgacgcacagggtagggtggggtggcgttggatccgcattgacactgcgtgcgtgtgcacgctgctctcacgtactggtcgtgcctag

SEQ ID NO: 319777 - DNA, 633 bp, Artificial Sequence
  derived and/or modified sequence
atgctgcccctgcccagctgcagcctgcccatcctgctgctgttcctgctgcccagcgtgcccatcgagagccagcccccccccagcaccctgccccccttcctggcccccgagtgggacctgctgagccccagagtggtgctgagcagaggcgcccccgccggcccccccctgctgttcctgctggaggccggcgccttcagagagagcgccggcgcccccgccaacagaagcagaagaggcgtgagcgagaccgcccccgccagcagaagaggcgagctggccgtgtgcgacgccgtgagcggctgggtgaccgacagaagaaccgccgtggacctgagaggcagagaggtggaggtgctgggcgaggtgcccgccgccggcggcagccccctgagacagtacttcttcgagaccagatgcaaggccgacaacgccgaggagggcggccccggcgccggcggcggcggctgcagaggcgtggacagaagacactgggtgagcgagtgcaaggccaagcagagctacgtgagagccctgaccgccgacgcccagggcagagtgggctggagatggatcagaatcgacaccgcctgcgtgtgcaccctgctgagcagaaccggcagagcctag

SEQ ID NO: 319778 - protein, 2169 aa, Artificial Sequence
  derived and/or modified sequence
MTHSPATSEDEERHSASECPEGGSESDSSPDGPGRGPRGTRGQGSGAPGSLASVRGLQGRSMSVPDDAHFSMMVFRIGIPDLHQTKCLRFNPDATIWTAKQQVLCALSESLQDVLNYGLFQPATSGRDANFLEEERLLREYPQSFEKGVPYLEFRYKTRVYKQTNLDEKQLAKLHTKTGLKKFLEYVQLGTSDKVARLLDKGLDPNYHDSDSGETPLTLAAQTEGSVEVIRTLCLGGAHIDFRARDGMTALHKAACARHCLALTALLDLGGSPNYKDRRGLTPLFHTAMVGGDPRCCELLLFNRAQLGIADENGWQEIHQACQRGHSQHLEHLLFYGAEPGAQNASGNTALHICALYNKETCARILLYRGADKDVKNNNGQTPFQVAVIAGNFELGELIRNHREQDVVPFQESPKYAARRRGPPGTGLTVPPALLRANSDTSMALPDWMVFSAPGAASSGAPGPTSGSQGQSQPSAPTTKLSSGTLRSASSPRGARARSPSRGRHPEDAKRQPRGRPSSSGTPREGPAGGTGGSGGPGGSLGSRGRRRKLYSAVPGRSFMAVKSYQAQAEGEISLSKGEKIKVLSIGEGGFWEGQVKGRVGWFPSDCLEEVANRSQESKQESRSDKAKRLFRHYTVGSYDSFDAPSLMDGIGPGSDYIIKEKTVLLQKKDSEGFGFVLRGAKAQTPIEEFTPTPAFPALQYLESVDEGGVAWRAGLRMGDFLIEVNGQNVVKVGHRQVVNMIRQGGNTLMVKVVMVTRHPDMDEAVHKKAPQQAKRLPPPTISLRSKSMTSELEEMVSPWKKKSEYEQQPAPVPSMEKKRTVYQMALNKLDEILAAAQQTISASESPGPGGLASLGKHRPKGFFATESSFDPHHRAQPSYERPSFLPPGPGLMLRQKSIGAAEDDRPYLAPPAMKFSRSLSVPGSEDIPPPPTTSPPEPPYSTPPVPSSSGRLTPSPRGGPFNPGSGGPLPASSPASFDGPSPPDTRVGSREKSLYHSGPLPPAHHHPPHHHHHHAPPPQPHHHHAHPPHPPEMETGGSPDDPPPRLALGPQPSLRGWRGGGPSPTPGAPSPSHHGSAGGGGGSSQGPALRYFQLPPRAASAAMYVPARSGRGRKGPLVKQTKVEGEPQKGGGLPPAPSPTSPASPQPPPAVAAPSEKNSIPIPTIIIKAPSTSSSGRSSQGSSTEAEPPTQPEPTGGGGGGGSSPSPAPAMSPVPPSPSPVPTPASPSGPATLDFTSQFGAALVGAARREGGWQNEARRRSTLFLSTDAGDEDGGDGGLGTGAAPGPRLRHSKSIDEGMFSAEPYLRLESAGSGAGYGGYGAGSRAYGGGGGSSAFTSFLPPRPLVHPLTGKALDPASPLGLALAARERALKESSEGGGAPQPPPRPPSPRYEAPPPTPHHHSPHAHHEPVLRLWGASPPDPARRELGYRAGLGSQEKSLPASPPAARRSLLHRLPPTAPGVGPLLLQLGTEPPAPHPGVSKPWRSAAPEEPERLPLHVRFLENCQPRAPVTSGRGPPSEDGPGVPPPSPRRSVPPSPTSPRASEENGLPLLVLPPPAPSVDVEDGEFLFVEPLPPPLEFSNSFEKPESPLTPGPPHPLPDTPAPATPLPPVPPPAVAAAPPTLDSTASSLTSYDSEVATLTQGASAAPGDPHPPGPPAPAAPAPAAPQPGPDPPPGTDSGIEEVDSRSSSDHPLETISSASTLSSLSAEGGGSAGGGGGAGAGVASGPELLDTYVAYLDGQAFGGSSTPGPPYPPQLMTPSKLRGRALGASGGLRPGPSGGLRDPVTPTSPTVSVTGAGTDGLLALRACSGPPTAGVAGGPVAVEPEVPPVPLPTASSLPRKLLPWEEGPGPPPPPLPGPLAQPQASALATVKASIISELSSKLQQFGGSSAAGGALPWARGGSGGGGDSHHGGASYVPERTSSLQRQRLSDDSQSSLLSKPVSSLFQNWPKPPLPPLPTGTGVSPTAAAAPGATSPSASSSSTSTRHLQGVEFEMRPPLLRRAPSPSLLPASEHKVSPAPRPSSLPILPSGPLYPGLFDIRGSPTGGAGGSADPFAPVFVPPHPGISGGLGGALSGASRSLSPTRLLSLPPDKPFGAKPLGFWTKFDVADWLEWLGLAEHRAQFLDHEIDGSHLPALTKEDYVDLGVTRVGHRMNIDRALKFFLER

SEQ ID NO: 319779 - DNA, 6510 bp, Artificial Sequence
  derived and/or modified sequence
atgacccacagccccgccaccagcgaggacgaggagagacacagcgccagcgagtgccccgagggcggcagcgagagcgacagcagccccgacggccccggcagaggccccagaggcaccagaggccagggcagcggcgcccccggcagcctggccagcgtgagaggcctgcagggcagaagcatgagcgtgcccgacgacgcccacttcagcatgatggtgttcagaatcggcatccccgacctgcaccagaccaagtgcctgagattcaaccccgacgccaccatctggaccgccaagcagcaggtgctgtgcgccctgagcgagagcctgcaggacgtgctgaactacggcctgttccagcccgccaccagcggcagagacgccaacttcctggaggaggagagactgctgagagagtacccccagagcttcgagaagggcgtgccctacctggagttcagatacaagaccagagtgtacaagcagaccaacctggacgagaagcagctggccaagctgcacaccaagaccggcctgaagaagttcctggagtacgtgcagctgggcaccagcgacaaggtggccagactgctggacaagggcctggaccccaactaccacgacagcgacagcggcgagacccccctgaccctggccgcccagaccgagggcagcgtggaggtgatcagaaccctgtgcctgggcggcgcccacatcgacttcagagccagagacggcatgaccgccctgcacaaggccgcctgcgccagacactgcctggccctgaccgccctgctggacctgggcggcagccccaactacaaggacagaagaggcctgacccccctgttccacaccgccatggtgggcggcgaccccagatgctgcgagctgctgctgttcaacagagcccagctgggcatcgccgacgagaacggctggcaggagatccaccaggcctgccagagaggccacagccagcacctggagcacctgctgttctacggcgccgagcccggcgcccagaacgccagcggcaacaccgccctgcacatctgcgccctgtacaacaaggagacctgcgccagaatcctgctgtacagaggcgccgacaaggacgtgaagaacaacaacggccagacccccttccaggtggccgtgatcgccggcaacttcgagctgggcgagctgatcagaaaccacagagagcaggacgtggtgcccttccaggagagccccaagtacgccgccagaagaagaggcccccccggcaccggcctgaccgtgccccccgccctgctgagagccaacagcgacaccagcatggccctgcccgactggatggtgttcagcgcccccggcgccgccagcagcggcgcccccggccccaccagcggcagccagggccagagccagcccagcgcccccaccaccaagctgagcagcggcaccctgagaagcgccagcagccccagaggcgccagagccagaagccccagcagaggcagacaccccgaggacgccaagagacagcccagaggcagacccagcagcagcggcacccccagagagggccccgccggcggcaccggcggcagcggcggccccggcggcagcctgggcagcagaggcagaagaagaaagctgtacagcgccgtgcccggcagaagcttcatggccgtgaagagctaccaggcccaggccgagggcgagatcagcctgagcaagggcgagaagatcaaggtgctgagcatcggcgagggcggcttctgggagggccaggtgaagggcagagtgggctggttccccagcgactgcctggaggaggtggccaacagaagccaggagagcaagcaggagagcagaagcgacaaggccaagagactgttcagacactacaccgtgggcagctacgacagcttcgacgcccccagcctgatggacggcatcggccccggcagcgactacatcatcaaggagaagaccgtgctgctgcagaagaaggacagcgagggcttcggcttcgtgctgagaggcgccaaggcccagacccccatcgaggagttcacccccacccccgccttccccgccctgcagtacctggagagcgtggacgagggcggcgtggcctggagagccggcctgagaatgggcgacttcctgatcgaggtgaacggccagaacgtggtgaaggtgggccacagacaggtggtgaacatgatcagacagggcggcaacaccctgatggtgaaggtggtgatggtgaccagacaccccgacatggacgaggccgtgcacaagaaggccccccagcaggccaagagactgcccccccccaccatcagcctgagaagcaagagcatgaccagcgagctggaggagatggtgagcccctggaagaagaagagcgagtacgagcagcagcccgcccccgtgcccagcatggagaagaagagaaccgtgtaccagatggccctgaacaagctggacgagatcctggccgccgcccagcagaccatcagcgccagcgagagccccggccccggcggcctggccagcctgggcaagcacagacccaagggcttcttcgccaccgagagcagcttcgacccccaccacagagcccagcccagctacgagagacccagcttcctgccccccggccccggcctgatgctgagacagaagagcatcggcgccgccgaggacgacagaccctacctggccccccccgccatgaagttcagcagaagcctgagcgtgcccggcagcgaggacatcccccccccccccaccaccagcccccccgagcccccctacagcaccccccccgtgcccagcagcagcggcagactgacccccagccccagaggcggccccttcaaccccggcagcggcggccccctgcccgccagcagccccgccagcttcgacggccccagcccccccgacaccagagtgggcagcagagagaagagcctgtaccacagcggccccctgccccccgcccaccaccaccccccccaccaccaccaccaccacgccccccccccccagccccaccaccaccacgcccaccccccccacccccccgagatggagaccggcggcagccccgacgaccccccccccagactggccctgggcccccagcccagcctgagaggctggagaggcggcggccccagccccacccccggcgcccccagccccagccaccacggcagcgccggcggcggcggcggcagcagccagggccccgccctgagatacttccagctgccccccagagccgccagcgccgccatgtacgtgcccgccagaagcggcagaggcagaaagggccccctggtgaagcagaccaaggtggagggcgagccccagaagggcggcggcctgccccccgcccccagccccaccagccccgccagcccccagcccccccccgccgtggccgcccccagcgagaagaacagcatccccatccccaccatcatcatcaaggcccccagcaccagcagcagcggcagaagcagccagggcagcagcaccgaggccgagccccccacccagcccgagcccaccggcggcggcggcggcggcggcagcagccccagccccgcccccgccatgagccccgtgccccccagccccagccccgtgcccacccccgccagccccagcggccccgccaccctggacttcaccagccagttcggcgccgccctggtgggcgccgccagaagagagggcggctggcagaacgaggccagaagaagaagcaccctgttcctgagcaccgacgccggcgacgaggacggcggcgacggcggcctgggcaccggcgccgcccccggccccagactgagacacagcaagagcatcgacgagggcatgttcagcgccgagccctacctgagactggagagcgccggcagcggcgccggctacggcggctacggcgccggcagcagagcctacggcggcggcggcggcagcagcgccttcaccagcttcctgccccccagacccctggtgcaccccctgaccggcaaggccctggaccccgccagccccctgggcctggccctggccgccagagagagagccctgaaggagagcagcgagggcggcggcgccccccagcccccccccagaccccccagccccagatacgaggcccccccccccaccccccaccaccacagcccccacgcccaccacgagcccgtgctgagactgtggggcgccagcccccccgaccccgccagaagagagctgggctacagagccggcctgggcagccaggagaagagcctgcccgccagcccccccgccgccagaagaagcctgctgcacagactgccccccaccgcccccggcgtgggccccctgctgctgcagctgggcaccgagccccccgccccccaccccggcgtgagcaagccctggagaagcgccgcccccgaggagcccgagagactgcccctgcacgtgagattcctggagaactgccagcccagagcccccgtgaccagcggcagaggcccccccagcgaggacggccccggcgtgcccccccccagccccagaagaagcgtgccccccagccccaccagccccagagccagcgaggagaacggcctgcccctgctggtgctgcccccccccgcccccagcgtggacgtggaggacggcgagttcctgttcgtggagcccctgcccccccccctggagttcagcaacagcttcgagaagcccgagagccccctgacccccggccccccccaccccctgcccgacacccccgcccccgccacccccctgccccccgtgcccccccccgccgtggccgccgccccccccaccctggacagcaccgccagcagcctgaccagctacgacagcgaggtggccaccctgacccagggcgccagcgccgcccccggcgacccccacccccccggcccccccgcccccgccgcccccgcccccgccgccccccagcccggccccgaccccccccccggcaccgacagcggcatcgaggaggtggacagcagaagcagcagcgaccaccccctggagaccatcagcagcgccagcaccctgagcagcctgagcgccgagggcggcggcagcgccggcggcggcggcggcgccggcgccggcgtggccagcggccccgagctgctggacacctacgtggcctacctggacggccaggccttcggcggcagcagcacccccggccccccctaccccccccagctgatgacccccagcaagctgagaggcagagccctgggcgccagcggcggcctgagacccggccccagcggcggcctgagagaccccgtgacccccaccagccccaccgtgagcgtgaccggcgccggcaccgacggcctgctggccctgagagcctgcagcggcccccccaccgccggcgtggccggcggccccgtggccgtggagcccgaggtgccccccgtgcccctgcccaccgccagcagcctgcccagaaagctgctgccctgggaggagggccccggccccccccccccccccctgcccggccccctggcccagccccaggccagcgccctggccaccgtgaaggccagcatcatcagcgagctgagcagcaagctgcagcagttcggcggcagcagcgccgccggcggcgccctgccctgggccagaggcggcagcggcggcggcggcgacagccaccacggcggcgccagctacgtgcccgagagaaccagcagcctgcagagacagagactgagcgacgacagccagagcagcctgctgagcaagcccgtgagcagcctgttccagaactggcccaagccccccctgccccccctgcccaccggcaccggcgtgagccccaccgccgccgccgcccccggcgccaccagccccagcgccagcagcagcagcaccagcaccagacacctgcagggcgtggagttcgagatgagaccccccctgctgagaagagcccccagccccagcctgctgcccgccagcgagcacaaggtgagccccgcccccagacccagcagcctgcccatcctgcccagcggccccctgtaccccggcctgttcgacatcagaggcagccccaccggcggcgccggcggcagcgccgaccccttcgcccccgtgttcgtgcccccccaccccggcatcagcggcggcctgggcggcgccctgagcggcgccagcagaagcctgagccccaccagactgctgagcctgccccccgacaagcccttcggcgccaagcccctgggcttctggaccaagttcgacgtggccgactggctggagtggctgggcctggccgagcacagagcccagttcctggaccacgagatcgacggcagccacctgcccgccctgaccaaggaggactacgtggacctgggcgtgaccagagtgggccacagaatgaacatcgacagagccctgaagttcttcctggagagatag

SEQ ID NO: 319780 - DNA, 6510 bp, Artificial Sequence
  derived and/or modified sequence
atgacacactccccggctacctcggaggacgaagagcgccactcagctagcgaatgtcccgagggtgggagcgaaagcgactcctcacctgatggacctggacggggcccaagggggaccagaggtcagggctctggggcccccggaagcttggcatctgtacgagggctgcaggggaggtccatgtctgtacctgatgacgcccatttttctatgatggtgtttcggatcgggattcctgatttgcatcagactaagtgcctacgctttaatcctgatgccacgatatggactgccaagcaacaggtgctgtgtgccctaagtgaatctctgcaggacgtccttaactacgggctgtttcaacctgcgaccagtgggagggatgcgaacttcttggaagaggagagattgctgcgggaatacccacaatccttcgagaaaggcgtcccttacttggaattccgatataaaacaagggtttataaacagaccaatctggatgaaaagcagttggccaagctccatactaaaaccggactaaaaaaattccttgaatatgttcagcttggcacctccgataaagtggcgcggttgcttgacaaggggcttgatcccaactatcatgattcagactccggggaaactccattaactctcgcagcacagacagaagggagtgtcgaagtgattcggacactgtgcctcggaggagcccatatcgacttccgggcacgggacggaatgactgcgcttcacaaggcagcatgcgcccgccattgcttggccctgactgctttactggatcttgggggctcccccaattacaaagaccggaggggacttacacctctattccacacagctatggtcgggggcgatcctcgatgttgcgaattgcttctttttaatagagctcagctagggatcgctgatgaaaatggctggcaggagatccaccaggcttgccaacgaggtcacagtcagcacctggaacacttgcttttctacggagccgagccaggcgcacaaaacgcgagcggtaatacggccctgcacatttgcgctctgtacaataaagagacatgcgcgagaatcctgctataccggggggctgacaaggacgtaaaaaacaacaacggacagacaccatttcaggttgccgtgattgcagggaattttgaactaggtgagcttattaggaatcaccgggaacaggacgtggtgccctttcaagagtcgccgaagtacgctgccagacggcggggtccacccgggaccggactgacagtgccaccagccctgttgcgggcaaacagcgatacctcaatggccttgcccgactggatggtcttttctgctccaggcgccgccagctcaggtgcccctggaccaacaagcggcagccagggccagtcacaacctagtgcacccaccacaaagcttagttcgggcacattaagatcggccagctcaccacggggtgcaagagcccgttctccaagcagggggcgtcaccctgaagacgccaagaggcaaccccggggcagaccttctagttccggaaccccccgcgaaggaccagctggagggacgggcggcagtgggggccctggcggatctctgggctcccgcgggcggcgccgaaaactttacagcgctgttcctggccggagcttcatggccgtgaaatcataccaggcccaggccgagggggagatctctctatcaaaaggcgagaaaatcaaggttttgtccatcggggaaggcggtttctgggaaggacaggttaagggtcgtgtgggctggttcccctcagattgccttgaggaggtggccaatcggagccaagaaagcaagcaggaaagcagatccgacaaggcgaagcggctctttcggcattacactgttgggtcgtacgactcgtttgatgcaccttccctgatggacggtattggccccggatccgattatatcattaaagagaaaactgtccttttgcaaaagaaggattctgaaggctttgggttcgtgctgcgcggggccaaggcccagactccaattgaagagtttacacccacccccgcctttccagcgttgcaatacttggaatcagtggacgaagggggcgtggcttggcgcgccggcttgcgcatgggtgactttctgattgaggtgaatggacagaatgtagtgaaagtgggtcaccgccaggtggtgaacatgattcgccagggcggaaatactctaatggtgaaagttgtgatggtgacaagacacccagacatggatgaagctgtgcacaagaaggcacctcagcaggccaaacggttgccccccccgaccatctctctaaggagcaagtctatgacatcagagcttgaggaaatggtgagtccttggaaaaagaaatctgaatacgaacaacaacctgcccctgtgccttccatggagaaaaaaagaactgtctatcagatggctctcaacaagctagacgaaatcttagccgcggcccaacaaacaatctccgctagtgaaagtcctggccccggagggttggcttctctgggtaagcaccgaccgaagggattcttcgctacagagagtagcttcgatccacaccaccgagcccagccttcatatgagcggccgtcctttttacccccaggcccaggtctgatgcttcgacagaagtccatcggcgctgccgaggatgaccgtccctaccttgcaccccccgcaatgaagtttagccggtctctttccgtgcctggcagcgaagatataccacctccgcctaccacttcgccccctgaacctccttatagtactccgccagtgccttcctcttccggaaggctgacgcccagtccccgtgggggaccattcaatcctggaagcggcggccccctccctgcatcgagtccggcatccttcgatggcccttcgccacccgatacgcgggtggggtcgcgggagaagtccctgtaccattcagggccattgccgcccgcccaccatcaccctccccatcaccatcaccatcacgcaccacccccccagccccatcatcaccacgctcacccacctcatccaccagaaatggaaacaggggggtcacctgatgacccacctcctcgccttgctctcggacctcagccttctctaagagggtggagaggtggtggaccctcaccgacaccaggcgcaccctcccctagccatcatggatctgcggggggggggggaggaagctctcagggtcccgcccttcgatatttccagttgcctccacgggccgcctcagcagctatgtacgtgcctgcacgcagcggcaggggccgcaaaggccccctggtgaaacagacgaaggtggaaggggagccacagaaggggggaggactaccccctgctcccagtcctacttcccctgcctcgccccagcctccccctgcagtggccgcaccctccgagaaaaacagtattccaattccgactatcattatcaaagccccatccacatcctctagtggcaggagctcccagggatcatctacagaggctgaacctccaacccaaccggaacccactggcggtggaggtggtggcgggagcagcccttctcctgctcccgccatgtcccccgtcccgcctagcccttcgccagtacctactcctgcctcaccttcagggccagcaaccctggactttacctctcaatttggcgcggcacttgtaggcgccgcaaggcgggagggaggctggcagaacgaggctagacggcgatcaacccttttcttgtcgaccgacgccggggatgaggacggcggtgacggtggtctaggcaccggggctgctcccggtccccgtctcagacatagcaagtccatcgacgagggaatgttttctgcggagccatatctacgcctcgaatccgctggatctggtgcaggctatgggggatacggagccggaagtcgggcgtacggtggaggtggaggaagtagtgcctttacgtcattcctgcccccccgcccactggtgcatcccctaacaggaaaagccctggaccctgcgtcgccactcggactggcactcgccgctagggagcgagccttgaaggaatctagcgaaggcggaggggctccacagcccccaccgcgaccaccttccccgagatacgaagctcccccacctacgccccaccatcactccccccacgcccaccacgaacccgtgctcaggttgtggggggccagtcctcccgatcctgcacggcgcgaactcggctaccgagctggtctcggaagtcaagagaagagtctccctgcgtctccacccgcagctagacgaagcctcttgcatcgactgcctcctaccgcccctggcgtgggtccattgttactgcagctgggaacagaaccgcctgcccctcaccccggcgtttctaaaccatggcgcagtgctgcccccgaggaacctgaacgcttaccgctgcacgtgcggtttttggagaattgtcagccaagggctcctgtcacatcaggaagaggacccccctctgaagatggccccggggtacccccgcctagcccaaggagatctgttcctccctcccccacatctccaagagcaagcgaagagaatggcctgcctctactggtcctaccccctcccgccccctcagttgacgtcgaggacggggaatttctctttgtggagcctctacctcctcctctggagttctccaacagcttcgaaaaacctgaatcccctctgacccccggccctccacaccccctgcccgatacacccgccccagcaacacctctgccgcccgtgcccccaccagccgtggcagccgccccacctacgctggactcaaccgcctcctcgctgacctcgtacgacagcgaagtcgctactctgacccagggagccagcgctgcccccggggatccacatccgcccgggccgcctgcacctgcagctcccgcccccgccgccccccagccgggtccagatcctccaccagggactgatagcggtatcgaagaggttgacagccgctcgagcagtgatcaccctttggaaacaatttcatcggccagtaccttaagtagcctctcagcagaggggggcggcagtgccggcggtggcggtggagcaggcgctggagtggcctctggacctgagctgctggacacttacgtcgcgtatctcgatggccaggcttttgggggcagtagcacgccagggccaccgtatcccccacaactcatgacacccagtaaactgcgcggtcgggctctgggcgcctctggaggtctcagacccggtcctagtggcggcctccgcgaccctgttacaccaactagccccacagtctccgtaacgggggctggaacggacggcctgctggccctgcgggcctgttctggccctcctactgcgggcgtcgccgggggccccgtggctgtggaaccagaggttcccccagttcctctcccaaccgcatcctctctgccccgcaaacttctcccttgggaagaggggcccggacctcccccaccacccctgccaggcccactggctcagcctcaagctagcgctctcgccactgttaaggcttccataatctcagaacttagttcaaagctgcagcaattcggtggcagttcagcggcaggcggggccctgccatgggcgcgcggtggaagtggcggagggggcgattctcaccatgggggtgctagctacgtgcccgaacgcactagtagcctacagcggcagcgcctttccgacgatagccagagcagtctgctctccaaacccgtgtcttccctgttccagaattggcctaagcctcccctgccgcctctccctacgggcacaggcgtctcccctactgccgctgccgcacctggtgccacctccccctctgcgtccagctcatcgacatcgacaagacacttgcagggtgtggagttcgaaatgagacctccactgttgaggagggcgccaagcccttcgcttctgcctgcttcagagcataaagtcagccctgcaccccggccatcttccctgccaattttaccctcgggaccactgtatcccgggctgtttgacatccgtggatcgcctacggggggggccggagggtctgcagatccctttgcccctgtcttcgtgcctcctcaccctggaattagcggaggactcggcggtgcgctatctggcgcatctcgaagcctgtccccaacccgcctcctctcacttccaccggataaaccattcggggctaaacctctgggcttttggactaaattcgatgtagccgactggttggaatggctgggccttgcggaacaccgcgctcaatttcttgaccacgaaatagacggatctcacctgccagcgcttactaaggaagattatgttgaccttggcgtcacaagggtgggccatcggatgaatatagaccgagctctgaagtttttcctggagagatag

SEQ ID NO: 319781 - DNA, 6510 bp, Artificial Sequence
  derived and/or modified sequence
atgacccacagccctgccaccagtgaagatgaggagcggcacagcgccagcgagtgcccagagggcggcagcgagagtgacagcagcccagatggccctggccggggcccccggggcacccggggccagggcagcggggcccctggcagcctggcctctgtgcggggcctgcagggccgctccatgtctgtgcctgatgatgcccacttctccatgatggtgttcagaattggcatcccagacctgcaccagaccaagtgcctgcgcttcaacccagatgccaccatctggacagccaagcagcaggtgctgtgtgccctgtctgagagcctgcaggatgtgctgaactacggcctcttccagcctgccaccagcggcagagatgccaacttcctggaggaggagcggctgctgcgggagtacccccagagctttgagaagggcgtgccctacctggagttccgctacaagaccagggtgtacaagcagaccaacctggatgagaagcagctggccaagctgcacaccaagacaggcctgaagaagttcctggagtatgtgcagctgggcaccagtgacaaggtggcccggctgctggacaagggcctggaccccaactaccatgacagcgacagcggggagacccccctgaccctggccgcccagacagagggctctgtggaggtgatccgcaccctgtgcctgggcggggcccacatcgacttccgggccagagatggcatgacagccctgcacaaggccgcctgtgcccggcactgcctggccctgacagccctgctggacctgggcggcagccccaactacaaggaccggcggggcctgacccccctcttccacacagccatggtgggcggggacccccgctgctgtgagctgctgctcttcaacagagcccagctgggcattgctgatgaaaatggctggcaggagatccaccaggcctgccagaggggccacagccagcacctggagcacctgctcttctacggggctgagcccggggcccagaatgccagcggcaacacagccctgcacatctgtgccctgtacaacaaggagacctgtgcccgcatcctgctgtacagaggagctgacaaggatgtgaagaacaacaacggccagacccccttccaggtggccgtgattgctggcaactttgagctgggggagctgatccggaaccaccgggagcaggatgtggtgcccttccaggagagccccaagtatgctgcccggcggcggggccccccaggcaccggcctgactgtgcccccagccctgctgcgggccaacagcgacacctccatggccctgcctgactggatggtgttcagcgcccctggggccgccagcagcggggcccctggccccaccagcggcagccagggccagagccagcccagcgcccccaccaccaagctgagcagcggcaccctgcggagcgccagcagccccaggggggcccgggcccggagccccagccggggccgccacccagaagatgccaagaggcagccccggggccggcccagcagcagcggcaccccccgggagggccctgctgggggcactggaggcagcggcggccctgggggcagcctgggcagccggggcagaagaaggaagctgtacagcgctgtgcccggccgctccttcatggctgtgaagagctaccaggcccaggccgagggggagatcagcctgagcaaaggagagaagatcaaggtgctgagcatcggggagggcggcttctgggagggccaggtgaagggccgggtgggctggttccccagcgactgcctggaggaggtggccaacagaagccaggagagcaagcaggagagcagaagtgacaaggccaagaggctcttccgccactacacagtgggcagctatgacagctttgatgcccccagcctgatggatggcatcggccctggcagtgactacatcatcaaggagaagacagtgctgctgcagaagaaggacagcgagggcttcggctttgtgctgcggggggccaaggcccagacccccatcgaggagttcacccccaccccagccttccctgccctgcagtacctggagagcgtggatgagggcggcgtggcctggagggctggcctgaggatgggagacttcctgattgaggtgaatggccagaatgtggtgaaggtgggccaccggcaggtggtgaacatgatccggcagggcggcaacaccctgatggtgaaggtggtgatggtgaccaggcacccagacatggatgaagctgtgcacaagaaggccccccagcaggccaagaggctgcccccacccaccatcagcctgcggagcaagtccatgaccagcgagctggaggagatggtgagcccctggaagaagaagtcagaatatgagcagcagcctgcccctgtgcccagcatggagaagaagaggacagtgtaccagatggccctgaacaagctggatgagatcctggccgccgcccagcagaccatcagcgccagcgagagccctggccctgggggcctggccagcctgggcaagcaccggcccaagggcttctttgccacagagagcagctttgacccccaccaccgggcccagcccagctatgaaagacccagcttcctgcccccaggccctggcctgatgctgcggcagaagagcattggagctgctgaagatgaccggccctacctggcccccccagccatgaagttcagccgcagcctgtctgtgcccggcagcgaggacatccccccaccacccaccaccagccccccagagcccccctacagcaccccacctgtgcccagcagcagcggccgcctgacccccagcccccggggcggccccttcaaccctggcagcggcggccccctgcctgccagcagccctgccagctttgatggccccagccccccagacaccagggtgggcagccgggagaagagcctgtaccacagcggccccctgcccccagcccaccaccaccccccccaccaccaccaccaccacgcccccccaccccagccccaccaccaccacgcccaccccccccaccccccagagatggagaccggcggcagcccagatgatcctccaccccggctggccctgggcccccagcccagcctgcggggctggaggggcggcggccccagccccacccctggggcccccagccccagccaccacggcagcgctgggggcggcggcggcagcagccagggccctgccctgcgctacttccagctgccccccagggctgccagcgctgccatgtatgtgcctgcccggagcggccggggcaggaagggccccctggtgaagcagaccaaggtggagggggagccccagaagggcggcggcctgcccccagcccccagccccaccagccctgccagcccccagcccccacctgctgtggccgcccccagcgagaagaacagcatccccatccccaccatcatcatcaaggcccccagcaccagcagcagcggccgcagcagccagggcagcagcacagaagctgagccccccacccagcctgagcccaccggcggcggcggcggcggcggcagcagccccagccctgccccagccatgagccctgtgccccccagccccagccctgtgcccaccccagccagccccagcggccctgccaccctggacttcaccagccagtttggagctgccctggtgggcgccgcccggcgggagggcggctggcagaatgaggcccggcggcgcagcaccctcttcctgagcacagatgctggagatgaagatggaggagatggcggcctgggcaccggggccgcccctggcccccggctgcggcacagcaagagcattgatgagggcatgttttctgctgagccctacctgcggctggagagcgctggcagcggggccggctacggcggctatggagctggcagccgggcctacggcggcggcggcggcagcagcgccttcaccagcttcctgcccccccggcccctggtgcaccccctgaccgggaaggccctggaccctgccagccccctgggcctggccctggccgcccgggagcgggccctgaaggagagcagcgagggcggcggggccccccagcccccaccccggccccccagccccaggtatgaggcccccccacccaccccccaccaccacagcccccacgcccaccacgagcctgtgctgcggctgtggggcgccagccccccagaccctgcccggcgggagctgggctaccgggccggcctgggcagccaggagaagagcctgcctgccagccccccagctgcccggcgcagcctgctgcaccggctgcccccaacagcccctggggtgggccccctgctgctgcagctgggcacagagcccccagccccccaccctggggtgtccaagccctggaggtctgctgcccctgaggagcctgagcggctgcccctgcacgtgcgcttcctggagaactgccagccccgggcccctgtgaccagcggccggggccccccatctgaagatggccctggggtgcccccacccagcccccggcgctctgtgccccccagccccaccagcccccgggcctctgaagaaaatggcctgcccctgctggtgctgcccccaccagcccccagcgtggatgtggaggatggagagttcctgtttgtggagcccctgcccccacccctggagttcagcaacagctttgagaagccagagagccccctgaccccaggccccccccaccccctgcctgacaccccagccccagccacccccctgccccctgtgcccccacctgctgtggccgccgccccacccaccctggacagcacagccagcagcctgaccagctatgattctgaggtggccaccctgacccagggcgccagcgctgcccctggggacccccaccccccaggccccccagccccagctgccccagccccagctgccccccagcccggccctgaccccccacctggaacagattctggaattgaggaggtggacagccgcagcagcagtgaccaccccctggagaccatcagcagcgccagcaccctgagcagcctgtctgctgagggcggcggcagcgctgggggcggcggcggggccggggccggcgtggccagcggccctgagctgctggacacctacgtggcctacctggatggccaggcctttggaggcagcagcaccccaggccccccctacccaccccagctgatgacccccagcaagctgcggggccgggccctgggcgccagcggcggcctgcggcccggccccagcggcggcctgcgggaccctgtgacccccaccagccccaccgtgtctgtgactggagctggaacagatggcctgctggccctgcgggcctgcagcggccccccaacagctggggtggccggcggccctgtggccgtggagcctgaggtgccccctgtgcccctgcccacagccagcagcctgcccaggaagctgctgccctgggaggagggccctggccccccacctccacccctgcccggccccctggcccagccccaggccagcgccctggccaccgtgaaggccagcatcatcagcgagctgagcagcaagctgcagcagtttggaggcagcagcgctgctggaggagccctgccctgggcccggggcggcagcggcggcggcggggacagccaccacggcggggccagctatgtgcctgagaggaccagcagcctgcagaggcagaggctgagtgatgacagccagagcagcctgctgagcaagcctgtgagcagcctcttccagaactggcccaagccacccctgccccccctgcccaccggcaccggggtgagccccacagctgctgctgcccctggggccaccagccccagcgccagcagcagcagcaccagcaccaggcacctgcagggcgtggagtttgagatgaggcctcccctgctgcggcgggcccccagccccagcctgctgcctgccagcgagcacaaggtgtccccagccccccggcccagcagcctgcccatcctgcccagcggccccctgtacccaggcctgtttgacatccggggcagccccaccggcggggccggcggcagcgctgacccctttgcccctgtgtttgtgcccccccaccctggcatcagcggcggcctgggcggggccctgagcggggccagccgcagcctgagccccacccggctgctgagcctgcccccagacaagccctttggagccaagcccctgggcttctggaccaagtttgatgtggccgactggctggagtggctgggcctggccgagcaccgggcccagttcctggaccacgagattgatggcagccacctgcctgccctgaccaaggaggactatgtggacctgggcgtgaccagggtgggccacaggatgaacatcgaccgggccctgaagttcttcctggagaggtag

SEQ ID NO: 319782 - DNA, 6510 bp, Artificial Sequence
  derived and/or modified sequence
atgacccacagccccgccaccagcgaggacgaggagcggcacagcgcttcagagtgtcccgaaggaggctcagagagcgattccagccccgacgggcccggacgtggtcctagaggcacccggggacaaggaagcggggcccctggtagcctggcaagtgtgcgaggactacaaggcagatccatgtccgttcccgacgatgcacacttctccatgatggtttttaggataggcattccggatctgcaccagactaagtgtttacgttttaacccagatgccacgatatggactgctaaacagcaggtcctctgcgccttgtcggaaagtcttcaggacgtgctgaattacggcttgtttcaacccgcgactagtggcagggacgccaactttctggaggaggaaaggctcctccgggagtatcctcagtcctttgaaaagggcgtgccatacctcgaattccgttataagactagagtatacaagcagaccaacttggacgaaaaacagctcgctaaactccacactaagacggggcttaaaaagtttttggaatatgtgcagctcgggacatccgacaaggtagcacgcctcttggataagggacttgacccgaactatcacgacagtgattccggagaaaccccccttaccctggcggcgcaaacagaaggttccgtggaggtgatccggaccctctgcctggggggggcccacatcgactttagggctcgcgatggtatgacagctcttcataaggccgcctgcgcccgccactgcctggccctgaccgccctgctagacctgggaggaagtcccaattataaggaccggcggggtcttactcctctgtttcataccgctatggtagggggggacccaagatgttgcgagctgcttctttttaacagggcgcagcttgggatcgcggatgagaacggctggcaggagattcatcaggcctgtcaacgtgggcacagtcagcacctcgagcaccttctgttctacggtgcagagcccggcgcccaaaacgcctccggaaacaccgcccttcacatttgtgccctgtacaataaagagacttgcgccaggattctcctatatcgcggggctgataaagatgtaaagaataacaacggccagacaccatttcaagtagccgttattgctggcaacttcgagctcggcgagcttatcaggaatcaccgcgagcaggacgtagttccttttcaggaaagcccaaaatatgccgcacgacgaaggggaccaccaggtactggactcactgttccccccgcactgctccgagctaattctgacacctcaatggcgcttccggactggatggtcttcagtgctccaggggcagccagcagcggggcccccggtccaactagcggatcgcagggacagagccagccatccgcccctactacaaaactgtcctccggaactctcagatctgccagttcacctaggggggctcgggctagatcaccgtccaggggtcgtcacccagaagatgcgaagcggcagccaaggggacggccttcctccagcgggactccgagagagggtccagctgggggcaccggaggcagcggtgggcctggaggcagtctgggcagcagaggtcgtaggcgcaagctctattctgcagtcccaggacgatcttttatggcggtcaaaagctaccaggcacaggcagaaggggagatcagtctgtcgaaaggagagaaaattaaagtgctaagcataggtgagggcgggttttgggaagggcaagttaaaggacgcgtgggatggttcccctctgattgtctcgaggaagtggctaaccgtagccaggaatcgaagcaagaatctcgctccgacaaggccaaacggctctttagacactataccgtcggcagttacgacagttttgatgcgcccagccttatggatggcatcggccctggctctgactacatcattaaggagaaaaccgtgcttctacagaaaaaagattcggaaggattcggatttgttctgcgcggagccaaagcacaaacccctatcgaagagttcacacctacccccgcatttcccgcactgcaatatcttgaatccgtcgatgagggaggcgtggcctggagggctggcttgcggatgggcgactttttaatcgaggtgaacggccaaaatgttgtgaaggtgggacatcggcaggtggtgaacatgatccgccagggggggaatacactgatggtgaaagttgtcatggtcacaagacacccagatatggatgaagcggtgcataagaaggcacctcaacaagccaagcgccttcctccgccaacaatttccctccgctctaagagcatgacatccgagctcgaagaaatggtaagcccctggaagaagaagtctgagtatgagcagcagccagccccagttccctccatggagaaaaagcgcaccgtctaccaaatggccctgaacaagctagatgagatcctcgccgcagcccagcagaccatctctgcctccgagtcacccggacccggtggattggccagtttaggcaaacaccgacccaagggcttctttgcaactgagagctcatttgatccgcaccatcgcgcccagccatcttatgagcgcccttcatttctgccacccggccccggtttgatgctaaggcagaagtcgataggagctgctgaagatgatcgtccttatctggcaccacccgccatgaagttttcacggagcctctcagtgccgggatcggaagacatccccccacccccaacaacatcccctcctgagcctccctacagtacccccccggtaccaagctcgtcaggcaggctcactcccagcccgagaggagggcccttcaatccggggtctggaggaccgttgccagcatcatcaccagctagcttcgatggaccaagtcctcctgacaccagggttggtagtcgggagaagagcctgtatcacagcggacccctcccacccgcacatcaccacccacctcaccaccaccatcatcacgcccctccgccacagccacaccaccaccatgcacaccccccgcatcctccggaaatggagacaggcgggagcccagacgacccacccccaaggctcgcgctgggaccacagccgtcattgaggggatggaggggtggcggtccctcccctactcccggcgcgccgtcaccctctcaccacggtagcgctggtgggggtggcggatcttcccaagggcctgccttgcggtattttcagttacctccccgggccgcttcagccgccatgtacgtgcctgcaaggtccggtagggggagaaagggccctttggtgaaacagactaaagtggaaggcgaacctcagaagggcggcggcctcccccctgctccctcaccaacatcacctgctagtcctcagccaccccctgccgtcgctgcgccgtcggaaaagaatagtatcccaattcccacaatcattattaaggcgcctagcacaagctcatccgggcgctcttcacagggatcaagtacagaagccgagccacctactcagcccgaaccgaccggcggggggggcggcggcggaagctccccaagtccagccccagcaatgagtcctgtgcccccatccccctccccggtgcccacacccgcctcccctagtgggccggccacgctagattttacctcgcaattcggtgcagcactcgtgggcgccgcacgccgtgaggggggttggcagaatgaggctcggagacgcagcactctgtttctatctacagacgctggagacgaagacggaggtgatggaggactcggcacaggggccgctccgggtcccaggttgagacacagtaagtctattgacgaagggatgtttagcgctgaaccatatctcagactagaatctgccggcagtggagccggctacggaggatacggtgctggttcaagggcttatggtggtgggggtggctcatccgcctttacatccttcttgcctcctaggcctctagttcaccctctgacaggtaaggcactggatccagccagcccacttggcctcgccctcgccgcgcgggagcgcgccctgaaagagtccagcgaaggaggaggtgccccacaacctcccccacgacccccttctccccggtacgaggcccctccacctactccccaccaccactctccacacgcccaccatgagcccgttttgcgcctctggggtgcaagtccgccagatccggcacgacgtgagctgggctacagggccggcctggggagccaggagaagtctctgccagcgagtcctcctgcagctagaagatcactgctgcatagactacctcctaccgcacctggcgtgggccccctgttactgcagctcggcactgagccacctgcaccacacccaggggtgtccaagccctggagatcagctgccccagaggaacccgagcggctacccctgcacgtgaggttcttggagaactgtcaacccagagcacctgtgacctccggcagaggtcctccatccgaggatggccccggcgttcctcctccctctcccaggcggtcggttcccccatcaccaacctcccctagggccagcgaggagaatggcttgcctttgctggtccttcctccccctgcaccttccgtcgacgtcgaggacggtgagtttctattcgtcgagcctttgcctccacccctggaattcagcaactcatttgaaaaacctgagtcaccacttaccccgggtccacctcaccctttgccggacactcccgccccggccacacccctaccgcctgtcccaccacctgctgtcgccgcggccccgcctaccctggattcaactgcttcctctctgacctcttacgactcagaagttgcaacactgacacagggggcaagcgctgcgccgggagacccacaccctcctggcccaccagcaccagctgcgccagccccagctgcaccccagcccggacctgaccctcccccaggaaccgactcagggattgaggaggtggatagcaggtctagcagcgaccatcccctcgagactatctcatccgcgagtactttgagttcattatccgctgaagggggaggctccgcagggggcggaggcggcgccggggccggcgttgcctcgggtcctgaactcttggacacttacgtcgcctacctagacgggcaggcctttggtgggtcgagtactccaggacctccctaccctccccaactgatgacacccagtaagctgcgagggagggctctgggggcctcggggggtctgcgcccgggaccatcaggcggccttagggaccccgtaactccgacgtcgcctaccgtgtcggtgacaggagctggaactgacggattactggccctgagggcctgttctgggccaccgaccgccggggtggctgggggacccgtggccgtggaaccggaagtgcctccagttccactccctacagcttcttcattgccgaggaaactgttgccttgggaagaaggccctggaccccctcctcctcctttgcccggaccactggctcagcctcaggctagcgctctcgctactgtaaaagcctctatcatctccgagcttagtagcaagcttcaacagttcggcggaagcagcgctgcgggtggagcattaccttgggccaggggcggcagcggcggggggggcgactcacatcatggtggagcctcgtacgtgcctgagagaacatcaagcctgcagaggcagagactttctgacgactcgcaaagtagcctgttatcaaaacctgtctcttcccttttccaaaattggccaaaaccccccttaccccccctgccaacgggcaccggggtctctcctaccgcggcagctgctcctggcgcgaccagccccagcgccagctcaagttccactagtactagacatctgcagggcgttgaattcgaaatgagaccacctttgctgaggagagcacctagcccctcacttctgcccgcgtctgagcacaaagtaagtcccgccccccgtccttccagcctacccatcctcccctcaggcccactctatcccggactattcgacattagagggtcccctacgggcggagctggggggagcgcggaccccttcgcacccgtctttgtaccgccccacccagggattagcggaggactcggcggtgccctgtcaggtgctagtcggtcattgagtcctacacgccttctgagtctccctccagacaagccgtttggcgctaaacctctggggttttggaccaagttcgatgtcgcagactggctggaatggctgggactggccgaacatcgcgcccaatttctggaccacgagatagacgggtctcatctgcccgcccttacaaaagaagattacgtggaccttggcgttaccagggtaggtcatagaatgaatatcgatcgggccctgaagttctttcttgaaagatag

SEQ ID NO: 319783 - DNA, 6509 bp, Artificial Sequence
  derived and/or modified sequence
atgacacacagcccagcaaccagcgaggatgaggagcgccattctgcctcagagtgtcccgagggcggttctgagagtgacagctcccctgacggtcctggccgaggaccgcgaggtactcggggacagggctcaggcgctcccggttcgctcgccagcgttaggggcctgcagggccgatccatgtctgtgcctgacgatgcgcacttttcaatgatggtttttaggatcggaattcccgatctgcatcaaaccaagtgtctccggtttaatccagatgccacaatctggacggctaagcagcaggttctgtgcgctctgagcgagtccctgcaggacgttttaaattacggcctcttccagccagcaacgtccggcagggacgccaacttcctcgaagaggagcggctcttgagagagtatccccagtcattcgaaaagggcgttccttacttggagtttagatacaaaacaagagtgtacaaacaaacaaacctggacgagaagcagttagctaagctacacacaaaaaccgggctcaagaagtttctcgagtatgtacaactggggacgagcgacaaggtggcaaggctactggataaaggcctggacccaaactaccatgacagcgattccggggaaacacccctgacgctcgctgcccaaacagaggggtctgtggaagttattaggactctgtgcttaggcggtgcacacattgacttcagagccagggacggcatgaccgcccttcacaaagccgcttgcgctagacactgcctcgctctgacggcactgctcgatctcggcggtagccccaactataaagataggaggggtctaacccctctcttccacacagccatggtcggcggagatccccgatgctgcgagttgctgttgtttaaccgagcacagctgggaattgcagatgagaatggttggcaggagattcaccaggcctgtcaaaggggacactctcaacatctcgagcatctactcttttatggggctgaacctggagctcaaaacgctagtggcaatacggcccttcatatttgcgctctctacaataaagaaacatgcgcaagaatcctgctgtaccgcggtgcagacaaagacgtgaagaataacaacgggcaaacgccatttcaggtggcagtaatcgcaggtaattttgagctgggggagttgatccgaaatcaccgggaacaggacgtggtcccgtttcaggagtcgcctaagtacgctgcaagaaggagagggccaccaggaacaggcctgaccgtgccacctgccctactcagagcaaactctgatacttctatggcgctaccagattggatggtgttttctgctccaggagctgcttcaagtggcgcacccggaccaacgtctggcagccagggtcagagccagccctctgccccaaccacgaaactcagtagcggcaccctccggagtgcttcttctcctcgaggagcgcgagctcgcagtcctagccggggacgccatcctgaggatgcgaagcgccagccgaggggacgccctagctccagtggaacgcctcgtgaggggccagcaggcggtacagggggatctggtgggccaggcggatcccttgggagccggggtcgacgcaggaaactctattcggccgtgcccggtaggtctttcatggcggtgaaatcctaccaggcacaggcagaaggcgaaatctccctgtccaagggcgaaaaaatcaaggtcctatcaatcggcgagggaggattctgggaaggccaggtcaagggcagagtgggctggtttccgagcgattgtctggaagaggtagcaaaccgctcacaggagtcgaagcaggaatccagatccgataaggccaaacgcctcttcaggcattacactgtggggagctacgattctttcgacgcaccttccttgatggatggaatcgggcctggaagtgactacatcatcaaggaaaagacagtgctcctccagaaaaaagatagcgagggcttcggcttcgtgctcagaggcgctaaagcccagactcccatagaggaattcacaccaactccagccttccctgcacttcaatatctggaatcagttgacgaaggtggcgttgcttggagagccggattaagaatgggggactttctgatagaagtgaacgggcagaatgtagtgaaagtcggccatcgacaggttgtgaacatgatcagacagggtggcaatactttgatggtgaaagtggtgatggtcacacggcaccccgacatggatgaagctgtccacaaaaaggctcctcaacaggccaaacggctgcctcctccaaccataagtctgcgcagtaaaagcatgacatctgaactggaagagatggtctcaccatggaaaaagaagagtgaatacgaacagcagcccgctccagtgccctccatggaaaaaaagagaacagtgtatcagatggccttaaataaactagacgaaatacttgcagctgcccagcagaccatttcagcctccgaatctcccggacctgggggattggcatccttgggtaagcacaggcctaagggtttctttgcgaccgaatcgtcctttgatccccaccacagagctcagcccagttacgaacggccttcctttctgcctcccggacctggactgatgctgcggcagaagagcatcggagcagcggaggacgacaggccatacctagcaccgccagccatgaagttcagccgatccttgagcgtaccagggagcgaggatatccccccacctcccactaccagtccgccagagccgccatattctaccccgcctgtgccctcctcatcgggcagattgaccccttccccacggggaggtcctttcaatcctgggtccgggggtccactgcccgcttcctcccccgcttcctttgacggtccatctccccctgataccagggtgggctctagagagaaatcactgtaccatagtggtccactccctcccgcacaccaccacccccctcatcatcaccatcaccacgccccaccccctcaaccccaccatcaccacgcccatcctcctcatccaccggagatggagactgggggatctcccgatgatcctccccctcgtcttgctctggggcctcaacctagcctccggggatggcggggtgggggtccttcccccactcccggagcccctagcccatctcaccacggttcagccggtggcggaggaggatcctctcaggggcctgctctcagatacttccagttaccaccgcgagctgcttcagcagccatgtacgtccccgcacgttcaggccgtggccgaaagggtcctcttgtcaaacagaccaaagttgaaggcgaaccacaaaagggagggggtctgccccctgccccatcaccaaccagtccagcttccccccaacctcctcccgctgtcgcagcgccatctgagaaaaattcaatccccattccaactattatcatcaaggctccatcaacctcatcttcaggccgaagtagtcaggggtcttccacagaagctgaaccacccactcaaccggagcctaccggtggtggcggtggcggtggatcttccccctctccagcaccagcaatgtccccagtgccaccctccccttcccctgttcctactcccgctagtccttcaggccctgcaaccttggatttcacatcccagttcggggcagcacttgtaggcgctgctcgcagagagggcggatggcaaaatgaagccagacgcagatctacgctgttcctttcaacggacgcaggcgatgaagatggaggcgatggcggtctcggaaccggcgctgcaccaggacctcgcctacggcactccaaatctatcgacgaggggatgttcagcgcagaaccttacctgcggctcgaaagcgctgggagtggggcagggtatggaggctatggtgctgggtcccgggcttacggaggcggagggggaagtagcgctttcacttcctttttaccccctcgcccactggtgcaccccctcacaggaaaagccctggaccctgccagtcccttgggcctggccctggctgccagggaacgggcattaaaggagtccagcgagggaggtggggctccacagcctccccctaggccacccagccctagatatgaggcgcctccgcctaccccccatcaccatagtccgcatgctcaccatgagccagtattaaggctgtggggtgccagtcctcccgatcccgcacggagagaactcggttacagggcaggcctcggatcccaggagaaatccctgcccgcaagtccccctgctgcaaggcggagcctcctgcatcgattgccaccgacagccccaggcgtgggccctcttttgctccagctcgggactgaaccgccagcccctcacccgggtgttagcaagccatggcggtctgcagctccggaagagccagaaagattgccgctccacgtccgctttctggagaactgtcaacctcgagccccagtgacaagcggcagaggaccgccatccgaagacgggccaggcgtccctccgccatcgccaagacggtctgttccccctagcccgacttctccaagagcttccgaggaaaatgggctaccattactcgtgctgccacccccagctccgtcggtggacgttgaagatggggaattcctctttgtggagcccttgccacctcctttggagttttcaaactcctttgaaaagcccgaaagtcccctgacccccggaccccctcacccactccctgacactcccgcacctgcaacccccttgcctcccgtgccgcctcccgcagtcgcagctgcacctccgaccctggactctacagcatccagcctgacatcctacgactctgaggtggctacccttacccagggagccagtgccgcacccggagatccgcaccctcccggtccacctgccccagccgcaccagcccctgctgcacctcaaccaggacctgatcctcccccaggtactgactctggcatagaggaggtcgactctagaagcagctctgatcaccccctggagactatcagtagcgcgtccaccctgagcagcctcagcgccgagggaggaggatcagccggtggcggaggtggggctggtgccggagttgcatcaggacccgagctgctggacacctacgtggcatacctagacggccaggcctttggtggatcatccacccctggcccaccataccccccacagctcatgacaccctctaagctcaggggtagagctctaggcgcatctggcggtctccgcccaggcccaagcggcggactccgcgaccctgtgacacctacctcccccactgtaagtgtgacaggagcgggaactgacggcctgctagcactgcgcgcatgctctgggccacctactgcaggtgtggctggaggccctgtggccgttgagcctgaggtccctccagtgcctcttcccactgctagttcattacccaggaaactgctcccttgggaagagggacctggccctccccctcctccactcccgggaccattggcccaacctcaggcttcggcacttgcaactgtgaaggcgtctattatttcggagctctcttcaaagctgcaacagtttggaggctcttcagcagccggaggcgcactcccttgggcacggggtgggtccgggggaggaggggattcccaccatggcggagcttcttacgttcccgagagaaccagctcactccagcgccagaggttgtccgatgattctcaaagctccctgctgtctaaacctgttagttctctgttccaaaattggcccaagcccccactgccacctttaccgaccgggacaggcgtcagcccgactgcggctgcagccccaggggcaacttcgccatcagcttcatcatcctcaacctcaaccagacatctacagggcgtggagtttgagatgagacccccattgttgcgacgtgccccttcgccttcattgttgccggcatctgagcataaggtgtctcctgcccctcgaccatccagcctgccaattttaccaagtgggcctctctaccctggtttgttcgatattagagggagcccgaccggcggagccggtggttcagctgaccccttcgccccagtattcgtgccccctcatcctggaatctcagggggactcggaggcgctcttagcggcgctagcagatccctctcacccactcgcttactcagtttgccgcctgataaaccttttggcgctaagcccctcggtttttggacaaagttcgacgtagccgactggctggagtggctcgggttagcagagcaccgggctcaattcttggaccacgagatcgacggctcccacctccctgccctgaccaaagaggactatgtggatctgggcgtgactcgagtgggccacaggatgaacatcgatagagccctaaaattctttcttgagagata

SEQ ID NO: 319784 - DNA, 6622 bp, Artificial Sequence
  derived and/or modified sequence
ggccgcgggcgccgccgaccgggactcagcagccccgccaggcagccgcctgtgatgctgccgtcccccgtcgccccgtggccccacaatgacccacagccccgcgacaagcgaggacgaggaacgccacagtgccagcgagtgtcccgaggggggctcagagtccgacagctccccagacgggccaggtcgaggcccccgggggacccggggccagggcagtggggcacctggtagcctggcctctgttagaggcctccagggccgctcaatgtccgtcccagacgacgcccacttcagcatgatggtcttcaggattggcatcccggacctgcaccagacaaaatgccttcgcttcaaccccgatgccaccatctggacggccaagcagcaggtgctctgtgccctgagcgagagcctgcaggatgtgctcaactatggcctgttccaaccggccacctccggccgcgatgccaacttcctggaggaggagaggctgctgcgggagtacccccagtcctttgagaagggggtcccctacctggagttccgatacaagacccgagtttacaaacagaccaacctggatgagaagcagctggccaagttgcacacgaagacggggttgaagaagttcctggagtatgtgcagctcgggacatctgacaaggtggcgcggctgctggacaaggggctggaccccaattaccatgactcggattcgggagagacccccttgacactggcggcccagaccgaaggctctgtagaggtgattcgaaccctgtgcctgggcggggcccacattgacttccgggcccgggatggcatgaccgcactgcataaggccgcatgcgcccgacactgcctggcactcacggcgctcctggaccttgggggttcccccaactacaaggaccgtcgggggctgacccctctgttccacacggccatggtgggtggtgacccccgatgctgcgagctgctcctgttcaacagggcccagctgggcatagctgatgagaacggctggcaggaaatccaccaggcctgccagcggggtcactctcagcacctggagcatctgcttttctacggggctgagcctggagcccagaacgcctcggggaacacggctctgcacatctgcgccctctacaacaaggagacctgtgccaggatcctcctgtatcgaggtgccgacaaggatgtgaagaacaacaacggacagacccccttccaggtggcagtgattgctgggaattttgagctgggggagctgatccgaaaccaccgagaacaggatgtggtgcccttccaggagtcccccaagtacgcggcccggcgacgggggcccccaggcacagggctgacggtgcccccggcgctgctgcgggccaacagtgacaccagcatggcgctgcccgactggatggtgttctccgccccgggggccgcgtcctctggggcccctggccctacctcagggtcccagggccagtcgcagccctcggcccccaccaccaagctcagcagcgggaccctccgaagtgccagcagcccccggggtgccagggcccgctctccatcccgagggaggcaccctgaggacgccaagaggcagccccgaggccggcccagctccagcgggacaccccgggaagggccagccgggggcacggggggctcagggggccccgggggctccctgggcagccgcgggaggcggaggaagctctactcagcggtacccggacgctccttcatggctgtgaagtcctaccaggcccaagccgagggggagatctccctgagcaagggcgagaagatcaaagtacttagcatcggggaaggaggcttctgggaaggccaggtcaaaggtcgtgttggctggttcccctctgactgcctggaagaagtggcgaatcgctctcaggagagcaagcaagaaagccgcagtgacaaggcaaagagactcttccggcattataccgtgggctcctacgacagctttgatgccccaagcttaatggatgggattggcccagggagcgattacatcattaaggagaagacagtcttgctgcagaagaaggacagtgaggggtttgggttcgtgctccggggggccaaggcgcagacccccatcgaggagttcacccccaccccggccttcccggcgctgcagtacctggagtcggtggacgagggtggcgtggcatggcgagctggactgcgaatgggagacttcctcatcgaggtgaacgggcagaatgtggtgaaggtcggccaccgacaggtggtgaacatgatccgccaagggggcaacacgctgatggtgaaggtggtgatggtcaccaggcacccggacatggatgaggcagtgcacaagaaagcaccccagcaggccaagcggctgccgcccccaaccatctccctgcgttccaaatctatgacctcagagctggaggagatggtctccccctggaagaagaagagtgagtacgagcagcagccggcgccggtgcccagcatggagaaaaagcggaccgtgtatcagatggctctcaacaaactggacgaaatcctggccgcagctcaacagaccatcagtgcaagcgaaagccctggtcccggtggcctcgcgtccctgggcaaacaccgacccaaaggtttctttgccactgagtcgagcttcgatccccaccaccgtgcccagccaagttacgagcgtccttctttcctgcctccaggacctgggttgatgctccggcaaaaatctatcggtgcggcagaagatgacagaccttacctagcacccccagccatgaaattcagccgcagcctgtctgtgcctggttcggaggacattcccccgccacccaccacgtccccaccggagcctccctacagcacacctccagtcccctcctcctcagggcgcctcaccccctcccctcggggagggcccttcaaccctggctctggtggccccctccccgcctcctcccctgcatcctttgacgggccctcccctcccgacactcgcgtggggagccgcgagaagagcctgtaccacagtgggcccctgcccccggcccaccaccacccgccccaccaccaccaccaccacgccccgccccctcagccccaccaccaccacgcccacccccctcatcctcccgagatggagacaggcggctctcccgacgaccctccaccccgcctggctctggggccccagcccagcctgcgaggctggaggggcggcgggcccagcccgaccccgggggccccgtccccatcgcaccacggcagcgcgggcgggggcggcggctcctcccagggcccggctctacgctatttccagctgcccccgcgggcggccagcgcagccatgtacgtgcccgcccgctcgggccgcggccgcaagggcccgctggtcaagcagaccaaggtggaaggcgagccccagaagggcggcggcctcccgcccgcgccgtcgcccacgtccccggcctccccgcagccgccgcccgccgtggccgcgccctcggagaagaactccatccccatccccaccatcatcatcaaggccccgtccaccagtagcagcggccgcagcagccagggcagcagcaccgaggcggagccccccacccagccggagcccacgggaggcggcggcggcggcggctcctcgcccagccccgccccggccatgtcacccgtgcccccgtccccctcgcccgtgcccacccccgcctcgcccagcggcccggccacgctggacttcacgagccagttcggggccgccctggtgggggcggcccggagggaggggggctggcagaatgaggcgcgccggcgctccacgctgttcctgtccaccgacgcgggggacgaggacggcggggacggcgggctgggcacaggggcggccccgggcccgcggctgcgccactccaaatccatcgacgagggcatgttctccgccgagccctacctccgactggagtctgcgggcagcggcgcgggctacggcggctacggggccggtagccgagcctacgggggtggcgggggcagcagcgccttcaccagcttcctgcccccgcgacccctggtgcacccgctgaccggcaaggccctggatcccgcctccccgctggggctggccctggccgcccgcgagcgagcgctgaaggagtcctcggagggcggcggggccccccagccgcctcccaggcccccatcgccccgctacgaggccccgccgcccaccccgcaccaccactcgccccacgcccaccacgagccagtgctgcgtctctggggggcctccccgccggaccctgcgcgccgggagctggggtacagggccgggctgggcagccaggagaagtcccttcccgccagcccgcccgccgcccggcgttccctgctacaccgcctgccgcccaccgctcccggggtggggcccctcctgctgcagctggggacggagcccccggccccgcaccccggagtaagcaagccctggaggtccgcagcccccgaagaacccgagcggctgccgctgcacgtgcggttccttgaaaactgccagccccgggcccctgtgacgagcggaaggggtcccccctcggaggacgggccgggggtcccgccgcccagcccacgccggtccgtgcccccctccccgacctccccgagggccagcgaagagaacgggctgcccctgctggtcctgccgcctcccgccccctcggtggatgtggaagatggcgaattccttttcgtggaaccgctgcctccgcctctggaattctccaacagcttcgaaaagccagagtcgcccctcacgcctgggcctccccacccgctgcccgacacacctgcccctgccaccccgttaccccctgtgccacccccggctgtggccgcagcccctcccaccctggactccaccgcatccagcctgacatcctatgacagcgaggtggccaccctgacccagggggcctccgccgctcctggggacccccatccaccaggcccgcctgccccagcagcaccggctcccgctgccccacagcctggcccggaccctccgcctggcacggattctggcatcgaggaggtggacagtcggagcagcagtgaccacccactggagaccatcagcagcgcctccacgctgagcagcctatctgccgaaggtggtggcagcgcagggggtgggggcggggctggggccggtgtggccagtgggccggagcttctggacacctatgtggcctacctggacggccaggcctttgggggcagcagtactcccggcccgccataccctcctcagctcatgactccctctaagctccggggccgggcgctaggagccagcggaggcctgcggcctggccccagcgggggactccgagaccctgttacccccaccagccccaccgtctcggtgacaggggctggaaccgatgggctgctggccctgcgtgcttgttcaggaccccccacggcaggcgtggcggggggtccggtggctgtagagccagaagtcccaccggtgcccttgccgacggcctcctctctgccccggaagctgctgccctgggaggagggcccgggcccaccgccaccacctctgcccgggcccttggcccagcctcaggcctcagccttggccacagtaaaagccagcatcatcagtgaactcagctccaagcttcagcagtttgggggctcctcggcagctggcggcgctctgccctgggcccgaggaggcagtgggggaggcggagacagccaccacgggggagccagctatgtccccgagaggacctcctccctgcagcggcagagactctccgacgactcccagtcctcactcctctccaagcctgtcagcagcctgtttcagaactggcccaaaccacctctgccgccactccccaccggaacaggggtctcccctacagccgctgcggccccaggggccacctcaccctcagcctcctcctcctccacgtccacccgccacctccagggcgtggagttcgagatgcggccccctctgctccgccgggcccccagcccctcgctgctgcccgcctcggagcacaaggtcagccctgcgcccaggccctcgtccctgcccatcctgccttccggacccctctacccaggcctctttgacatccgtggctccccaactggaggggcaggaggctcggctgaccccttcgccccagtctttgtgccgccacacccggggatatccggggggctcgggggagccttgtcaggggcctcgcgctccctctcaccgacccgcctgctctcgctgcccccggacaagccgtttggcgctaaacctctggggttctggaccaagttcgacgtggctgattggctggagtggctgggtttggcggagcaccgagcccagttcctggaccacgagatcgatggctcccacctgcccgccttgaccaaggaggactacgtcgatctaggtgtgaccagggtgggccaccgcatgaacatcgaccgggctctcaaattcttcctggagaggtgatggctggcctggacggaccagccc

SEQ ID NO: 319785 - protein, 2152 aa, Artificial Sequence
  derived and/or modified sequence
MTHSPATSEDEERHSASECPEGGSESDSSPDGPGRGPRGTRGQGSGAPGSLASVRGLQGRSMSVPDDAHFSMMVFRIGIPDLHQTKCLRFNPDATIWTAKQQVLCALSESLQDVLNYGLFQPATSGRDANFLEEERLLREYPQSFEKGVPYLEFRYKTRVYKQTNLDEKQLAKLHTKTGLKKFLEYVQLGTSDKVARLLDKGLDPNYHDSDSGETPLTLAAQTEGSVEVIRTLCLGGAHIDFRARDGMTALHKAACARHCLALTALLDLGGSPNYKDRRGLTPLFHTAMVGGDPRCCELLLFNRAQLGIADENGWQEIHQACQRGHSQHLEHLLFYGAEPGAQNASGNTALHICALYNKETCARILLYRGADKDVKNNNGQTPFQVAVIAGNFELGELIRNHREQDVVPFQESPKYAARRRGPPGTGLTVPPALLRANSDTSMALPDWMVFSAPGAASSGAPGPTSGSQGQSQPSAPTTKLSSGTLRSASSPRGARARSPSRGRHPEDAKRQPRGRPSSSGTPREGPAGGTGGSGGPGGSLGSRGRRRKLYSAVPGRSFMAVKSYQAQAEGEISLSKGEKIKVLSIGEGGFWEGQVKGRVGWFPSDCLEEVANRSQESKQESRSDKAKRLFRHYTVGSYDSFDAPSDYIIKEKTVLLQKKDSEGFGFVLRGAKAQTPIEEFTPTPAFPALQYLESVDEGGVAWRAGLRMGDFLIEVNGQNVVKVGHRQVVNMIRQGGNTLMVKVVMVTRHPDMDEAVHKKAPQQAKRLPPPTISLRSKSMTSELEEMEYEQQPAPVPSMEKKRTVYQMALNKLDEILAAAQQTISASESPGPGGLASLGKHRPKGFFATESSFDPHHRAQPSYERPSFLPPGPGLMLRQKSIGAAEDDRPYLAPPAMKFSRSLSVPGSEDIPPPPTTSPPEPPYSTPPVPSSSGRLTPSPRGGPFNPGSGGPLPASSPASFDGPSPPDTRVGSREKSLYHSGPLPPAHHHPPHHHHHHAPPPQPHHHHAHPPHPPEMETGGSPDDPPPRLALGPQPSLRGWRGGGPSPTPGAPSPSHHGSAGGGGGSSQGPALRYFQLPPRAASAAMYVPARSGRGRKGPLVKQTKVEGEPQKGGGLPPAPSPTSPASPQPPPAVAAPSEKNSIPIPTIIIKAPSTSSSGRSSQGSSTEAEPPTQPEPTGGGGGGGSSPSPAPAMSPVPPSPSPVPTPASPSGPATLDFTSQFGAALVGAARREGGWQNEARRRSTLFLSTDAGDEDGGDGGLGTGAAPGPRLRHSKSIDEGMFSAEPYLRLESAGSGAGYGGYGAGSRAYGGGGGSSAFTSFLPPRPLVHPLTGKALDPASPLGLALAARERALKESSEGGGAPQPPPRPPSPRYEAPPPTPHHHSPHAHHEPVLRLWGASPPDPARRELGYRAGLGSQEKSLPASPPAARRSLLHRLPPTAPGVGPLLLQLGTEPPAPHPGVSKPWRSAAPEEPERLPLHVRFLENCQPRAPVTSGRGPPSEDGPGVPPPSPRRSVPPSPTSPRASEENGLPLLVLPPPAPSVDVEDGEFLFVEPLPPPLEFSNSFEKPESPLTPGPPHPLPDTPAPATPLPPVPPPAVAAAPPTLDSTASSLTSYDSEVATLTQGASAAPGDPHPPGPPAPAAPAPAAPQPGPDPPPGTDSGIEEVDSRSSSDHPLETISSASTLSSLSAEGGGSAGGGGGAGAGVASGPELLDTYVAYLDGQAFGGSSTPGPPYPPQLMTPSKLRGRALGASGGLRPGPSGGLRDPVTPTSPTVSVTGAGTDGLLALRACSGPPTAGVAGGPVAVEPEVPPVPLPTASSLPRKLLPWEEGPGPPPPPLPGPLAQPQASALATVKASIISELSSKLQQFGGSSAAGGALPWARGGSGGGGDSHHGGASYVPERTSSLQRQRLSDDSQSSLLSKPVSSLFQNWPKPPLPPLPTGTGVSPTAAAAPGATSPSASSSSTSTRHLQGVEFEMRPPLLRRAPSPSLLPASEHKVSPAPRPSSLPILPSGPLYPGLFDIRGSPTGGAGGSADPFAPVFVPPHPGISGGLGGALSGASRSLSPTRLLSLPPDKPFGAKPLGFWTKFDVADWLEWLGLAEHRAQFLDHEIDGSHLPALTKEDYVDLGVTRVGHRMNIDRALKFFLER

SEQ ID NO: 319786 - DNA, 6459 bp, Artificial Sequence
  derived and/or modified sequence
atgacccacagccccgccaccagcgaggacgaggagagacacagcgccagcgagtgccccgagggcggcagcgagagcgacagcagccccgacggccccggcagaggccccagaggcaccagaggccagggcagcggcgcccccggcagcctggccagcgtgagaggcctgcagggcagaagcatgagcgtgcccgacgacgcccacttcagcatgatggtgttcagaatcggcatccccgacctgcaccagaccaagtgcctgagattcaaccccgacgccaccatctggaccgccaagcagcaggtgctgtgcgccctgagcgagagcctgcaggacgtgctgaactacggcctgttccagcccgccaccagcggcagagacgccaacttcctggaggaggagagactgctgagagagtacccccagagcttcgagaagggcgtgccctacctggagttcagatacaagaccagagtgtacaagcagaccaacctggacgagaagcagctggccaagctgcacaccaagaccggcctgaagaagttcctggagtacgtgcagctgggcaccagcgacaaggtggccagactgctggacaagggcctggaccccaactaccacgacagcgacagcggcgagacccccctgaccctggccgcccagaccgagggcagcgtggaggtgatcagaaccctgtgcctgggcggcgcccacatcgacttcagagccagagacggcatgaccgccctgcacaaggccgcctgcgccagacactgcctggccctgaccgccctgctggacctgggcggcagccccaactacaaggacagaagaggcctgacccccctgttccacaccgccatggtgggcggcgaccccagatgctgcgagctgctgctgttcaacagagcccagctgggcatcgccgacgagaacggctggcaggagatccaccaggcctgccagagaggccacagccagcacctggagcacctgctgttctacggcgccgagcccggcgcccagaacgccagcggcaacaccgccctgcacatctgcgccctgtacaacaaggagacctgcgccagaatcctgctgtacagaggcgccgacaaggacgtgaagaacaacaacggccagacccccttccaggtggccgtgatcgccggcaacttcgagctgggcgagctgatcagaaaccacagagagcaggacgtggtgcccttccaggagagccccaagtacgccgccagaagaagaggcccccccggcaccggcctgaccgtgccccccgccctgctgagagccaacagcgacaccagcatggccctgcccgactggatggtgttcagcgcccccggcgccgccagcagcggcgcccccggccccaccagcggcagccagggccagagccagcccagcgcccccaccaccaagctgagcagcggcaccctgagaagcgccagcagccccagaggcgccagagccagaagccccagcagaggcagacaccccgaggacgccaagagacagcccagaggcagacccagcagcagcggcacccccagagagggccccgccggcggcaccggcggcagcggcggccccggcggcagcctgggcagcagaggcagaagaagaaagctgtacagcgccgtgcccggcagaagcttcatggccgtgaagagctaccaggcccaggccgagggcgagatcagcctgagcaagggcgagaagatcaaggtgctgagcatcggcgagggcggcttctgggagggccaggtgaagggcagagtgggctggttccccagcgactgcctggaggaggtggccaacagaagccaggagagcaagcaggagagcagaagcgacaaggccaagagactgttcagacactacaccgtgggcagctacgacagcttcgacgcccccagcgactacatcatcaaggagaagaccgtgctgctgcagaagaaggacagcgagggcttcggcttcgtgctgagaggcgccaaggcccagacccccatcgaggagttcacccccacccccgccttccccgccctgcagtacctggagagcgtggacgagggcggcgtggcctggagagccggcctgagaatgggcgacttcctgatcgaggtgaacggccagaacgtggtgaaggtgggccacagacaggtggtgaacatgatcagacagggcggcaacaccctgatggtgaaggtggtgatggtgaccagacaccccgacatggacgaggccgtgcacaagaaggccccccagcaggccaagagactgcccccccccaccatcagcctgagaagcaagagcatgaccagcgagctggaggagatggagtacgagcagcagcccgcccccgtgcccagcatggagaagaagagaaccgtgtaccagatggccctgaacaagctggacgagatcctggccgccgcccagcagaccatcagcgccagcgagagccccggccccggcggcctggccagcctgggcaagcacagacccaagggcttcttcgccaccgagagcagcttcgacccccaccacagagcccagcccagctacgagagacccagcttcctgccccccggccccggcctgatgctgagacagaagagcatcggcgccgccgaggacgacagaccctacctggccccccccgccatgaagttcagcagaagcctgagcgtgcccggcagcgaggacatcccccccccccccaccaccagcccccccgagcccccctacagcaccccccccgtgcccagcagcagcggcagactgacccccagccccagaggcggccccttcaaccccggcagcggcggccccctgcccgccagcagccccgccagcttcgacggccccagcccccccgacaccagagtgggcagcagagagaagagcctgtaccacagcggccccctgccccccgcccaccaccaccccccccaccaccaccaccaccacgccccccccccccagccccaccaccaccacgcccaccccccccacccccccgagatggagaccggcggcagccccgacgaccccccccccagactggccctgggcccccagcccagcctgagaggctggagaggcggcggccccagccccacccccggcgcccccagccccagccaccacggcagcgccggcggcggcggcggcagcagccagggccccgccctgagatacttccagctgccccccagagccgccagcgccgccatgtacgtgcccgccagaagcggcagaggcagaaagggccccctggtgaagcagaccaaggtggagggcgagccccagaagggcggcggcctgccccccgcccccagccccaccagccccgccagcccccagcccccccccgccgtggccgcccccagcgagaagaacagcatccccatccccaccatcatcatcaaggcccccagcaccagcagcagcggcagaagcagccagggcagcagcaccgaggccgagccccccacccagcccgagcccaccggcggcggcggcggcggcggcagcagccccagccccgcccccgccatgagccccgtgccccccagccccagccccgtgcccacccccgccagccccagcggccccgccaccctggacttcaccagccagttcggcgccgccctggtgggcgccgccagaagagagggcggctggcagaacgaggccagaagaagaagcaccctgttcctgagcaccgacgccggcgacgaggacggcggcgacggcggcctgggcaccggcgccgcccccggccccagactgagacacagcaagagcatcgacgagggcatgttcagcgccgagccctacctgagactggagagcgccggcagcggcgccggctacggcggctacggcgccggcagcagagcctacggcggcggcggcggcagcagcgccttcaccagcttcctgccccccagacccctggtgcaccccctgaccggcaaggccctggaccccgccagccccctgggcctggccctggccgccagagagagagccctgaaggagagcagcgagggcggcggcgccccccagcccccccccagaccccccagccccagatacgaggcccccccccccaccccccaccaccacagcccccacgcccaccacgagcccgtgctgagactgtggggcgccagcccccccgaccccgccagaagagagctgggctacagagccggcctgggcagccaggagaagagcctgcccgccagcccccccgccgccagaagaagcctgctgcacagactgccccccaccgcccccggcgtgggccccctgctgctgcagctgggcaccgagccccccgccccccaccccggcgtgagcaagccctggagaagcgccgcccccgaggagcccgagagactgcccctgcacgtgagattcctggagaactgccagcccagagcccccgtgaccagcggcagaggcccccccagcgaggacggccccggcgtgcccccccccagccccagaagaagcgtgccccccagccccaccagccccagagccagcgaggagaacggcctgcccctgctggtgctgcccccccccgcccccagcgtggacgtggaggacggcgagttcctgttcgtggagcccctgcccccccccctggagttcagcaacagcttcgagaagcccgagagccccctgacccccggccccccccaccccctgcccgacacccccgcccccgccacccccctgccccccgtgcccccccccgccgtggccgccgccccccccaccctggacagcaccgccagcagcctgaccagctacgacagcgaggtggccaccctgacccagggcgccagcgccgcccccggcgacccccacccccccggcccccccgcccccgccgcccccgcccccgccgccccccagcccggccccgaccccccccccggcaccgacagcggcatcgaggaggtggacagcagaagcagcagcgaccaccccctggagaccatcagcagcgccagcaccctgagcagcctgagcgccgagggcggcggcagcgccggcggcggcggcggcgccggcgccggcgtggccagcggccccgagctgctggacacctacgtggcctacctggacggccaggccttcggcggcagcagcacccccggccccccctaccccccccagctgatgacccccagcaagctgagaggcagagccctgggcgccagcggcggcctgagacccggccccagcggcggcctgagagaccccgtgacccccaccagccccaccgtgagcgtgaccggcgccggcaccgacggcctgctggccctgagagcctgcagcggcccccccaccgccggcgtggccggcggccccgtggccgtggagcccgaggtgccccccgtgcccctgcccaccgccagcagcctgcccagaaagctgctgccctgggaggagggccccggccccccccccccccccctgcccggccccctggcccagccccaggccagcgccctggccaccgtgaaggccagcatcatcagcgagctgagcagcaagctgcagcagttcggcggcagcagcgccgccggcggcgccctgccctgggccagaggcggcagcggcggcggcggcgacagccaccacggcggcgccagctacgtgcccgagagaaccagcagcctgcagagacagagactgagcgacgacagccagagcagcctgctgagcaagcccgtgagcagcctgttccagaactggcccaagccccccctgccccccctgcccaccggcaccggcgtgagccccaccgccgccgccgcccccggcgccaccagccccagcgccagcagcagcagcaccagcaccagacacctgcagggcgtggagttcgagatgagaccccccctgctgagaagagcccccagccccagcctgctgcccgccagcgagcacaaggtgagccccgcccccagacccagcagcctgcccatcctgcccagcggccccctgtaccccggcctgttcgacatcagaggcagccccaccggcggcgccggcggcagcgccgaccccttcgcccccgtgttcgtgcccccccaccccggcatcagcggcggcctgggcggcgccctgagcggcgccagcagaagcctgagccccaccagactgctgagcctgccccccgacaagcccttcggcgccaagcccctgggcttctggaccaagttcgacgtggccgactggctggagtggctgggcctggccgagcacagagcccagttcctggaccacgagatcgacggcagccacctgcccgccctgaccaaggaggactacgtggacctgggcgtgaccagagtgggccacagaatgaacatcgacagagccctgaagttcttcctggagagatag

SEQ ID NO: 319787 - DNA, 4647 bp, Artificial Sequence
  derived and/or modified sequence
atgcagctgatggccctggagcagagattcggcagcggcctgcccggcggcggccagcccctgtgcctgatgatgagcagccccctgccccccccccccccccacttcagctgcctgcccgccagcgactacatcatcaaggagaagaccgtgctgctgcagaagaaggacagcgagggcttcggcttcgtgctgagaggcgccaaggcccagacccccatcgaggagttcacccccacccccgccttccccgccctgcagtacctggagagcgtggacgagggcggcgtggcctggagagccggcctgagaatgggcgacttcctgatcgaggtgaacggccagaacgtggtgaaggtgggccacagacaggtggtgaacatgatcagacagggcggcaacaccctgatggtgaaggtggtgatggtgaccagacaccccgacatggacgaggccgtgcacaagaaggccccccagcaggccaagagactgcccccccccaccatcagcctgagaagcaagagcatgaccagcgagctggaggagatggagtacgagcagcagcccgcccccgtgcccagcatggagaagaagagaaccgtgtaccagatggccctgaacaagctggacgagatcctggccgccgcccagcagaccatcagcgccagcgagagccccggccccggcggcctggccagcctgggcaagcacagacccaagggcttcttcgccaccgagagcagcttcgacccccaccacagagcccagcccagctacgagagacccagcttcctgccccccggccccggcctgatgctgagacagaagagcatcggcgccgccgaggacgacagaccctacctggccccccccgccatgaagttcagcagaagcctgagcgtgcccggcagcgaggacatcccccccccccccaccaccagcccccccgagcccccctacagcaccccccccgtgcccagcagcagcggcagactgacccccagccccagaggcggccccttcaaccccggcagcggcggccccctgcccgccagcagccccgccagcttcgacggccccagcccccccgacaccagagtgggcagcagagagaagagcctgtaccacagcggccccctgccccccgcccaccaccaccccccccaccaccaccaccaccacgccccccccccccagccccaccaccaccacgcccaccccccccacccccccgagatggagaccggcggcagccccgacgaccccccccccagactggccctgggcccccagcccagcctgagaggctggagaggcggcggccccagccccacccccggcgcccccagccccagccaccacggcagcgccggcggcggcggcggcagcagccagggccccgccctgagatacttccagctgccccccagagccgccagcgccgccatgtacgtgcccgccagaagcggcagaggcagaaagggccccctggtgaagcagaccaaggtggagggcgagccccagaagggcggcggcctgccccccgcccccagccccaccagccccgccagcccccagcccccccccgccgtggccgcccccagcgagaagaacagcatccccatccccaccatcatcatcaaggcccccagcaccagcagcagcggcagaagcagccagggcagcagcaccgaggccgagccccccacccagcccgagcccaccggcggcggcggcggcggcggcagcagccccagccccgcccccgccatgagccccgtgccccccagccccagccccgtgcccacccccgccagccccagcggccccgccaccctggacttcaccagccagttcggcgccgccctggtgggcgccgccagaagagagggcggctggcagaacgaggccagaagaagaagcaccctgttcctgagcaccgacgccggcgacgaggacggcggcgacggcggcctgggcaccggcgccgcccccggccccagactgagacacagcaagagcatcgacgagggcatgttcagcgccgagccctacctgagactggagagcgccggcagcggcgccggctacggcggctacggcgccggcagcagagcctacggcggcggcggcggcagcagcgccttcaccagcttcctgccccccagacccctggtgcaccccctgaccggcaaggccctggaccccgccagccccctgggcctggccctggccgccagagagagagccctgaaggagagcagcgagggcggcggcgccccccagcccccccccagaccccccagccccagatacgaggcccccccccccaccccccaccaccacagcccccacgcccaccacgagcccgtgctgagactgtggggcgccagcccccccgaccccgccagaagagagctgggctacagagccggcctgggcagccaggagaagagcctgcccgccagcccccccgccgccagaagaagcctgctgcacagactgccccccaccgcccccggcgtgggccccctgctgctgcagctgggcaccgagccccccgccccccaccccggcgtgagcaagccctggagaagcgccgcccccgaggagcccgagagactgcccctgcacgtgagattcctggagaactgccagcccagagcccccgtgaccagcggcagaggcccccccagcgaggacggccccggcgtgcccccccccagccccagaagaagcgtgccccccagccccaccagccccagagccagcgaggagaacggcctgcccctgctggtgctgcccccccccgcccccagcgtggacgtggaggacggcgagttcctgttcgtggagcccctgcccccccccctggagttcagcaacagcttcgagaagcccgagagccccctgacccccggccccccccaccccctgcccgacacccccgcccccgccacccccctgccccccgtgcccccccccgccgtggccgccgccccccccaccctggacagcaccgccagcagcctgaccagctacgacagcgaggtggccaccctgacccagggcgccagcgccgcccccggcgacccccacccccccggcccccccgcccccgccgcccccgcccccgccgccccccagcccggccccgaccccccccccggcaccgacagcggcatcgaggaggtggacagcagaagcagcagcgaccaccccctggagaccatcagcagcgccagcaccctgagcagcctgagcgccgagggcggcggcagcgccggcggcggcggcggcgccggcgccggcgtggccagcggccccgagctgctggacacctacgtggcctacctggacggccaggccttcggcggcagcagcacccccggccccccctaccccccccagctgatgacccccagcaagctgagaggcagagccctgggcgccagcggcggcctgagacccggccccagcggcggcctgagagaccccgtgacccccaccagccccaccgtgagcgtgaccggcgccggcaccgacggcctgctggccctgagagcctgcagcggcccccccaccgccggcgtggccggcggccccgtggccgtggagcccgaggtgccccccgtgcccctgcccaccgccagcagcctgcccagaaagctgctgccctgggaggagggccccggccccccccccccccccctgcccggccccctggcccagccccaggccagcgccctggccaccgtgaaggccagcatcatcagcgagctgagcagcaagctgcagcagttcggcggcagcagcgccgccggcggcgccctgccctgggccagaggcggcagcggcggcggcggcgacagccaccacggcggcgccagctacgtgcccgagagaaccagcagcctgcagagacagagactgagcgacgacagccagagcagcctgctgagcaagcccgtgagcagcctgttccagaactggcccaagccccccctgccccccctgcccaccggcaccggcgtgagccccaccgccgccgccgcccccggcgccaccagccccagcgccagcagcagcagcaccagcaccagacacctgcagggcgtggagttcgagatgagaccccccctgctgagaagagcccccagccccagcctgctgcccgccagcgagcacaaggtgagccccgcccccagacccagcagcctgcccatcctgcccagcggccccctgtaccccggcctgttcgacatcagaggcagccccaccggcggcgccggcggcagcgccgaccccttcgcccccgtgttcgtgcccccccaccccggcatcagcggcggcctgggcggcgccctgagcggcgccagcagaagcctgagccccaccagactgctgagcctgccccccgacaagcccttcggcgccaagcccctgggcttctggaccaagttcgacgtggccgactggctggagtggctgggcctggccgagcacagagcccagttcctggaccacgagatcgacggcagccacctgcccgccctgaccaaggaggactacgtggacctgggcgtgaccagagtgggccacagaatgaacatcgacagagccctgaagttcttcctggagagatag

SEQ ID NO: 319788 - DNA, 6459 bp, Artificial Sequence
  derived and/or modified sequence
atgactcacagcccagctacttcggaagatgaagagcgacactccgcttccgagtgtcctgaggggggcagcgaatcagattcgtcacccgatgggcccgggcggggacccaggggtactcgtgggcaggggtccggggccccgggctcacttgctagcgtccgcggtctccaggggcgctcaatgagtgtccccgatgacgcccacttctcgatgatggtgtttcggattggtattcctgacttgcatcagacgaagtgtctgcgatttaaccccgacgctactatctggactgcaaagcaacaagtgctgtgtgccctgtctgagtctctgcaggacgtgctcaattatggtctcttccagccggccacctctggtagagacgccaacttcctggaggaagaaagactattacgggagtacccacaaagtttcgagaagggcgtaccctacctcgagtttcgctacaagacgagggtttacaagcagacaaatctcgacgaaaaacaactggcgaagctgcacacaaaaactggattgaaaaagttcctcgagtacgtgcaattgggaacatcagataaggtggcccgcctcttggacaagggcctggacccaaattatcatgacagcgactccggagagactcctctgacgctggccgcccagacggaggggagcgtggaggtcattcggacgttgtgtctaggcggcgctcatattgacttcagagcacgcgatggcatgacagcactgcataaagccgcatgcgcgcggcattgtctggcactgactgcgctcctcgacctggggggaagccctaactacaaagaccgacgtggcctgacacccctgtttcatactgctatggtgggaggagatcctcgttgctgcgagctcttactgtttaatcgggcccaactgggcatcgccgatgaaaatgggtggcaggagatccaccaggcctgtcaacgggggcactcacaacacctggaacatttactgttttatggcgccgaaccaggggcacagaatgcttccggtaataccgcactgcatatttgtgctctgtataataaggagacctgcgccaggattcttttgtatcggggagctgataaggatgtgaaaaacaataacggccaaaccccattccaagtggctgtgatcgctggcaactttgaacttggggagcttatacgcaatcaccgagagcaggacgtcgtcccatttcaggaatccccaaagtacgcggcgcgtagacggggcccccccgggacaggcctcacggtccctccagctcttctgagggcaaattcagacactagcatggccctcccagactggatggtgttcagcgctcctggcgctgctagcagtggcgcccccggccctaccagcggatctcaggggcagtctcagccctcagcccccaccaccaagctgagttctgggacactgcgatctgcatcaagtcccaggggcgccagagcgaggagtccgagtcgagggagacatccagaggacgctaaacggcagcctcgagggcggcccagttcctcaggcactccccgggagggacccgctggcggcacgggcggatccggcggtcctggaggttctctgggatcgcgcggtcggcgccggaagctttatagcgcagtgcccgggagaagtttcatggctgtgaagtcctatcaggcgcaggccgagggcgaaatctctctgtccaaaggagaaaaaatcaaagttctgtcaatcggagagggcggattttgggaggggcaggtgaaaggaagagttgggtggtttccaagcgattgcctcgaggaggtggctaataggtcccaggaatctaaacaggagtcccgttccgataaggcaaaacgactttttaggcattacacagttggttcttacgacagtttcgatgctcctagtgattatatcataaaagagaaaacggtcctgctgcagaaaaaagatagtgagggtttcgggttcgtgctgcggggcgcaaaggcccagacccccatagaggaatttactccaacccctgctttccctgctttacagtatctcgagtctgtggatgaaggaggcgtcgcttggcgagctggcctgagaatgggagactttttaatcgaggtcaatgggcagaacgtcgtcaaggtcggccacaggcaggtggtgaacatgattagacaggggggcaatactttgatggttaaagtggtcatggtgacgcggcatcctgacatggatgaagcggttcacaaaaaggcaccacaacaggcaaagaggcttccccctccaactatcagccttcgatcaaagtcgatgacgtccgaactggaggaaatggagtacgaacagcagcctgcaccagtgccaagcatggaaaagaagagaacagtctaccagatggctctgaataaattggacgagattctggctgccgcacagcagacaattagcgcctcggaatcccccgggcccggggggttagcatcgctgggcaagcaccgcccaaagggtttttttgcaacagaaagttcattcgatcctcaccatagggcacagccatcctacgagaggccgtcttttttacctcctgggccagggttgatgctccgccagaaatctattggcgcggccgaagatgaccggccatatctggctcctcctgccatgaaattttccagatccttgtctgtgcctgggtcagaggacatcccgcctccacctactacaagcccaccggaacccccatattccaccccacccgtgccttcgtcttctgggagactgaccccttccccaagaggcggtccatttaaccccggcagtggaggccctctcccagcatcaagtcccgcaagctttgatggtccaagcccaccagataccagggtaggaagcagagagaagtctctgtaccatagcggccccttgcccccagcccaccatcatccaccgcaccatcatcaccaccacgcccctcccccgcagccacaccatcatcatgcgcatccaccccacccacctgaaatggaaactgggggatcccccgatgatcctccccccaggcttgccctgggcccacagccctcattgaggggatggcgaggcggaggacccagtcctacaccaggagcgccatcaccatcgcatcatgggtctgccggcggcggaggcgggtcttctcagggcccagcactcaggtacttccagttgcctcctagggctgcgtccgctgcaatgtacgtccctgccagatcgggccgagggagaaaaggtcctctcgttaagcagacaaaggtggagggcgagccacagaagggcggggggctgccccccgccccgagtccaacttcccctgcaagccctcagccccctcccgcagttgcggcgccaagtgaaaaaaactcaatccccatccctacaatcatcattaaggcaccttcgactagttcctctggaaggtcgagccagggctctagcacagaggcagagccaccaacccagccggagcctacggggggtggcggcggaggggggagctcaccctcccccgcgcctgctatgtcacctgttcctcctagcccatcacctgtaccgactcccgcctctccaagtgggccagctacactcgattttacctcgcagtttggtgcagccctagtgggcgccgctcgtagagaggggggctggcaaaacgaggctagaaggcggtccacccttttcctgtcaaccgacgcaggggacgaggatggcggcgatggcgggcttggcactggcgccgcgcccggacctcggttacgacattcaaaatcaatcgatgaggggatgttcagcgccgagccatacctgaggctcgagtcagccgggtccggtgccggttacggaggctacggggcagggtcaagggcttatggagggggaggtggtagcagtgcttttacctctttcctcccaccccgtcctcttgtgcacccgctcaccgggaaggctcttgaccccgccagccccctgggcttagccttagccgcgcgtgagcgcgcactaaaagaaagctccgaaggaggcggtgctcctcaaccccccccaagacccccatcaccccgttatgaggctccacctccaaccccacatcatcactctccacacgctcatcacgagcccgtcctgcgcctgtggggcgcctctccacctgatccagccagacgagaattgggatacagagccggcctgggctcccaggagaaaagtctgcctgcctcaccccccgccgcaagaaggagtctattacatcggctcccgcctaccgcccctggagtcggccctctccttttgcagctcgggactgaacctccagcgcctcaccccggcgtgagcaagccttggcggagcgccgccccggaggaacctgagaggctgcctctgcatgttcggtttctcgagaattgtcaacctcgcgcacccgtcaccagcggacggggacccccctccgaggatggacccggcgtcccccctccttctccgcggagatcagtccccccctctccgacctcaccacgtgcatcagaagagaacggattaccattgctggtgctacccccacccgcgccttccgtcgacgtagaggacggagagttcctcttcgtggaacccctccctccccctctcgagttttccaactcgtttgaaaagcctgagagtcctctcacaccaggacccccacacccactgccggatacccccgcccctgctacacctcttccgccggtgcctccaccggccgtcgcagcggctcctcctacattggactctactgcaagctccctgacctcatacgacagtgaggtggcaacactgactcagggagcttctgcagctcctggagacccgcacccccccggccctcccgcaccagccgcacccgctccagctgcgccccagcccggtccggaccctccacccgggaccgacagtgggatagaagaggtggatagcaggagctcgtcagaccacccccttgaaaccatttccagcgcaagcacattgtctagtttgagcgccgagggtggaggctccgccgggggcggcgggggcgctggagccggcgttgccagcgggcccgagttattggatacctatgtagcatacctggacggacaagcgtttggcggctcatccactcccgggccaccgtacccgcctcagctcatgacaccttccaagctgcggggcagggccctgggagcttctggcgggctgcggcccggaccgagcgggggcctccgcgacccagttacccctacctcccccaccgtttcagtgactggtgcaggtaccgatgggttgctggctttacgggcatgttctggccctccgaccgccggtgtggccggcggtcccgtggctgttgagccagaagttccaccggttcccctgccgaccgccagctccctccccagaaaattgttgccatgggaggaaggacctggaccccctcctcctcccctgcctgggcctttagcccagcctcaggcctccgcgctcgctactgtgaaggcgtctattatttcggaactttccagcaagctgcagcagtttggcggatcctccgctgccggtggcgccctcccgtgggcacgtggcggcagtggaggcggcggagactcgcatcacggcggcgcatcgtatgtccctgagcgcacttcatctttgcagcggcaaaggctgtccgatgattctcagagttcattgttatctaaacccgtgagtagtctattccaaaattggcccaaacctccactgcctcctctgcccactggaacgggtgtgtctcccactgcagccgcagctcctggagccacttctccttcagcctcctcaagctcaacaagtacgcgacacctgcagggggtggaattcgaaatgagacctcctctactacggcgtgccccctccccttccttgctacctgcctccgaacacaaagtctcgcccgctccgcgaccctcttctctacctattctgccttcgggacccctctacccaggtttattcgacatcagaggaagcccaacaggaggagcaggcggctcagcggatccttttgcgccagtgttcgtaccccctcacccagggatttccggggggcttgggggagccttatctggagcaagtcgatccctcagcccaaccaggctgctgtctttaccacctgataaaccttttggtgcaaaaccccttggattttggaccaaatttgatgtcgctgactggctggagtggctgggactggccgaacacagggctcagtttcttgaccacgaaattgatgggtctcacctgccagccctcaccaaagaagattatgtggacctgggcgtcacgagggtgggccatcgtatgaacattgaccgggctctgaagtttttcctggaacgatag

SEQ ID NO: 319789 - DNA, 4647 bp, Artificial Sequence
  derived and/or modified sequence
atgcagctgatggcactcgagcagagatttggaagtggcctacctggaggggggcagcccctgtgtcttatgatgtcctccccactgcctcccccaccacctcacttttcctgccttccggcatctgattatatcatcaaggaaaagaccgtcttgctgcagaaaaaagacagcgaaggctttgggtttgtgttgcggggggccaaggcacagacacccatcgaggagtttacccctacccctgcattcccagcattgcaatatcttgaatcagtggacgagggcggagttgcctggagggctgggttgcggatgggcgactttctcatcgaggtgaatggtcagaatgtggtgaaggtggggcaccggcaagtggtgaatatgattaggcaaggaggaaatacccttatggtgaaagtggtgatggtgacacggcatcccgatatggatgaagccgtgcataaaaaggctccccagcaggctaaacggcttccgccgcccaccatttcactccgcagtaagtcaatgacatcagaactggaagagatggaatatgaacagcagcccgctcccgtcccctccatggagaagaagcgtactgtgtatcaaatggcattaaacaagctcgatgagatcctggcggctgcccagcagaccatctctgcaagcgagagcccaggcccaggcgggctagccagtctcggtaaacaccgccctaagggattcttcgctaccgaatcctcttttgatccccaccatcgggcgcaaccatcctatgagcggccatcattcctgcctccgggcccagggttgatgcttcgtcagaaaagtataggcgccgcagaagacgatcgcccatacctggccccacctgcgatgaagttttccagatctttgtcggtgccagggtctgaagacatcccgccaccaccaacgacgagccccccggagcctccctattccacgccacccgtgcccagttctagcggtaggctgacccccagcccacgcggcggcccatttaatcccggttccggcggccccctgcccgccagcagcccagcctccttcgacgggccttcacctcccgacacacgagttgggtcccgcgaaaagtctctttaccattccggacccttaccccccgcccaccaccaccccccccaccaccaccatcaccacgcaccccctccccagccacatcatcaccatgctcaccccccacatccgcctgagatggaaactggaggttcccctgacgacccccctcctagattggccctgggcccgcagcccagcctccggggatggcggggcggtgggccgagccctacacctggcgcccccagcccaagccatcatggatcagcgggcggtggggggggaagctcgcagggcccagccctgcggtacttccagctgcctccccgagcggcttccgcagcaatgtatgtaccggcacggagcggccgcggcaggaaagggcctctagtcaagcaaactaaggtagagggggagccacagaaaggaggaggcctgccccccgcaccctcaccaacgtccccggccagccctcaacctccccccgcagtcgcagctccatccgagaagaactccatccctatccctactattatcataaaagcaccttctacaagctccagcggcaggtcctcccaaggaagctccacggaagctgaacctcccactcaacccgagcctacaggcggaggcgggggcggaggttcatccccaagccctgccccagccatgtcacctgtgccacccagtccttcccctgtccctacaccagctagtccttccggtcccgcaacactggactttacttcacagtttggtgccgctctggtgggtgctgcgagaagggaaggcggctggcagaacgaagcgcgccgccgtagcacgctgtttctgagtacagacgcaggcgacgaggatgggggggatggtggactgggcaccggagccgccccaggtcctagattgagacacagcaaaagtatcgatgaggggatgttcagcgccgagccttacctgagactagagtcagctggctccggagccggttatgggggctacggcgccggaagtcgagcctatggcggcggaggcggatcctctgcctttacttctttcctgccaccaagacctctggtgcaccccttaacaggaaaagcccttgacccagcgtcacctcttggactagccctggccgctcgtgaaagagctctcaaggagtcttccgagggcggcggcgccccacagccgccccccagaccaccatccccacggtacgaggcgccacctcccactccacatcatcacagtccccacgcacaccacgagccagttctcaggctctggggtgcctcacctcctgaccctgccagacgcgaattgggttaccgggcggggctgggatcacaggaaaagtcacttccggcatcccccccagctgccagacggtccctgctgcaccggctcccccctaccgctcctggagtgggaccgctgcttcttcagctcggaaccgagccgccggctccgcaccctggagtcagtaagccttggaggtccgctgcccctgaggagcccgagagattaccgctgcacgtcagattcctggagaactgccagccccgagcacctgtgactagcggaagaggccccccctcagaggatggaccaggagtgcctccgccatcccccaggaggtctgtgccaccctccccgaccagtcctagagcctctgaggagaacggtcttcccctcttagtccttccccctcctgccccatccgtagatgtggaggatggggagtttctgtttgtcgaacccctccccccacccctggagttctcgaatagcttcgaaaagcctgagtcccctctgactcctgggcccccccacccactcccagatacgcctgcacccgccaccccactccctcctgtccctcccccagccgtggctgcagcacccccgacccttgattccactgcctctagcctgacatcatacgattccgaggtggcaactctcacacagggagcaagtgcagcacctggagatccacaccctccgggacctccggcgcccgcagctccagctcccgcggcgccccagccagggccggaccctccaccaggaaccgactccggcatcgaagaggtggactcaagaagctcttccgaccatccattggagaccataagttcggctagcaccctcagttccctgtctgccgaaggaggaggaagcgccgggggaggtggaggggcgggggccggggtggccagcgggcccgagctgctcgacacctacgtggcatatctcgacgggcaggcctttggggggtcaagtaccccgggtccaccgtatcctcctcagctgatgaccccttctaagctacgcggacgtgcgctgggcgcctcaggggggttacggcccggtcctagtggcggccttcgagaccctgtgactcctacttcccctaccgtgtcggtcacaggagctggcaccgacggactgttggccctgcgagcttgctccgggcctcccaccgcaggtgtcgccgggggcccagtcgctgtagagcccgaagtcccgcctgtgcctctacctaccgcatccagcctaccccgcaagctcttaccttgggaggaaggacccggaccccccccccctccattgcctggacccctggcccagccacaagcctctgcgctcgctacagtcaaggcatcaataatcagcgagctgtcatcaaaactgcaacagtttggcggtagcagcgctgccggaggcgcgcttccttgggcccgcggtgggtccggaggcggcggagattctcatcacgggggggcttcctacgtgcccgagcggacgagctcactgcagagacaaaggctcagtgacgatagccagagtagcctgctgtccaaacctgtctcatcactctttcagaactggcccaaaccacctttaccacctctgccgaccggaacgggagtgtcccccaccgcggccgctgcaccaggggccacttctcctagcgcatcaagtagtagcactagcacacggcacctgcagggagtagaatttgaaatgagaccaccgttgttgagacgagcacccagcccgagtttgttgccagcgtcagaacacaaagttagccccgcgccgcggccgtcttccttgccaattttaccgagcgggccgctgtatccagggctttttgacatcagaggcagcccaacaggaggagcaggcggatcagccgaccccttcgcgccggtttttgtgcccccacacccagggattagcggcggcctcggaggcgcgctctctggggcaagcaggagcctttctcctactagactgctgagtctgcctcccgacaagccttttggcgctaaaccactcggcttttggacgaaattcgatgtcgccgattggctggaatggttgggcctggccgaacacagggcccaatttctcgaccacgaaattgatggaagccacttacccgcgctcaccaaagaggattatgtggatctgggcgtgactcgcgtgggtcaccgaatgaacatcgaccgggccctgaagttcttcctcgagcgttag

SEQ ID NO: 319790 - DNA, 6459 bp, Artificial Sequence
  derived and/or modified sequence
atgacccacagccctgccaccagtgaagatgaggagcggcacagcgccagcgagtgcccagagggcggcagcgagagtgacagcagcccagatggccctggccggggcccccggggcacccggggccagggcagcggggcccctggcagcctggcctctgtgcggggcctgcagggccgctccatgtctgtgcctgatgatgcccacttctccatgatggtgttcagaattggcatcccagacctgcaccagaccaagtgcctgcgcttcaacccagatgccaccatctggacagccaagcagcaggtgctgtgtgccctgtctgagagcctgcaggatgtgctgaactacggcctcttccagcctgccaccagcggcagagatgccaacttcctggaggaggagcggctgctgcgggagtacccccagagctttgagaagggcgtgccctacctggagttccgctacaagaccagggtgtacaagcagaccaacctggatgagaagcagctggccaagctgcacaccaagacaggcctgaagaagttcctggagtatgtgcagctgggcaccagtgacaaggtggcccggctgctggacaagggcctggaccccaactaccatgacagcgacagcggggagacccccctgaccctggccgcccagacagagggctctgtggaggtgatccgcaccctgtgcctgggcggggcccacatcgacttccgggccagagatggcatgacagccctgcacaaggccgcctgtgcccggcactgcctggccctgacagccctgctggacctgggcggcagccccaactacaaggaccggcggggcctgacccccctcttccacacagccatggtgggcggggacccccgctgctgtgagctgctgctcttcaacagagcccagctgggcattgctgatgaaaatggctggcaggagatccaccaggcctgccagaggggccacagccagcacctggagcacctgctcttctacggggctgagcccggggcccagaatgccagcggcaacacagccctgcacatctgtgccctgtacaacaaggagacctgtgcccgcatcctgctgtacagaggagctgacaaggatgtgaagaacaacaacggccagacccccttccaggtggccgtgattgctggcaactttgagctgggggagctgatccggaaccaccgggagcaggatgtggtgcccttccaggagagccccaagtatgctgcccggcggcggggccccccaggcaccggcctgactgtgcccccagccctgctgcgggccaacagcgacacctccatggccctgcctgactggatggtgttcagcgcccctggggccgccagcagcggggcccctggccccaccagcggcagccagggccagagccagcccagcgcccccaccaccaagctgagcagcggcaccctgcggagcgccagcagccccaggggggcccgggcccggagccccagccggggccgccacccagaagatgccaagaggcagccccggggccggcccagcagcagcggcaccccccgggagggccctgctgggggcactggaggcagcggcggccctgggggcagcctgggcagccggggcagaagaaggaagctgtacagcgctgtgcccggccgctccttcatggctgtgaagagctaccaggcccaggccgagggggagatcagcctgagcaaaggagagaagatcaaggtgctgagcatcggggagggcggcttctgggagggccaggtgaagggccgggtgggctggttccccagcgactgcctggaggaggtggccaacagaagccaggagagcaagcaggagagcagaagtgacaaggccaagaggctcttccgccactacacagtgggcagctatgacagctttgatgcccccagcgactacatcatcaaggagaagacagtgctgctgcagaagaaggacagcgagggctttggatttgtgctgcggggggccaaggcccagacccccatcgaggagttcacccccaccccagccttccctgccctgcagtacctggagagcgtggatgaaggaggagtggcctggagggctggcctgaggatgggagacttcctgattgaggtgaatggccagaatgtggtgaaggtgggccaccggcaggtggtgaacatgatccggcagggcggcaacaccctgatggtgaaggtggtgatggtgaccaggcacccagacatggatgaggccgtgcacaagaaggccccccagcaggccaagaggctgcccccacccaccatcagcctgcggagcaagtccatgaccagcgagctggaggagatggagtatgagcagcagcctgcccctgtgcccagcatggagaagaagaggacagtgtaccagatggccctgaacaagctggatgagatcctggccgccgcccagcagaccatcagcgccagcgagagccctggccctgggggcctggccagcctgggcaagcaccggcccaagggcttctttgccacagagagcagctttgacccccaccaccgggcccagcccagctatgagcggcccagcttcctgcccccaggccctggcctgatgctgcggcagaagagcatcggggctgctgaagatgaccggccctacctggcccccccagccatgaagttcagccgcagcctgtctgtgcccggcagcgaggacatccccccaccacccaccaccagccccccagagcccccctacagcaccccacctgtgcccagcagcagcggccgcctgacccccagcccccggggcggccccttcaaccctggcagcggcggccccctgcctgccagcagccctgccagctttgatggccccagccccccagacaccagggtgggcagccgggagaagagcctgtaccacagcggccccctgcccccagcccaccaccaccccccccaccaccaccaccaccacgcccccccaccccagccccaccaccaccacgcccaccccccccaccccccagagatggagactggaggcagcccagatgaccccccaccccggctggccctgggcccccagcccagcctgcggggctggaggggcggcggccccagccccacccctggggcccccagccccagccaccacggcagcgctgggggcggcggcggcagcagccagggccctgccctgcgctacttccagctgcccccccgggccgccagcgctgccatgtatgtgcctgcccggagcggccggggcaggaagggccccctggtgaagcagaccaaggtggagggggagccccagaagggcggcggcctgcccccagcccccagccccaccagccctgccagcccccagcccccacctgctgtggccgcccccagcgagaagaacagcatccccatccccaccatcatcatcaaggcccccagcaccagcagcagcggccgcagcagccagggcagcagcacagaggccgagccccccacccagcctgagcccactggaggcggcggcggcggcggcagcagccccagccctgccccagccatgagccctgtgccccccagccccagccctgtgcccaccccagccagccccagcggccctgccaccctggacttcaccagccagtttggagctgccctggtgggcgccgcccggcgggagggcggctggcagaatgaggccaggagaagaagcaccctcttcctgagcacagatgctggagatgaagatggaggagatggcggcctgggcactggagctgcccctggcccccggctgcggcacagcaagagcattgatgagggcatgttttctgctgagccctacctgcggctggagagcgctggcagcggggccggctatggaggctacggggccggcagccgggcctatggaggcggcggcggcagcagcgccttcaccagcttcctgcccccccggcccctggtgcaccccctgaccgggaaggccctggaccctgccagccccctgggcctggccctggccgcccgggagcgggccctgaaggagagcagcgagggcggcggggccccccagcccccacccaggcctcccagccccaggtatgaggcccccccacccaccccccaccaccacagcccccacgcccaccacgagcctgtgctgcggctgtggggcgccagccccccagaccctgcccggcgggagctgggctacagagctggcctgggcagccaggagaagagcctgcctgccagccccccagctgcccggcgcagcctgctgcaccggctgcccccaacagcccctggggtgggccccctgctgctgcagctgggcacagagcccccagccccccaccctggggtgtccaagccctggaggtctgctgcccctgaggagcctgagcggctgcccctgcacgtgcgcttcctggagaactgccagccccgggcccctgtgaccagcggccggggccccccatctgaagatggccctggggtgcccccacccagccccaggagatctgtgccccccagccccaccagcccccgggccagcgaggagaatggcctgcccctgctggtgctgcccccaccagcccccagcgtggatgtggaggatggagagttcctgtttgtggagcccctgcccccacccctggagttcagcaacagctttgagaagccagagagccccctgaccccaggccccccccaccccctgcctgacaccccagccccagccacccccctgccccctgtgcccccacctgctgtggccgccgccccacccaccctggacagcacagccagcagcctgaccagctatgacagcgaggtggccaccctgacccagggcgccagcgctgcccctggggacccccaccccccaggccccccagccccagctgccccagccccagctgccccccagcccggccctgaccccccacctggaacagacagcggcatcgaggaggtggacagccgcagcagcagtgaccaccccctggagaccatcagcagcgccagcaccctgagcagcctgtctgctgagggcggcggcagcgctgggggcggcggcggggccggggccggcgtggccagcggccctgagctgctggacacctacgtggcctacctggatggccaggccttcggcggcagcagcaccccaggccccccctacccaccccagctgatgacccccagcaagctgcggggccgggccctgggcgccagcggcggcctgcggcccggccccagcggcggcctgcgggaccctgtgacccccaccagccccaccgtgtctgtgactggagctggaacagatggcctgctggccctgcgggcctgcagcggccccccaacagctggggtggccggcggccctgtggccgtggagcctgaggtgccccctgtgcccctgcccacagccagcagcctgcccaggaagctgctgccctgggaggagggccctggccccccacctccacccctgcccggccccctggcccagccccaggccagcgccctggccaccgtgaaggccagcatcatcagcgagctgagcagcaagctgcagcagtttggaggcagcagcgctgctgggggcgccctgccctgggcccggggcggcagcggcggcggcggggacagccaccacggcggggccagctatgtgcctgagaggaccagcagcctgcagaggcagaggctgagtgatgacagccagagcagcctgctgagcaagcctgtgagcagcctcttccagaactggcccaagccacccctgccccccctgcccactggaactggagtgagccccacagctgctgctgcccctggggccaccagccccagcgccagcagcagcagcaccagcaccaggcacctgcagggcgtggagtttgagatgaggcctcccctgctgcggcgggcccccagccccagcctgctgcctgccagcgagcacaaggtgtccccagccccccggcccagcagcctgcccatcctgcccagcggccccctgtacccaggcctgtttgacatccggggcagccccactggaggagctgggggcagcgctgacccctttgcccctgtgtttgtgcccccccaccctggcatcagcggcggcctgggcggggccctgagcggggccagccgcagcctgagccccacccggctgctgagcctgcccccagacaagccctttggagccaagcccctgggcttctggaccaagtttgatgtggccgactggctggagtggctgggcctggccgagcaccgggcccagttcctggaccatgaaattgatggcagccacctgcctgccctgaccaaggaggactatgtggacctgggcgtgaccagggtgggccacaggatgaacatcgaccgggccctgaagttcttcctggagaggtag

SEQ ID NO: 319791 - DNA, 4647 bp, Artificial Sequence
  derived and/or modified sequence
atgcagctgatggccctggagcagcgcttcggcagcggcctgcccggcggcggccagcccctgtgcctgatgatgagcagccccctgcccccacctccaccccacttcagctgcctgcctgccagtgactacatcatcaaggagaagacagtgctgctgcagaagaaggacagcgagggctttggatttgtgctgcggggggccaaggcccagacccccatcgaggagttcacccccaccccagccttccctgccctgcagtacctggagagcgtggatgaaggaggagtggcctggagggctggcctgaggatgggagacttcctgattgaggtgaatggccagaatgtggtgaaggtgggccaccggcaggtggtgaacatgatccggcagggcggcaacaccctgatggtgaaggtggtgatggtgaccaggcacccagacatggatgaggccgtgcacaagaaggccccccagcaggccaagaggctgcccccacccaccatcagcctgcggagcaagtccatgaccagcgagctggaggagatggagtatgagcagcagcctgcccctgtgcccagcatggagaagaagaggacagtgtaccagatggccctgaacaagctggatgagatcctggccgccgcccagcagaccatcagcgccagcgagagccctggccctgggggcctggccagcctgggcaagcaccggcccaagggcttctttgccacagagagcagctttgacccccaccaccgggcccagcccagctatgagcggcccagcttcctgcccccaggccctggcctgatgctgcggcagaagagcatcggggctgctgaagatgaccggccctacctggcccccccagccatgaagttcagccgcagcctgtctgtgcccggcagcgaggacatccccccaccacccaccaccagccccccagagcccccctacagcaccccacctgtgcccagcagcagcggccgcctgacccccagcccccggggcggccccttcaaccctggcagcggcggccccctgcctgccagcagccctgccagctttgatggccccagccccccagacaccagggtgggcagccgggagaagagcctgtaccacagcggccccctgcccccagcccaccaccaccccccccaccaccaccaccaccacgcccccccaccccagccccaccaccaccacgcccaccccccccaccccccagagatggagactggaggcagcccagatgaccccccaccccggctggccctgggcccccagcccagcctgcggggctggaggggcggcggccccagccccacccctggggcccccagccccagccaccacggcagcgctgggggcggcggcggcagcagccagggccctgccctgcgctacttccagctgcccccccgggccgccagcgctgccatgtatgtgcctgcccggagcggccggggcaggaagggccccctggtgaagcagaccaaggtggagggggagccccagaagggcggcggcctgcccccagcccccagccccaccagccctgccagcccccagcccccacctgctgtggccgcccccagcgagaagaacagcatccccatccccaccatcatcatcaaggcccccagcaccagcagcagcggccgcagcagccagggcagcagcacagaggccgagccccccacccagcctgagcccactggaggcggcggcggcggcggcagcagccccagccctgccccagccatgagccctgtgccccccagccccagccctgtgcccaccccagccagccccagcggccctgccaccctggacttcaccagccagtttggagctgccctggtgggcgccgcccggcgggagggcggctggcagaatgaggccaggagaagaagcaccctcttcctgagcacagatgctggagatgaagatggaggagatggcggcctgggcactggagctgcccctggcccccggctgcggcacagcaagagcattgatgagggcatgttttctgctgagccctacctgcggctggagagcgctggcagcggggccggctatggaggctacggggccggcagccgggcctatggaggcggcggcggcagcagcgccttcaccagcttcctgcccccccggcccctggtgcaccccctgaccgggaaggccctggaccctgccagccccctgggcctggccctggccgcccgggagcgggccctgaaggagagcagcgagggcggcggggccccccagcccccacccaggcctcccagccccaggtatgaggcccccccacccaccccccaccaccacagcccccacgcccaccacgagcctgtgctgcggctgtggggcgccagccccccagaccctgcccggcgggagctgggctacagagctggcctgggcagccaggagaagagcctgcctgccagccccccagctgcccggcgcagcctgctgcaccggctgcccccaacagcccctggggtgggccccctgctgctgcagctgggcacagagcccccagccccccaccctggggtgtccaagccctggaggtctgctgcccctgaggagcctgagcggctgcccctgcacgtgcgcttcctggagaactgccagccccgggcccctgtgaccagcggccggggccccccatctgaagatggccctggggtgcccccacccagccccaggagatctgtgccccccagccccaccagcccccgggccagcgaggagaatggcctgcccctgctggtgctgcccccaccagcccccagcgtggatgtggaggatggagagttcctgtttgtggagcccctgcccccacccctggagttcagcaacagctttgagaagccagagagccccctgaccccaggccccccccaccccctgcctgacaccccagccccagccacccccctgccccctgtgcccccacctgctgtggccgccgccccacccaccctggacagcacagccagcagcctgaccagctatgacagcgaggtggccaccctgacccagggcgccagcgctgcccctggggacccccaccccccaggccccccagccccagctgccccagccccagctgccccccagcccggccctgaccccccacctggaacagacagcggcatcgaggaggtggacagccgcagcagcagtgaccaccccctggagaccatcagcagcgccagcaccctgagcagcctgtctgctgagggcggcggcagcgctgggggcggcggcggggccggggccggcgtggccagcggccctgagctgctggacacctacgtggcctacctggatggccaggccttcggcggcagcagcaccccaggccccccctacccaccccagctgatgacccccagcaagctgcggggccgggccctgggcgccagcggcggcctgcggcccggccccagcggcggcctgcgggaccctgtgacccccaccagccccaccgtgtctgtgactggagctggaacagatggcctgctggccctgcgggcctgcagcggccccccaacagctggggtggccggcggccctgtggccgtggagcctgaggtgccccctgtgcccctgcccacagccagcagcctgcccaggaagctgctgccctgggaggagggccctggccccccacctccacccctgcccggccccctggcccagccccaggccagcgccctggccaccgtgaaggccagcatcatcagcgagctgagcagcaagctgcagcagtttggaggcagcagcgctgctgggggcgccctgccctgggcccggggcggcagcggcggcggcggggacagccaccacggcggggccagctatgtgcctgagaggaccagcagcctgcagaggcagaggctgagtgatgacagccagagcagcctgctgagcaagcctgtgagcagcctcttccagaactggcccaagccacccctgccccccctgcccactggaactggagtgagccccacagctgctgctgcccctggggccaccagccccagcgccagcagcagcagcaccagcaccaggcacctgcagggcgtggagtttgagatgaggcctcccctgctgcggcgggcccccagccccagcctgctgcctgccagcgagcacaaggtgtccccagccccccggcccagcagcctgcccatcctgcccagcggccccctgtacccaggcctgtttgacatccggggcagccccactggaggagctgggggcagcgctgacccctttgcccctgtgtttgtgcccccccaccctggcatcagcggcggcctgggcggggccctgagcggggccagccgcagcctgagccccacccggctgctgagcctgcccccagacaagccctttggagccaagcccctgggcttctggaccaagtttgatgtggccgactggctggagtggctgggcctggccgagcaccgggcccagttcctggaccatgaaattgatggcagccacctgcctgccctgaccaaggaggactatgtggacctgggcgtgaccagggtgggccacaggatgaacatcgaccgggccctgaagttcttcctggagaggtag

SEQ ID NO: 319792 - DNA, 6459 bp, Artificial Sequence
  derived and/or modified sequence
atgacccacagccccgccaccagcgaggacgaggagcggcacagcgcttccgaatgcccggaaggtggctcagagtccgacagttctcccgatggcccgggtcgagggccgcgaggcaccagaggccagggctcaggcgcgcctgggtccctggcctcagtgcgggggttgcaggggcgctctatgagcgtgccggatgacgctcatttttcgatgatggtttttagaatcgggattcctgaccttcatcaaacgaaatgcctccgcttcaaccctgatgccaccatctggacagctaagcagcaggtcttatgcgcgctttcagaatccctgcaggacgttctaaactacggcctgtttcagcccgctacatcaggccgcgacgcgaacttcttagaagaagaacgattgctaagggagtacccgcagtctttcgaaaaaggggttccctatctggagtttagatacaagaccagagtgtacaagcagacgaatctcgacgagaaacagctcgccaagttgcacaccaagaccgggttgaagaaattcctagaatacgttcagctgggtaccagtgacaaagtagcaagactgctggacaaagggttggatccaaactaccacgacagtgacagcggggagacaccactgaccctggcagctcagactgagggctctgtcgaggtcatccgcacactgtgtctcggaggcgcccatatagacttccgtgcacgagatggcatgacagccctccataaagcagcatgtgcacgccattgcctggccttgacggcactgctggacctgggaggttcgcccaattacaaggatagaagagggctaaccccgctctttcacacagccatggttggtggtgatcctaggtgctgtgagcttctgctgttcaatagggcccagttagggattgccgacgagaacggctggcaggaaattcaccaggcctgtcaacgcggtcacagtcagcatctcgaacatctcttgttctatggcgctgaaccaggagctcagaacgcctccgggaatactgctctccatatatgcgctctctataacaaagaaacctgcgcgcggatcctattgtatcgcggcgcagacaaggatgtaaaaaacaacaatgggcagaccccattccaggttgcagttattgcaggaaactttgaactcggggaattgatcagaaatcaccgcgaacaagacgtagtgccgtttcaagaatccccaaagtacgccgctcggaggcgtgggcctccagggacaggcctgaccgtcccacctgcccttctccgcgctaattcagatacctctatggccttacctgattggatggtcttctccgctccaggggctgccagttctggcgctcccggcccgacttcaggctcgcaggggcagagccaaccaagtgcccctactaccaagctttcgtctggaaccttgaggtctgcatcgagcccccgtggagccagagctaggtcaccctcgcgaggacggcaccccgaggacgctaaacgccagcccaggggccgccccagttcctcaggaacccctcgcgagggtccggccggggggactggtggcagcggaggaccgggtgggtcattgggatcgaggggtagaagaagaaaactgtactcggcagtgcccggcagatccttcatggctgttaagagttaccaagcgcaggcagagggagaaattagcctgtcaaaaggagagaagatcaaggtcctgagtattggagaaggagggttctgggagggtcaagtaaaaggcagagtggggtggttccccagcgactgtctcgaagaggtagccaataggagtcaggaatctaagcaagagtcacgaagcgacaaggctaagcggctgtttcggcactacacagtaggctcctatgactcctttgatgccccaagcgattacattattaaagagaagacagtgctgttgcagaaaaaagactctgaaggctttggattcgtcctgcggggggccaaggctcaaactcccattgaggaattcactccgacacccgcttttccagcattgcaataccttgaaagcgtggatgaaggtggtgtcgcttggcgggccggactccgtatgggggacttccttatagaagttaacggccagaacgtggttaaggtgggccaccgacaagtggtgaatatgatccggcagggggggaacacactgatggtgaaggtggtgatggttacaaggcacccagacatggatgaggccgtacacaaaaaggcccctcaacaggccaagagacttccaccgcccactattagtctgcgatcaaagtctatgactagtgagcttgaggaaatggaatatgagcagcagcccgccccagtgccctcaatggagaagaagcgcaccgtataccagatggctctaaataagttggatgaaatcttggctgccgcacaacaaacaatatccgcatccgagagcccaggaccaggaggccttgcttcgctgggaaagcatcggcctaaaggattttttgccactgaaagcagcttcgatcctcatcatagagcccagccctcctatgaacggccgagttttttgccaccaggacctgggcttatgcttcgacagaagtctatcggagccgcagaggatgatagaccctacttggctccgccagctatgaaattttcaaggagcttaagcgttcctggcagcgaagatatccccccccccccaacaacaagcccgcctgaacccccttactcgactccccctgtccccagttcaagcggacgattaacgccgagtcctcggggcggccctttcaacccagggtctggaggacccctgcccgccagcagcccagcctctttcgacgggccgagcccaccggacacgcgagtcggttctcgcgagaaatctttgtaccactctggaccactgcctccagctcatcaccatccgccccaccaccatcatcaccacgccccgcccccacagccccaccaccatcatgcccacccgcctcaccccccggaaatggagaccggaggatcacccgatgaccctcctccaaggctggcgctaggtccccagccatccctgcgtgggtggagaggcggcgggccatcaccaacacctggagctcccagtcccagtcatcacgggtcagcagggggaggtggaggatcctcccaaggaccggctcttcgctattttcagctaccaccacgggccgcctcggctgccatgtatgttccggcaagatccggtaggggtcggaagggccctctggttaagcagaccaaagtcgaaggggaacctcaaaaaggaggcgggcttcccccagcccctagcccaacaagtcctgcaagcccccaaccaccacccgctgtggcagcgccgtccgagaagaatagcataccgatccccacaataatcattaaggcgcctagtacatcgtcctccggccgctcatcacaagggtcctcgactgaggctgaaccacccacgcagcccgagcccacaggaggtggagggggaggcggcagctcaccatcacccgcacctgccatgagccccgtaccacctagcccatctccagttcccacccctgcttcacctagcggaccagcaactctggatttcacatcacagtttggtgccgccctcgttggcgctgctaggagagaaggcggatggcagaacgaggctagaagacgaagcaccctcttcctgtctacagacgctggggacgaggatggtggagacgggggactgggaacaggcgcagcaccagggcccagactgcggcatagcaaatccattgatgagggaatgttctccgctgagccctatttgcgattggagtcagccgggtctggagccggctatggaggctatggcgctgggtctcgtgcctacggaggaggagggggaagttccgcctttacatccttccttcctcctaggccccttgtgcaccccctgacagggaaagcactagaccccgcctcccccctgggtcttgcattagctgctagggaacgagctcttaaggagagctccgaaggcgggggagccccacaacctccaccgcggcctccctccccgaggtacgaggcccccccccccactccccatcaccactctccacatgcccatcatgaaccagttttgcgactctggggggcatctcctccggaccctgcgaggagagagctggggtaccgagccgggttaggctcacaggagaagtccttaccggcctctcccccagctgccaggagaagcttgttacaccggttgcctcctactgccccaggcgttgggcccctcctgctccagctcggtacagaaccgcctgccccccatccaggcgtgagcaagccatggagatccgccgctcctgaagagcccgagaggctgccactgcacgtgagattcctggaaaattgtcagcctcgagctccagttacaagtggcagaggccctccctccgaggatgggcctggggtacctccaccctccccaaggaggagcgttccgccatcacctacatccccccgggctagcgaggagaacgggctgcccctactcgtccttcccccgccagcccccagtgtcgacgtggaggacggtgagtttttgtttgtggagcctcttccacctcccctggagttctctaattctttcgagaaacctgagtcgccgctgacaccaggtcctccccaccccctcccggacactcctgcgccagcaacccctctgcccccggtgccgcctccggcggtggcagctgcaccccctaccctcgacagcactgccagtagcctgacttcttacgatagtgaggtggccacgctgactcaaggggcctccgctgcacccggagatccccacccgcctggacccccagctccagctgccccagcacctgcagcaccgcaacccggcccagatcccccacctggcacagattcggggatcgaagaagttgatagtaggtccagctcagatcacccactcgagactattagcagtgcaagcaccctaagcagtttaagcgccgaaggcggaggctccgccgggggtggggggggggccggtgcaggagtggcttccggtcccgaactgctggatacctatgtcgcgtacctggatggccaggcattcggaggttcttccacccccggtccaccatatcccccacaactcatgacacctagtaaactgcgggggcgtgcgctgggggcctccgggggtctcagacccggaccttcagggggtctgcgcgacccagtgacacccacctccccaacagtatctgtgacaggcgccggaacagatgggctgctcgcattgcgggcttgctctggcccccctacggccggagtggcgggaggcccagtagccgtcgagcccgaggtgcccccagttccactcccaacggccagttctttgcctagaaagctcctcccatgggaggaaggccctggcccaccccctcctccgttacctggacctctggcccaacctcaagccagcgctctggctactgtcaaggcctctattatttccgagctgtccagcaagctgcagcagtttgggggatcatccgcggcaggaggcgcgctgccctgggcccggggcggctccggtggtggcggagatagccatcatggcggcgcgagttacgtcccagagagaacctcatctttacagcgtcagaggctgagcgatgactcccagtcctcgctcctctccaagcccgtctcttcactcttccagaattggccaaagccgcccctgccacctctgcccactgggaccggagtgtctcccactgccgccgccgccccaggcgctacctctcccagtgcgtcctcatcttctacatccacacgacatctgcaaggcgtggaattcgaaatgaggccaccattgctcagacgtgccccatcgccatctctacttcctgccagcgagcacaaagtgagccctgcccccagaccgtcctcattacctattctcccttcgggtccgctgtacccaggactattcgatattaggggcagtccgaccggaggggccggtggcagtgcggatccgttcgctcctgtgttcgtgcctcctcacccagggatctcaggcggactggggggggcattgagcggcgctagtagaagcttgtctccaactcgactgctcagtctgcctccagacaaacccttcggagcaaaacccttaggattctggacgaagttcgacgtcgcggattggcttgaatggctgggacttgccgaacatagggcccagttcctggaccacgagattgacggcagccacctgccggccttgaccaaggaagattacgtggatcttggagtgacccgggtgggccacagaatgaacattgaccgggcacttaagttcttcctcgaacggtag

SEQ ID NO: 319793 - DNA, 4647 bp, Artificial Sequence
  derived and/or modified sequence
atgcagctgatggccctggagcagcggttcggcagcggcctgcccggcggcggacagccgctgtgtttgatgatgtctagcccattgcctccacctccaccacatttcagctgtcttcccgcctccgattacatcatcaaagagaagactgtgctcctgcagaagaaggatagcgaaggctttgggttcgtcttgagaggcgcaaaggcccagacgcctattgaagaattcacacctacccccgcattccctgccttgcagtacctggagtctgttgacgagggtggcgtcgcctggagagccgggctgcgaatgggggatttcttgattgaagttaatggccaaaacgtggtgaaggtgggacatcgacaggtggtcaatatgatccggcagggcggaaataccctgatggtgaaagtagtgatggttacgagacatccagatatggacgaggcagtgcacaaaaaggccccccagcaggccaaacgactgcctccacccacaatttcactacggagcaagtccatgacctcagagctcgaggagatggagtacgagcagcagcctgctcctgtgccttcaatggaaaaaaaacgcacagtgtaccaaatggctttgaacaaactggacgagatcctggccgcggcccagcaaacaatcagcgcatctgagagcccaggccccggcggattagccagtctgggaaaacacagacccaaggggttttttgcaaccgagagtagctttgaccctcatcatcgcgcacagccaagttacgagcgcccttcgtttttgcctcctggtccagggttgatgctaaggcagaaaagtattggcgccgccgaagacgacaggccttatttagcccctcctgctatgaagttttctaggagcctgtcagtacccgggtccgaagacattccacccccaccaaccacatcaccgccggagcccccctattcaactccccccgtccctagcagcagcggtcgtctgactccatctcccaggggcgggcctttcaatccaggcagtgggggacctctaccagctagttcaccagccagtttcgacgggccaagccccccggatacccgggtcggctccagagaaaagagcctttaccactccggccccctgcctcccgcccaccaccaccccccacaccatcatcaccatcatgccccacctccccagccgcatcaccatcatgcgcacccacctcaccctcctgagatggagacaggtggctcgcctgacgaccctccaccccggctggccttgggcccccagccatcacttcgcggctggagggggggtggcccatcccccacaccaggcgccccttcaccaagccaccacgggtctgcaggggggggaggtgggagcagccaagggccagctctccgatatttccagctcccaccaagggccgctagcgctgccatgtatgttcctgctcgtagcggaagaggccggaaggggcccttagtaaagcagaccaaggtggaaggtgagccacagaagggcgggggcttgcccccagcgccatctcctacgtcgccggcctccccccaaccaccgccggccgtcgctgctccctccgagaaaaattcgatccccatcccaacgatcatcattaaagcccccagcactagtagcagcggcagaagctcccagggctcctccacggaggcagaaccgccaacccaacccgagccgactggcggaggtggcgggggcggctcaagcccttctcccgctcctgcgatgtctcccgtgcccccttctccgagccccgtgccaacaccggcgagcccctcagggccagctaccctggacttcaccagccagtttggagcggcccttgtcggagccgccaggcgggaaggtgggtggcagaacgaggcccgtcgacggagcaccctgtttttgagcaccgatgcaggggacgaggacgggggtgatggaggcctgggcaccggagcggcccccggtcctcgcttacggcacagcaagtccatcgacgaaggtatgttcagtgcagaaccctatctgaggctcgagtcagcaggaagcggagctggatatgggggttatggcgccggttctcgagcatacggggggggagggggatcatcagcgtttaccagttttttgcctcctaggcctctcgtgcaccctctgaccgggaaagccttagatccagcttccccactgggattggcactggccgcccgagagcgagccctcaaagagagttccgaaggcgggggtgccccacagcccccaccccgccccccatcaccgaggtacgaagcaccccctcccacgccccatcaccacagcccccacgcccaccatgagcctgtcctgcgtctttggggcgcttccccaccggacccagcgaggcgagagctcgggtatcgcgctggattaggtagtcaagagaagtccctgccagctagcccacctgcagctcgacggtcactgctgcacagactgccccctacagctcctggggtgggccccttgttgttgcagttgggaactgaaccacccgcaccccatcccggtgtgtcaaagccatggcgcagtgctgctccagaggagcctgaaagactgcctctacacgtgcgattcctcgagaattgtcagccacgtgctcccgttactagcgggagggggcctcccagtgaagacgggccaggagtacctcctccaagcccgagacgaagtgtgcctccttcgccgacaagcccccgagcttcggaggaaaacgggttaccacttctggtactgcctcctccagctcccagcgtggacgtggaagacggtgagtttctttttgtggagccattacccccacctttggaattctctaacagtttcgagaaaccagagtccccgctgacacccggaccaccacatcctctaccagataccccggccccagcaacaccacttcctcctgtgcctccccccgccgttgccgctgccccacccaccctcgacagcaccgctagctcattgacatcctacgattccgaagtcgcaactctgacacaaggcgcctccgccgctcctggggatccgcaccctcccgggccccctgcgccggccgcgccagcccccgcagctccacagccagggcctgaccctcctccagggaccgactctggaatcgaggaggtggattcccgcagttcatcagatcaccccctcgaaacaatttcaagcgcgagtacactctcatccctgagcgccgaaggcggtggatccgcaggaggaggcgggggcgctggcgccggagttgccagcggcccagagctgctcgatacttacgtcgcttaccttgacgggcaagccttcggtggatccagcacacctggccctccatatccgccccaattaatgaccccaagtaagctgcgcggcagagcactgggggcctccggtgggctacggcccgggcccagtggaggtctgagggatcccgtgacccctacctcacctaccgtgtccgtaactggagctggcacggatggacttctcgctttgcgggcctgctctggccccccaaccgcaggagtggcaggaggacctgtggccgtggagcctgaagttccgcctgtcccactgccaactgcctcctcactgccccgaaaattgttaccatgggaagagggaccaggtcccccccctccgccgctcccaggtccccttgctcagccccaggcctctgccttggctaccgttaaagcttcaattattagcgagctgagttctaaactgcagcagttcggtggctcctccgccgcaggaggggccctcccatgggctcggggcgggagcggcggcgggggtgattctcatcatggaggcgcatcttacgtccctgaaaggacatcctctcttcagaggcagaggctttccgatgacagccaatcaagcctgctgtctaagcccgtgtccagcctattccagaattggcccaagccaccactccccccattgcctacagggaccggtgtctcccctacagccgctgccgctcctggagctacaagtccgagcgcttcctcgagctcaaccagtacgagacacctgcagggggtggagttcgaaatgcgtccccccctgttgcgccgcgctccttccccatcccttctgcctgcctcagagcataaggtcagccccgcacctcgcccatcgtctctgcccatccttccatcaggaccactgtatcccggcctgttcgatattcggggcagtcctacagggggagccggaggatctgccgatccctttgcccccgtttttgttcctcctcaccctgggatctcggggggccttgggggggccttatccggcgcaagccgaagcctgagcccaactcgcctgttgtcactccctcccgataagccctttggtgcaaaacccctggggttctggactaaattcgacgtcgcggattggctggagtggctgggactggctgaacatagagcacaattcctagatcatgaaattgacggatcacatctacccgccttgacaaaggaagattacgttgacctgggcgtcaccagggttgggcatcgaatgaacatcgaccgggcactgaagttttttctggagagatag

SEQ ID NO: 319794 - DNA, 6458 bp, Artificial Sequence
  derived and/or modified sequence
atgacccactccccggctacaagtgaggatgaggagcgccattcagcatccgaatgccctgaggggggatcggaaagtgattcatctccagacggcccaggaaggggtcccaggggtaccagaggccaaggctcgggagccccaggctcactcgccagcgtccggggactccagggcagatctatgagcgttcctgatgacgcacacttttccatgatggtttttaggattggcatccccgaccttcatcagacaaaatgcctccggttcaaccccgatgcaaccatttggacagctaagcagcaagttctgtgcgccctgagcgagagcctccaggacgtacttaactacggcctattccagcctgcaaccagtggaagagacgcgaactttctggaggaggagaggctgttaagggaatacccccagagtttcgaaaaaggtgtaccatacctggagttcagatataaaactagggtctacaagcagacgaatcttgatgagaagcagctcgcaaagttgcacactaagaccggtctgaaaaaattcctagaatatgtgcaactggggaccagcgacaaggtggcacggctgctggacaaggggctggatccaaattatcacgacagtgactctggggagacgcctctgacccttgccgctcagacagaggggagtgtcgaagtgatcaggaccttgtgcctgggtggtgcacacattgactttcgggctagggatggaatgaccgcactgcacaaggctgcttgcgcacgacattgtctggcactgaccgcccttctggacctgggcggatctcctaactataaagatcggcgaggactgactccactcttccacactgctatggttggtggcgacccacgatgttgtgagcttctgctttttaatcgggctcaacttggtatcgctgatgaaaatggctggcaggaaatccatcaggcttgccagaggggccatagtcagcatctcgagcacctcttgttctacggtgcagaacccggagcccaaaatgcatcggggaataccgctctgcatatctgcgctctctataataaagagacttgtgctagaattctgctttacaggggggctgataaagacgtgaaaaacaacaatggacaaacaccattccaggttgccgttatcgcaggcaatttcgaattaggggagctcattcggaatcacagggaacaggacgtcgtcccattccaggagagccccaagtatgcagctcgacggcgaggacccccaggaaccggtctcaccgtgccccctgcactcctgagggcaaattccgacaccagcatggccctgcccgactggatggtgtttagtgcgccaggagccgcttcctccggggctcccggacccacaagtggatcacaagggcagtcacagccatctgcacccacaaccaagctgtcttccgggaccctgaggagcgcaagctctcccagaggcgcacgggcacgctcaccctcacgtggacgacaccctgaggacgctaaaagacaaccaagaggcagacccagttcctctggtacacctagggaaggcccagcaggcggtaccgggggttcgggaggtcctgggggttcacttgggtccaggggcaggcggcgaaagctgtactcggcggttcctggtagatccttcatggcagtgaagagctatcaggctcaagccgagggagagattagcctcagcaagggcgagaagatcaaggtcctgtcaattggcgagggcggattctgggagggacaggtcaaagggcgagtagggtggtttccaagtgactgtctcgaagaggtagctaataggagccaagagtcaaagcaagagagccgtagtgacaaggccaagcgccttttcagacattatactgtcggctcctacgatagctttgatgccccaagcgactatatcataaaagaaaagaccgtcctactgcagaagaaggactcagagggcttcggatttgtcttgcggggtgcaaaggctcagacaccaatcgaagagtttacccccacacccgcttttccagcattacagtacctagaatcagttgatgaggggggagtggcctggagggccggtttaaggatgggcgacttcttgattgaggtcaacggacaaaatgtggttaaagttgggcatcgccaagttgtgaacatgatccgccagggcggaaataccttgatggttaaggttgtcatggttacaaggcaccccgacatggacgaggccgtccacaaaaaggctcctcaacaggcgaagcggcttcctccaccaacaatttcgctgaggagcaaatctatgacctccgaattggaagagatggaatacgagcagcaacccgcacctgttccaagcatggagaagaagcgcaccgtttaccagatggcactgaataagctagacgaaatccttgccgcagcacagcagactataagcgccagcgagagccctggccctggcggactggcaagcctcggcaagcacagacctaagggcttttttgccaccgaatcttcatttgaccctcaccacagggcccagccctcttacgaacggccatctttcctacccccagggcctgggcttatgctcagacagaaatccatcggcgctgccgaggatgaccgaccttacttggcaccgccagccatgaaattttctagatccctgtccgttcctgggagtgaagacattcctccacctcctactacttcaccgcctgagcctccctacagcacaccaccagtaccttcaagttcagggcgactgacaccatcaccccgagggggaccattcaatcccggttctgggggacccctgccggcatccagtcccgcttcatttgatggtccatcgcctccagatacaagggtgggctcgcgcgagaagtctctataccactctggacctctcccaccagcccatcatcacccccctcatcatcaccaccatcatgcccctcccccacaacctcatcaccatcacgcccatccgcctcacccccctgaaatggagacagggggtagcccagacgatcctccccctcgcttggcacttggccctcagcccagcctgagaggctggcggggtggcggtccctcacccacacccggtgccccatcgccttctcatcacggtagcgccggagggggaggtggtagtagccaggggcctgctctacgttactttcagctcccaccgcgtgcggcttccgctgccatgtacgtgcctgcccgatctggtcgcggtagaaaaggaccattagttaagcagaccaaggttgaaggcgagccacagaaaggtggtggtttgcctcctgccccttcgcccacgtcaccggctagcccacagccgccacccgctgtggccgctccttctgaaaaaaattcaataccgataccaacaatcattatcaaggccccatctacaagcagctccgggcgatcctcacaggggagctctacagaggccgaaccaccaacacaacctgagcctacagggggaggtggagggggaggcagtagcccatcgccagctccagcaatgtcgcccgtccccccttcccccagtcccgtccctactcccgcttctccctcagggcctgccacgttggacttcacaagtcagttcggcgcagccctcgtgggggcagcacgacgagagggtggatggcagaacgaggcgaggagaagaagtacactgttcctgtcaacagacgccggagatgaggatgggggagatgggggactgggcaccggagccgcacccggacctcggcttaggcatagtaaaagtatagacgaaggcatgttctccgccgaaccatatctcagactcgagtccgccggttcgggagccggatatggtggttatggtgccggaagtcgggcttacggcggaggcggtgggtcgtcagcattcacaagcttcttgcctcctagaccactggtccatcctctgactgggaaggctctcgaccccgcaagtccccttggcctcgcacttgcagctagagagcgcgctctaaaggagtcctcagagggcggtggggcaccacaacccccacctcgcccaccatcacccagatatgaggccccacccccaactcctcatcaccactccccccatgctcatcacgaacctgtgcttagactgtggggggcatctccacccgatccggcacgtcgtgagctggggtaccgggctggcctgggcagccaggagaaaagcctgccagccagtcccccagccgctcgacgcagcctgctgcatcgtctgcctccgacagctcccggagtcggacccctgcttctccagctgggaaccgaacctccggcaccccatcccggtgtgtccaagccttggcggtcagcggcacctgaggagcctgagagattacctctgcacgtgcgtttcctggagaactgccagccacgggctcccgttacaagcgggagggggccaccatctgaggatggtccaggagtgccacctccatcccccagacggtcggtgcccccttctccgacttcccccagggcttctgaggaaaatggactccctctgctcgtgctgccccctccagcccctagtgtggatgtggaggatggggagtttttatttgtggagccattacctcctccactggagttcagtaacagttttgagaaaccagagagcccactgacccctgggcctccccaccccctgcccgatacacccgctcctgcaacacctctgccccctgtccccccaccagcggtggccgctgctccacccacattggactccacggcgtcatccttaacgtcctatgactctgaggtggccaccctcacacaaggcgctagcgccgcaccgggagatccccatccccctggacccccagctcccgcagcaccagcgccagcagctcctcagcccggacctgatccgccacccggaacagattctggcatagaggaagtcgattccagaagctcaagcgaccacccactggagaccatctctagtgccagcaccttgagttccctgagcgcggaagggggaggcagtgctggcggaggcggaggagccggagccggagtcgcttctggcccagagctgctcgatacctacgtagcctatctggacgggcaggcgtttggcggtagctctacaccgggtcccccatatcctccgcagctgatgactccctctaagctgagaggccgtgccctcggcgcttccgggggactgaggcctggcccatccggcggattgagagatccggtcacaccgacctctcccactgtttcagtgaccggcgctgggaccgatggcctgctggcgcttagggcatgttcaggcccacctaccgccggtgtcgccggtggacccgttgcagttgagccagaggttccccctgtgcctcttcctaccgccagctccctgccacgcaaactgctgccatgggaggaggggcctggaccaccaccacccccactgccagggcctctggcccagccacaagcatcggcactagcaactgtcaaggcgtccatcatcagtgagctctcgtcaaagctgcaacagtttggtgggagctcggctgcagggggagcccttccatgggccaggggaggaagcgggggaggaggagactcccatcatggaggagccagctacgtgcctgagcggacatccagtctccagcggcaaagattatctgacgatagccaaagcagtctgttgtccaagcccgtcagcagtctattccagaactggcccaagccaccgctcccacccctgcctactggcaccggggtctcgccaactgctgctgcggcacccggtgccacctctccttcggctagtagctcgtcgacctctacccggcatttgcagggggtcgagttcgagatgcgccctcctctgctgcggcgtgcaccttctccgagcctgctgcccgctagtgaacataaggtgagcccagcccctagaccctctagtctccccattttgccttcggggccactgtatcccggtctcttcgatatccgcggatcaccaacaggcggagccggagggagcgctgaccctttcgccccagtgttcgtgcctccccatccaggtatttctgggggactgggaggagctctctccggcgcatcacgtagtttaagcccaacgcgtcttttatcgctgcctcccgataagcccttcggcgcaaagcctctcggcttttggacgaagtttgatgttgctgattggctagagtggctaggcttggcagagcaccgggctcagtttctggatcatgagattgatgggtcacatttaccagcattaacaaaggaagattacgtcgacttaggggttacacgggttgggcaccggatgaatatcgatcgagcgctgaagttttttctggaacgcta

SEQ ID NO: 319795 - DNA, 4647 bp, Artificial Sequence
  derived and/or modified sequence
atgcagttgatggcactcgagcagagatttgggtccggcctgcctggaggagggcaacctctgtgtctcatgatgtcctctccactgcccccaccccctcctcacttcagctgtctgcccgcttccgactatatcataaaagaaaaaacggtgctgttgcagaaaaaagactctgaggggttcggatttgtcctaagaggggcaaaggcccaaacaccaatagaagagtttacccccacccccgcatttcccgcactccagtatctggagtctgtggatgagggaggcgttgcgtggagagcagggctgcgcatgggggattttctgatcgaggtaaatggacaaaatgtggtaaaggttgggcatcgccaggtcgtcaacatgatccgtcagggcggaaataccctcatggtgaaagtggtaatggtgaccagacatcctgacatggacgaagcagtccataaaaaggcaccacagcaggccaaacgcctgccaccccctactatctctttgcgtagcaaaagcatgacgtccgagctcgaggaaatggagtacgagcagcaaccagcacctgtcccctctatggaaaaaaagaggacagtctaccagatggcacttaacaaactggacgagatacttgccgctgcccagcagacaatatcggcttccgagagcccaggaccaggaggtcttgcatccctcggcaaacatcgtccaaaaggattctttgctactgagagttcatttgacccacaccatcgcgctcaaccgtcctacgagcgtccgagcttcctgcctcctggccctggtcttatgctcaggcagaaatctatcggggctgcagaagacgacagaccctaccttgcccctccggcaatgaagttttctagatcgctgagcgttcctggaagcgaggacattcctcctcccccaacaacgagtccacctgagccgccttatagcacaccccctgtccccagttcaagcggtcgactgacgccttctccgagaggagggccattcaacccaggttctggagggcctctccccgctagcagcccagccagcttcgatggcccatcacctcctgatacccgggtcggctctcgcgagaagtccctataccatagcggcccactaccccctgcacaccaccaccccccacaccaccaccaccatcacgctcccccaccacagccgcatcaccatcacgcacatccgccacatccaccggagatggagaccggcggaagtccagacgacccaccgccacgcctcgcgcttggtccacaaccatccttgcgcggttggagaggtggcggaccatctccaacaccgggtgcccctagtccttcccatcatggaagcgccggaggaggaggcggttcatctcaaggtccagcccttagatactttcaactgcctccacgtgccgcttcggccgcaatgtatgttcccgctcggagcgggcgtggaaggaaaggacccctggtgaagcagaccaaagtggagggcgaacctcaaaaaggagggggtctgcctccggctccatctccaaccagtcctgcgtcgccacagccgcctccagctgtggcagctccaagcgaaaaaaactccatccccatacccaccataatcattaaggcccctagcaccagttcatccggtagatcatctcagggatcctcaacggaagccgaaccccctacacagccggagcccacagggggagggggaggaggtggctcttcgcccagccctgcacctgccatgtctcctgttccgccaagcccatcacccgtgccaactcccgcaagccccagtggccctgcaacacttgactttacctcgcagtttggggctgctctggtgggtgctgctaggcgagaggggggttggcagaacgaagcgcgtcgtcgcagtactctattcctgtccacagacgcaggtgacgaggatggcggagatgggggtttggggactggagctgcaccaggccctcgtttaaggcatagcaaatcgattgacgagggcatgttctcagccgagccttacctacgcctggagtctgccggatctggtgctggatacgggggttacggcgcaggcagcagagcttacggtggagggggtggcagcagcgccttcacctcattcctacctcccagacctcttgtgcaccctttaacagggaaagccctggaccccgcaagcccactcggtctggcattggctgcccgagagagggcgcttaaagaaagctcagagggagggggtgcgccacagcccccaccccgacctccatcccctagatatgaggccccaccacctaccccccaccaccatagtccacatgcccatcatgaacctgtgctgaggttgtggggagcgagcccgcctgatccagccaggagggagctgggttacagggccggactcggctcacaggaaaaatcacttcctgccagtcccccagctgctcgacgtagcttgctgcaccggttgcctccaactgcacctggggttggtccattgctgctgcagctgggaactgaacctcccgctccacatcctggagtgagcaagccatggcggtcagccgctcctgaggagcctgagcggctgcccttgcacgtgagatttctcgagaattgtcagccaagggcacctgttactagcggtaggggaccacccagtgaggacggacccggtgttccaccgccatcacccaggcggtccgtgcccccaagccccacgagtccaagggctagcgaggagaacgggctccccctgcttgtcttacctccccctgcccctagcgtcgacgtggaggatggcgaatttttgttcgtcgaacccttacccccacccctcgagttttctaactcctttgagaagcccgagtccccattgacacctggaccaccacatcccctacccgacactcccgcaccagcgactccattgcccccagttcctcccccagccgtagctgccgctccacctacacttgattccacagccagcagtcttacttcttatgattccgaggtggcaacccttacacaaggcgcttcagcagcaccaggcgatccacatcccccagggcctcccgcaccggctgcccctgcccctgctgcgccacaacccggaccagatcctcctccaggcaccgacagtgggatagaagaggtggactcgagatcttcctccgatcatcctctggaaacgatttccagcgcttctacactctcatctttatccgcagaagggggtggatcagctggcggagggggaggcgcaggggctggggtggcatctggccctgaactgttggacacatatgtcgcctatctcgacggccaggcctttggcggatcttcaacccctggcccaccttatccaccccagctgatgactccttcgaagttaagagggagagccctgggagcctcaggagggctgagaccgggacccagtggaggccttagggatccagtgacacctactagtcccacggttagtgtcacgggggcaggaacagatgggttgcttgccctgcgggcatgttctggcccacccaccgctggcgtcgccggtggtcccgtggccgtcgaaccggaagtgcctcctgtccccctgcctacagccagtagtctccccagaaagctgctgccatgggaggaaggacctggtcccccacctcctccattgcctggtccgctcgcacagcctcaagcctctgccctagccacggtgaaagctagcatcatatccgaactgtcatcaaagctacagcagtttggtgggtcatctgccgcagggggtgctcttccctgggctcggggtggctccgggggtggcggtgacagccaccacggcggagcttcctacgttcccgagaggacctcctccttgcaacggcaacgcttatccgacgattcccaaagttcactgctgtctaaacccgtctcctccctgttccagaactggccaaaacctccgttgcccccactgcctaccggcacaggtgtgagcccaacggctgcagctgctcccggagctacgagcccttcagctagttcaagcagcacaagtaccagacatttacaaggggtcgagttcgaaatgcggcctcccctgcttagaagggccccttccccatccctgctgcctgccagcgaacacaaggtgagccctgcccctcgcccttcctccctgccaatcctcccgtccgggccactgtaccctgggctatttgacattaggggaagccctaccggcggagccggtgggtccgcagacccttttgcgcctgtgtttgttcctccccacccagggatttctgggggtctgggaggcgctttaagtggagccagccggtctctgtctcccacacgcttgttgagcctccctcccgataaaccgtttggcgcaaaacccttggggttctggacaaagtttgacgtggcagactggctggaatggttaggcctggctgagcatcgagcacagttcttggatcatgagatcgatgggtctcacctgcccgctctgaccaaggaggattatgttgacctgggcgtaaccagggtcgggcacaggatgaatattgatagggctcttaaatttttcttagagcgatag

SEQ ID NO: 319796 - DNA, 6616 bp, Artificial Sequence
  derived and/or modified sequence
gtcgccccgtggccccacaatgacccacagccccgcgacaagcgaggacgaggaacgccacagtgccagcgagtgtcccgaggggggctcagagtccgacagctccccagacgggccaggtcgaggcccccgggggacccggggccagggcagtggggcacctggtagcctggcctctgttagaggcctccagggccgctcaatgtccgtcccagacgacgcccacttcagcatgatggtcttcaggattggcatcccggacctgcaccagacaaaatgccttcgcttcaaccccgatgccaccatctggacggccaagcagcaggtgctctgtgccctgagcgagagcctgcaggatgtgctcaactatggcctgttccaaccggccacctccggccgcgatgccaacttcctggaggaggagaggctgctgcgggagtacccccagtcctttgagaagggggtcccctacctggagttccgatacaagacccgagtttacaaacagaccaacctggatgagaagcagctggccaagttgcacacgaagacggggttgaagaagttcctggagtatgtgcagctcgggacatctgacaaggtggcgcggctgctggacaaggggctggaccccaattaccatgactcggattcgggagagacccccttgacactggcggcccagaccgaaggctctgtagaggtgattcgaaccctgtgcctgggcggggcccacattgacttccgggcccgggatggcatgaccgcactgcataaggccgcatgcgcccgacactgcctggcactcacggcgctcctggaccttgggggttcccccaactacaaggaccgtcgggggctgacccctctgttccacacggccatggtgggtggtgacccccgatgctgcgagctgctcctgttcaacagggcccagctgggcatagctgatgagaacggctggcaggaaatccaccaggcctgccagcggggtcactctcagcacctggagcatctgcttttctacggggctgagcctggagcccagaacgcctcggggaacacggctctgcacatctgcgccctctacaacaaggagacctgtgccaggatcctcctgtatcgaggtgccgacaaggatgtgaagaacaacaacggacagacccccttccaggtggcagtgattgctgggaattttgagctgggggagctgatccgaaaccaccgagaacaggatgtggtgcccttccaggagtcccccaagtacgcggcccggcgacgggggcccccaggcacagggctgacggtgcccccggcgctgctgcgggccaacagtgacaccagcatggcgctgcccgactggatggtgttctccgccccgggggccgcgtcctctggggcccctggccctacctcagggtcccagggccagtcgcagccctcggcccccaccaccaagctcagcagcgggaccctccgaagtgccagcagcccccggggtgccagggcccgctctccatcccgagggaggcaccctgaggacgccaagaggcagccccgaggccggcccagctccagcgggacaccccgggaagggccagccgggggcacggggggctcagggggccccgggggctccctgggcagccgcgggaggcggaggaagctctactcagcggtacccggacgctccttcatggctgtgaagtcctaccaggcccaagccgagggggagatctccctgagcaagggcgagaagatcaaagtacttagcatcggggaaggaggcttctgggaaggccaggtcaaaggtcgtgttggctggttcccctctgactgcctggaagaagtggcgaatcgctctcaggagagcaagcaagaaagccgcagtgacaaggcaaagagactcttccggcattataccgtgggctcctacgacagctttgatgccccaagcgattacatcattaaggagaagacagtcttgctgcagaagaaggacagtgaggggtttgggttcgtgctccggggggccaaggcgcagacccccatcgaggagttcacccccaccccggccttcccggcgctgcagtacctggagtcggtggacgagggtggcgtggcatggcgagctggactgcgaatgggagacttcctcatcgaggtgaacgggcagaatgtggtgaaggtcggccaccgacaggtggtgaacatgatccgccaagggggcaacacgctgatggtgaaggtggtgatggtcaccaggcacccggacatggatgaggcagtgcacaagaaagcaccccagcaggccaagcggctgccgcccccaaccatctccctgcgttccaaatctatgacctcagagctggaggagatggagtacgagcagcagccggcgccggtgcccagcatggagaaaaagcggaccgtgtatcagatggctctcaacaaactggacgaaatcctggccgcagctcaacagaccatcagtgcaagcgaaagccctggtcccggtggcctcgcgtccctgggcaaacaccgacccaaaggtttctttgccactgagtcgagcttcgatccccaccaccgtgcccagccaagttacgagcgtccttctttcctgcctccaggacctgggttgatgctccggcaaaaatctatcggtgcggcagaagatgacagaccttacctagcacccccagccatgaaattcagccgcagcctgtctgtgcctggttcggaggacattcccccgccacccaccacgtccccaccggagcctccctacagcacacctccagtcccctcctcctcagggcgcctcaccccctcccctcggggagggcccttcaaccctggctctggtggccccctccccgcctcctcccctgcatcctttgacgggccctcccctcccgacactcgcgtggggagccgcgagaagagcctgtaccacagtgggcccctgcccccggcccaccaccacccgccccaccaccaccaccaccacgccccgccccctcagccccaccaccaccacgcccacccccctcatcctcccgagatggagacaggcggctctcccgacgaccctccaccccgcctggctctggggccccagcccagcctgcgaggctggaggggcggcgggcccagcccgaccccgggggccccgtccccatcgcaccacggcagcgcgggcgggggcggcggctcctcccagggcccggctctacgctatttccagctgcccccgcgggcggccagcgcagccatgtacgtgcccgcccgctcgggccgcggccgcaagggcccgctggtcaagcagaccaaggtggaaggcgagccccagaagggcggcggcctcccgcccgcgccgtcgcccacgtccccggcctccccgcagccgccgcccgccgtggccgcgccctcggagaagaactccatccccatccccaccatcatcatcaaggccccgtccaccagtagcagcggccgcagcagccagggcagcagcaccgaggcggagccccccacccagccggagcccacgggaggcggcggcggcggcggctcctcgcccagccccgccccggccatgtcacccgtgcccccgtccccctcgcccgtgcccacccccgcctcgcccagcggcccggccacgctggacttcacgagccagttcggggccgccctggtgggggcggcccggagggaggggggctggcagaatgaggcgcgccggcgctccacgctgttcctgtccaccgacgcgggggacgaggacggcggggacggcgggctgggcacaggggcggccccgggcccgcggctgcgccactccaaatccatcgacgagggcatgttctccgccgagccctacctccgactggagtctgcgggcagcggcgcgggctacggcggctacggggccggtagccgagcctacgggggtggcgggggcagcagcgccttcaccagcttcctgcccccgcgacccctggtgcacccgctgaccggcaaggccctggatcccgcctccccgctggggctggccctggccgcccgcgagcgagcgctgaaggagtcctcggagggcggcggggccccccagccgcctcccaggcccccatcgccccgctacgaggccccgccgcccaccccgcaccaccactcgccccacgcccaccacgagccagtgctgcgtctctggggggcctccccgccggaccctgcgcgccgggagctggggtacagggccgggctgggcagccaggagaagtcccttcccgccagcccgcccgccgcccggcgttccctgctacaccgcctgccgcccaccgctcccggggtggggcccctcctgctgcagctggggacggagcccccggccccgcaccccggagtaagcaagccctggaggtccgcagcccccgaagaacccgagcggctgccgctgcacgtgcggttccttgaaaactgccagccccgggcccctgtgacgagcggaaggggtcccccctcggaggacgggccgggggtcccgccgcccagcccacgccggtccgtgcccccctccccgacctccccgagggccagcgaagagaacgggctgcccctgctggtcctgccgcctcccgccccctcggtggatgtggaagatggcgaattccttttcgtggaaccgctgcctccgcctctggaattctccaacagcttcgaaaagccagagtcgcccctcacgcctgggcctccccacccgctgcccgacacacctgcccctgccaccccgttaccccctgtgccacccccggctgtggccgcagcccctcccaccctggactccaccgcatccagcctgacatcctatgacagcgaggtggccaccctgacccagggggcctccgccgctcctggggacccccatccaccaggcccgcctgccccagcagcaccggctcccgctgccccacagcctggcccggaccctccgcctggcacggattctggcatcgaggaggtggacagtcggagcagcagtgaccacccactggagaccatcagcagcgcctccacgctgagcagcctatctgccgaaggtggtggcagcgcagggggtgggggcggggctggggccggtgtggccagtgggccggagcttctggacacctatgtggcctacctggacggccaggcctttgggggcagcagtactcccggcccgccataccctcctcagctcatgactccctctaagctccggggccgggcgctaggagccagcggaggcctgcggcctggccccagcgggggactccgagaccctgttacccccaccagccccaccgtctcggtgacaggggctggaaccgatgggctgctggccctgcgtgcttgttcaggaccccccacggcaggcgtggcggggggtccggtggctgtagagccagaagtcccaccggtgcccttgccgacggcctcctctctgccccggaagctgctgccctgggaggagggcccgggcccaccgccaccacctctgcccgggcccttggcccagcctcaggcctcagccttggccacagtaaaagccagcatcatcagtgaactcagctccaagcttcagcagtttgggggctcctcggcagctggcggcgctctgccctgggcccgaggaggcagtgggggaggcggagacagccaccacgggggagccagctatgtccccgagaggacctcctccctgcagcggcagagactctccgacgactcccagtcctcactcctctccaagcctgtcagcagcctgtttcagaactggcccaaaccacctctgccgccactccccaccggaacaggggtctcccctacagccgctgcggccccaggggccacctcaccctcagcctcctcctcctccacgtccacccgccacctccagggcgtggagttcgagatgcggccccctctgctccgccgggcccccagcccctcgctgctgcccgcctcggagcacaaggtcagccctgcgcccaggccctcgtccctgcccatcctgccttccggacccctctacccaggcctctttgacatccgtggctccccaactggaggggcaggaggctcggctgaccccttcgccccagtctttgtgccgccacacccggggatatccggggggctcgggggagccttgtcaggggcctcgcgctccctctcaccgacccgcctgctctcgctgcccccggacaagccgtttggcgctaaacctctggggttctggaccaagttcgacgtggctgattggctggagtggctgggtttggcggagcaccgagcccagttcctggaccacgagatcgatggctcccacctgcccgccttgaccaaggaggactacgtcgatctaggtgtgaccagggtgggccaccgcatgaacatcgaccgggctctcaaattcttcctggagaggtgatggctggcctggacggaccagccccgtccacagaactcttgagcctgctggcctcttgacctctgacccctgactgtcattctctccccgggccagggactctgttcaaactgcgccctgccctcatctcccaaggcc

SEQ ID NO: 319797 - DNA, 4785 bp, Artificial Sequence
  derived and/or modified sequence
atgcaattaatggccctggagcagaggtttgggtctgggttgccgggtgggggacagcctctgtgtctcatgatgtcttctccactccccccaccacccccccatttctcctgcctccctgccagcgattacatcattaaggagaagacagtcttgctgcagaagaaggacagtgaggggtttgggttcgtgctccggggggccaaggcgcagacccccatcgaggagttcacccccaccccggccttcccggcgctgcagtacctggagtcggtggacgagggtggcgtggcatggcgagctggactgcgaatgggagacttcctcatcgaggtgaacgggcagaatgtggtgaaggtcggccaccgacaggtggtgaacatgatccgccaagggggcaacacgctgatggtgaaggtggtgatggtcaccaggcacccggacatggatgaggcagtgcacaagaaagcaccccagcaggccaagcggctgccgcccccaaccatctccctgcgttccaaatctatgacctcagagctggaggagatggagtacgagcagcagccggcgccggtgcccagcatggagaaaaagcggaccgtgtatcagatggctctcaacaaactggacgaaatcctggccgcagctcaacagaccatcagtgcaagcgaaagccctggtcccggtggcctcgcgtccctgggcaaacaccgacccaaaggtttctttgccactgagtcgagcttcgatccccaccaccgtgcccagccaagttacgagcgtccttctttcctgcctccaggacctgggttgatgctccggcaaaaatctatcggtgcggcagaagatgacagaccttacctagcacccccagccatgaaattcagccgcagcctgtctgtgcctggttcggaggacattcccccgccacccaccacgtccccaccggagcctccctacagcacacctccagtcccctcctcctcagggcgcctcaccccctcccctcggggagggcccttcaaccctggctctggtggccccctccccgcctcctcccctgcatcctttgacgggccctcccctcccgacactcgcgtggggagccgcgagaagagcctgtaccacagtgggcccctgcccccggcccaccaccacccgccccaccaccaccaccaccacgccccgccccctcagccccaccaccaccacgcccacccccctcatcctcccgagatggagacaggcggctctcccgacgaccctccaccccgcctggctctggggccccagcccagcctgcgaggctggaggggcggcgggcccagcccgaccccgggggccccgtccccatcgcaccacggcagcgcgggcgggggcggcggctcctcccagggcccggctctacgctatttccagctgcccccgcgggcggccagcgcagccatgtacgtgcccgcccgctcgggccgcggccgcaagggcccgctggtcaagcagaccaaggtggaaggcgagccccagaagggcggcggcctcccgcccgcgccgtcgcccacgtccccggcctccccgcagccgccgcccgccgtggccgcgccctcggagaagaactccatccccatccccaccatcatcatcaaggccccgtccaccagtagcagcggccgcagcagccagggcagcagcaccgaggcggagccccccacccagccggagcccacgggaggcggcggcggcggcggctcctcgcccagccccgccccggccatgtcacccgtgcccccgtccccctcgcccgtgcccacccccgcctcgcccagcggcccggccacgctggacttcacgagccagttcggggccgccctggtgggggcggcccggagggaggggggctggcagaatgaggcgcgccggcgctccacgctgttcctgtccaccgacgcgggggacgaggacggcggggacggcgggctgggcacaggggcggccccgggcccgcggctgcgccactccaaatccatcgacgagggcatgttctccgccgagccctacctccgactggagtctgcgggcagcggcgcgggctacggcggctacggggccggtagccgagcctacgggggtggcgggggcagcagcgccttcaccagcttcctgcccccgcgacccctggtgcacccgctgaccggcaaggccctggatcccgcctccccgctggggctggccctggccgcccgcgagcgagcgctgaaggagtcctcggagggcggcggggccccccagccgcctcccaggcccccatcgccccgctacgaggccccgccgcccaccccgcaccaccactcgccccacgcccaccacgagccagtgctgcgtctctggggggcctccccgccggaccctgcgcgccgggagctggggtacagggccgggctgggcagccaggagaagtcccttcccgccagcccgcccgccgcccggcgttccctgctacaccgcctgccgcccaccgctcccggggtggggcccctcctgctgcagctggggacggagcccccggccccgcaccccggagtaagcaagccctggaggtccgcagcccccgaagaacccgagcggctgccgctgcacgtgcggttccttgaaaactgccagccccgggcccctgtgacgagcggaaggggtcccccctcggaggacgggccgggggtcccgccgcccagcccacgccggtccgtgcccccctccccgacctccccgagggccagcgaagagaacgggctgcccctgctggtcctgccgcctcccgccccctcggtggatgtggaagatggcgaattccttttcgtggaaccgctgcctccgcctctggaattctccaacagcttcgaaaagccagagtcgcccctcacgcctgggcctccccacccgctgcccgacacacctgcccctgccaccccgttaccccctgtgccacccccggctgtggccgcagcccctcccaccctggactccaccgcatccagcctgacatcctatgacagcgaggtggccaccctgacccagggggcctccgccgctcctggggacccccatccaccaggcccgcctgccccagcagcaccggctcccgctgccccacagcctggcccggaccctccgcctggcacggattctggcatcgaggaggtggacagtcggagcagcagtgaccacccactggagaccatcagcagcgcctccacgctgagcagcctatctgccgaaggtggtggcagcgcagggggtgggggcggggctggggccggtgtggccagtgggccggagcttctggacacctatgtggcctacctggacggccaggcctttgggggcagcagtactcccggcccgccataccctcctcagctcatgactccctctaagctccggggccgggcgctaggagccagcggaggcctgcggcctggccccagcgggggactccgagaccctgttacccccaccagccccaccgtctcggtgacaggggctggaaccgatgggctgctggccctgcgtgcttgttcaggaccccccacggcaggcgtggcggggggtccggtggctgtagagccagaagtcccaccggtgcccttgccgacggcctcctctctgccccggaagctgctgccctgggaggagggcccgggcccaccgccaccacctctgcccgggcccttggcccagcctcaggcctcagccttggccacagtaaaagccagcatcatcagtgaactcagctccaagcttcagcagtttgggggctcctcggcagctggcggcgctctgccctgggcccgaggaggcagtgggggaggcggagacagccaccacgggggagccagctatgtccccgagaggacctcctccctgcagcggcagagactctccgacgactcccagtcctcactcctctccaagcctgtcagcagcctgtttcagaactggcccaaaccacctctgccgccactccccaccggaacaggggtctcccctacagccgctgcggccccaggggccacctcaccctcagcctcctcctcctccacgtccacccgccacctccagggcgtggagttcgagatgcggccccctctgctccgccgggcccccagcccctcgctgctgcccgcctcggagcacaaggtcagccctgcgcccaggccctcgtccctgcccatcctgccttccggacccctctacccaggcctctttgacatccgtggctccccaactggaggggcaggaggctcggctgaccccttcgccccagtctttgtgccgccacacccggggatatccggggggctcgggggagccttgtcaggggcctcgcgctccctctcaccgacccgcctgctctcgctgcccccggacaagccgtttggcgctaaacctctggggttctggaccaagttcgacgtggctgattggctggagtggctgggtttggcggagcaccgagcccagttcctggaccacgagatcgatggctcccacctgcccgccttgaccaaggaggactacgtcgatctaggtgtgaccagggtgggccaccgcatgaacatcgaccgggctctcaaattcttcctggagaggtgatggctggcctggacggaccagccccgtccacagaactcttgagcctgctggcctcttgacctctgacccctgactgtcattctctccccgggccagggactctgttcaaactgcgccctgccctcatctcccaaggcc

SEQ ID NO: 319798 - DNA, 663 bp, Artificial Sequence
  derived and/or modified sequence
atggatgaaaataatggcctgctgctgctggagctgaacccccccaacccctgggacctgcagcccaggagccctgaggagctggccttcggggaggtgcagatcacctacctgacccacgcctgcatggacctgaagctgggggacaagaggatggtgtttgacccctggctgattggccctgcctttgcccggggctggtggctgctgcacgagcccccaagtgactggctggagcggctgtgccaggccgacctgatctacatcagccacctgcacagcgaccacctgagctaccccaccctgaagaagctggccggccggcggccagacatccccatctacgtgggcaacacagagaggcctgtgttctggaacctgaaccagagcggcgtgcagctgaccaacatcaacgtggtgcccttcggcatctggcagcaggtggacaagaacctgcgcttcatgatcctgatggatggagtgcaccctgagatggacacctgcatcatcgtggagtacaagggccacaagatcctgaacatcgtggactgcacccggcccaacggcggccgcctgcccatgaaggtggccctgatgatgtctgactttgctgggggcgccagcggcttccccatgaccttcagcggcggcaagttcacctag

SEQ ID NO: 319799 - DNA, 681 bp, Artificial Sequence
  derived and/or modified sequence
atggatgaaaataatggcctgctgctgctggagctgaacccccccaacccctgggacctgcagcccaggagccctgaggagctggccttcggggaggtgcagatcacctacctgacccacgcctgcatggacctgaagctgggggacaagaggatggtgtttgacccctggctgattggccctgcctttgcccggggctggtggctgctgcacgagcccccaagtgactggctggagcggctgtgccaggccgacctgatctacatcagccacctgcacagcgaccacctgagctaccccaccctgaagaagctggccggccggcggccagacatccccatctacgtgggcaacacagagaggcctgtgttctggaacctgaaccagagcggcgtgcagctgaccaacatcaacgtggtgcccttcggcatctggcagcaggtggacaagaacctgcgcttcatgatcctgatggatggagtgcaccctgagatggacacctgcatcatcgtggagtacaagggccacaagatcctgaacatcgtggactgcacccggcccaacggcggccgcctgcccatgaaggtggccctgatgatgtctgactttgctgggggcgccagcggcttccccatgaccttcagcggcggcaagttcaccgctgaggagaccctcatctag

SEQ ID NO: 319800 - DNA, 318 bp, Artificial Sequence
  derived and/or modified sequence
atgtctcttaaaagctggcatccgcagtctaaaaccaagagagtaggcgcttcggaaggtaaccctcaatggggatccgggtctatggaggcaccgctgctctcatcattcctgccacccctggcgtcggaggccgaactgacaggaaacacctggttcctacaccgatgcagttgcatccttaacctcgaagagagcatggactctgactggggcgcttggtggggcgtgagcctgcctaggcgagccccattcctcatatacggtagtgatggaccatggtgtacgcaggctggcttccctgggtgggggcattag

SEQ ID NO: 319801 - protein, 113 aa, Artificial Sequence
  derived and/or modified sequence
MQKVTLGLLVFLAGFPVLDANDLEDKNSPFYYDWHSLQVGGLICAGVLCAMGIIIVMSEWRSSGEQAGRGWGSPPLTTQLSPTGAKCKCKFGQKSGHHPGETPPLITPGSAQS

SEQ ID NO: 319802 - protein, 96 aa, Artificial Sequence
  derived and/or modified sequence
MQKVTLGLLVFLAGFPVLDANDLEDKNSPFYYDWHSLQVGGLICAGVLCAMGIIIVMSEWRSSGEQAGRGWGSPPLTTQLSPTGAKCKCKFGQKSG

SEQ ID NO: 319803 - DNA, 1320 bp, Artificial Sequence
  derived and/or modified sequence
aggtttgcttagggcgtggcagcttcggataaacgcaggactccgcctggcagcccgatttctcccggaacctctgctcagcctggtgaaccacacaggccagcgctctgacatgcagaaggtgaccctgggcctgcttgtgttcctggcaggctttcctgtcctggacgccaatgacctagaagataaaaacagtcctttctactatgactggcacagcctccaggttggcgggctcatctgcgctggggttctgtgcgccatgggcatcatcatcgtcatgagtgagtggaggagctcgggggagcaggcgggccggggctggggctcccctcccctgaccactcagctctccccaacaggtgcaaaatgcaaatgcaagtttggccagaagtccggtcaccatccaggggagactccacctctcatcaccccaggctcagcccaaagctgatgaggacagaccagctgaaattgggtggaggaccgttctctgtccccaggtcctgtctctgcacagaaacttgaactccaggatggaattcttcctcctctgctgggactcctttgcatggcagggcctcatctcacctctcgcaagagggtctctttgttcaattttttttaatctaaaatgattgtgcctctgcccaagcagcctggagacttcctatgtgtgcattggggtggggcttggggcaccatgagaaggttggcgtgccctggaggctgacacagaggctggcactgagcctgcttgttgggaaaagcccacaggcctgttcccttgtggcttgggacatggcacaggcccgccctctgcctcctcagccatgggaacctcatatgcaatttgggatttactagtagccaaaaggaatgaaagagagctctaaccagatggaacactggaacattccagtggaccctggaccattccaggaaaactgggacataggatcgtcccgctatgatggaagtgttcagacagtttataatagtaagcccctgtgaccctctcacttaccccgagacctcactttattacaagatctttccaaatacccaaatgtccctgcaagcccgttaaataattccctatgctacccttaataacatacaatgaccacatagtgtgagaacttccaacaagcctcaaagtcccttgagactccccaatacctaataaggcatgcgaaatgttctcatgaactaccccacaacacgcctaaaactcaaaacacccaaaaatatctcctccaatgtcctgaaacatgaacccaaaaagagacccacaataaactcgtgacttgtcccctc

SEQ ID NO: 319804 - DNA, 778 bp, Artificial Sequence
  derived and/or modified sequence
cgctagcatcttctgctgatcctgaaattgtaccagcggcaagatgtggcctggaaggggactttaagttctccacaactgccagcaatccttccaccaggcaaaacacatcatctaaggaaaagaagtgaggtttgcttagggcgtggcagcttcggataaacgcaggactccgcctggcagcccgatttctcccggaacctctgctcagcctggtgaaccacacaggccagcgctctgacatgcagaaggtgaccctgggcctgcttgtgttcctggcaggctttcctgtcctggacgccaatgacctagaagataaaaacagtcctttctactatgactggcacagcctccaggttggcgggctcatctgcgctggggttctgtgcgccatgggcatcatcatcgtcatgagtgagtggaggagctcgggggagcaggcgggccggggctggggctcccctcccctgaccactcagctctccccaacaggtgcaaaatgcaaatgcaagtttggccagaagtccgggtaagatactgttccggcatgcccgcctcaggctgactggacgcttttcagggtgaaagggctaactctcccagcaggagaggcctcggggctctgccctttagagttcctgccgctaagatttccaggtttattgtttctagctggtaatccccagggggccccaaatcctgaaatgctttggcccctgggattgcacaaccccccaaatggaaaggcagccaggaagacatgtctgggcaggctaag

SEQ ID NO: 319805 - protein, 602 aa, Artificial Sequence
  derived and/or modified sequence
MVHSSMGAPEIRMSKPLEAEKQGLDSPSEHTDTERNGPDTNHQNPQNKTSPFSVSPTGPSTKIKAEDPSGDSAPAAPLPPQPAQPHLPQAQLMLTGSQLAGDIQQLLQLQQLVLVPGHHLQPPAQFLLPQAQQSQPGLLPTPNLFQLPQQTQGALLTSQPRAGLPTQAVTRPTLPDPHLSHPQPPKCLEPPSHPEEPSDLEELEQFARTFKQRRIKLGFTQGDVGLAMGKLYGNDFSQTTISRFEALNLSFKNMCKLKPLLEKWLNDAETMSVDSSLPSPNQLSSPSLGFDGLPGRRRKKRTSIETNVRFALEKSFLANQKPTSEEILLIAEQLHMEKEVIRVWFCNRRQKEKRINPCSAAPMLPSPGKPASYSPHMVTPQGGAGTLPLSQASSSLSTTVTTLSSAVGTLHPSRTAGGGGGGGGAAPPLNSIPSVTPPPPATTNSTNPSPQGSHSAIGLSGLNPSTGSTMVGLSSGLSPALMSNNPLATIQALASGGTLPLTSLDGSGNLVLGAAGAAPGSPGLVTSPLFLNHAGLPLLSTPPGVGLVSAAAAAVAASISSKSPGLSSSSSSSSSSSSSTCSETAAQTPGGPGGPEAGSKPE

SEQ ID NO: 319806 - DNA, 1809 bp, Artificial Sequence
  derived and/or modified sequence
atggtccatagttccatgggcgcaccagaaatacgcatgagcaaacccctggaggctgagaaacaggggctggatagccccagcgagcacaccgatactgaaaggaacggacccgacaccaatcatcagaatccacaaaacaaaaccagcccattcagcgtctctcctacggggccgtctacaaaaattaaagccgaagaccctagtggcgactcagctcctgcagcccctctacccccacagcccgctcagccacatctcccacaggcccagctgatgttgaccggttcccagcttgccggagatatccagcaattactccagctacagcagttagtgttggtgccaggccaccaccttcagccccccgcccagttcctgctgcctcaggcccagcaatcacagcctgggttactccctactcctaatctgtttcagctcccccagcagacgcagggagcccttttaactagccagccacgggccggcctcccaacccaggctgtaacacgccccacattgcctgatccccacctgtcccatccccaaccgcccaagtgtctggaaccaccaagccacccagaagaaccctctgacctggaagaactcgaacaattcgcgagaacattcaaacagcggaggattaagttaggtttcacacagggggatgtgggcctggcaatgggaaaactctacggcaatgatttttctcagacgacgatcagtaggtttgaggccctgaatctgtcatttaagaatatgtgtaagttaaagcccctgctggaaaagtggctcaacgatgcggagacgatgtccgtggattctagtctaccttcccccaaccagctgagcagcccgagcctgggatttgatggcttgccgggacgcaggcgcaaaaagaggacatcaatagagaccaacgttagatttgccctggaaaagagctttctggcgaatcagaagccgacaagcgaagaaatactgctgatcgccgaacagctgcacatggagaaagaggtcatcagggtgtggttctgcaatagaagacagaaggagaaacgaattaacccctgttccgccgcccccatgctgccttcccctgggaaaccagcaagttactctccacatatggttaccccacaggggggtgccggcactctgcccttatcccaggcctcttcttcgttatccacaacagtcactacactgagctcggccgtgggaacattgcatccctcacgaacggctggcggcggcggtggcggcgggggcgcagcaccgccgctcaacagcattcctagcgtcactcctccccctcctgccactacaaacagtacgaacccatcgccgcaggggtctcatagtgcaataggcctttctggtctgaatccatccaccggctcgactatggtgggcctttctagtggactgtcgcctgccctgatgagcaacaaccccttggctacaatccaggcgctcgcctccggtggcacactcccattaactagcttggatggtagcggcaaccttgtgcttggggccgccggcgccgctccagggtcaccaggcttggtcacctctcctctgttcctgaaccacgccggtttgccactgttatctacccccccaggggtagggcttgttagcgcagctgcggccgctgtggctgcgtctattagcagtaaatctcctggcctgagtagttcctcctcctcctcttcttctagctccagttccacttgttctgaaacggcggcccagactccaggcggacccggtggcccggaagcaggaagcaaaccagagtag

SEQ ID NO: 319807 - DNA, 1809 bp, Artificial Sequence
  derived and/or modified sequence
atggtgcacagctccatgggcgcccctgagatccgcatgagcaagcccctggaggccgagaagcagggcctggacagccccagcgagcacacagacacagaaagaaatggaccagacaccaaccaccagaacccccagaacaagaccagccccttctctgtgagccccaccggccccagcaccaagatcaaggccgaggaccccagcggggacagcgccccagctgcccccctgcccccccagcctgcccagccccacctgccccaggcccagctgatgctgaccggcagccagctggccggggacatccagcagctgctgcagctgcagcagctggtgctggtgcccggccaccacctgcagcccccagcccagttcctgctgccccaggcccagcagagccagcccggcctgctgcccacccccaacctcttccagctgccccagcagacccagggcgccctgctgaccagccagccccgggccggcctgcccacccaggccgtgacccggcccaccctgcctgacccccacctgagccacccccagccccccaagtgcctggagccccccagccaccctgaggagcccagcgacctggaggagctggagcagtttgcccggaccttcaagcagaggcgcatcaagctgggcttcacccagggagatgtgggcctggccatgggcaagctgtatggaaatgacttcagccagaccaccatcagcagatttgaggccctgaacctgtccttcaagaacatgtgcaagctgaagcccctgctggagaagtggctgaatgatgctgagaccatgtctgtggacagcagcctgcccagccccaaccagctgagcagccccagcctgggctttgatggcctgcccggcagaagaaggaagaagaggaccagcattgagaccaacgtgcgctttgccctggagaagagcttcctggccaaccagaagcccaccagcgaggagatcctgctgattgctgagcagctgcacatggagaaggaggtgatccgggtgtggttctgcaacagacggcagaaggagaagaggatcaacccctgcagcgctgcccccatgctgcccagccctgggaagccagccagctacagcccccacatggtgaccccccagggcggggccggcaccctgcccctgagccaggccagcagcagcctgagcaccaccgtgaccaccctgagcagcgctgtgggcaccctgcaccccagcaggacagctgggggcggcggcggcggcggcggggccgccccacccctgaacagcatccccagcgtgaccccacctcctccagccaccaccaacagcaccaaccccagcccccagggcagccacagcgccatcggcctgagcggcctgaaccccagcacaggcagcaccatggtgggcctgagcagcggcctgagccctgccctgatgagcaacaaccccctggccaccatccaggccctggccagcggcggcaccctgcccctgaccagcctggatggcagcggcaacctggtgctgggcgctgctggagctgcccctggcagccctggcctggtgaccagccccctcttcctgaaccacgccggcctgcccctgctgagcaccccacctggggtgggcctggtgtctgctgctgctgctgctgtggccgccagcatcagcagcaagagccctggcctgagcagcagcagcagcagcagcagcagcagcagcagcagcacctgcagcgagacagctgcccagaccccaggcggccctgggggccctgaggccggcagcaagccagagtag

SEQ ID NO: 319808 - DNA, 1809 bp, Artificial Sequence
  derived and/or modified sequence
atggtgcacagcagcatgggcgcccccgagatccggatgagcaagcctctggaagccgagaagcagggactggattctccgagcgaacacactgacactgaaagaaacggaccagacactaaccaccaaaatccccagaacaagacctctcctttttccgtctcaccaaccggcccgtcaacaaaaatcaaggcggaggatccttctggcgattctgcaccggctgctcctctgccacctcaaccagcccagccccacctgccacaagcccagctcatgctgacaggctcccagctggccggtgacatccaacagctgctgcaattacagcagcttgtgctggtgcccggccatcatctgcagccccctgcgcagttcctattgccacaagcccagcaatctcagccaggcctccttcctacaccaaatttattccagctcccgcagcagacacaaggtgccctcctgacaagccaaccacgcgcaggtctgcccacgcaggccgttacacgaccgaccctgccagacccccacctgtcccaccctcaaccccccaaatgcctggagccgccctcccatccagaagagccaagcgatctcgaagagctagagcaattcgcacgcacttttaagcaacggcggatcaaactgggcttcacacagggcgacgtcggcttagcaatgggaaaattgtatggaaacgacttctcccagactactatcagcagatttgaggccctgaatctcagtttcaaaaacatgtgtaagctgaaaccattgctagaaaagtggctcaacgatgctgaaacgatgtctgttgattcctcactgccctcccctaaccaactgagcagcccctcactgggattcgacggcctgccagggaggcgccgcaaaaagcgcacctccattgagaccaatgtgaggtttgccttggagaaatcattcctggctaaccagaagcctactagcgaagagatacttctcatcgctgaacagttgcacatggagaaagaagtcataagagtgtggttctgtaatcgaaggcaaaaggaaaagcgcataaatccctgttccgctgctcccatgttaccttcccccgggaaacccgcttcttattccccacatatggtgaccccccaagggggcgccggcaccctgcctctctcccaggcctcaagctccctatcgacaaccgttaccacactcagttctgctgtgggaaccctccacccttcaagaactgccggcggcgggggcggagggggaggggctgcgccccctcttaattccatccccagtgtgaccccaccgccacctgcgaccacaaactccaccaacccctcaccgcaagggagccattctgcaatcggcctcagcggtctcaatcctagcactgggtcgaccatggtcggactttcgagcggtctgagtcccgcgctgatgtctaacaatccgctggctacgattcaggctctggcctctggagggacattgccccttacgagtttagacggcagcggtaacctagtcctgggggccgccggtgcggctcccggctcaccgggactggtgacatcacctctgtttttgaatcacgccggacttccgctactgtctacgccccctggggtaggactggtgagcgccgcagccgcagccgtcgccgcatcaatctcttctaagagccctggtctgagcagcagcagctcaagtagtagctcttcctcatctagcacctgttcagaaacagccgcacagactccgggtggaccaggcggtcccgaagctggcagtaagcccgagtag

SEQ ID NO: 319809 - DNA, 4610 bp, Artificial Sequence
  derived and/or modified sequence
ggctcggcccccagagagggtggggagatgacacagttgttcccccagccctggcggggcgggcagcatggttcactccagcatgggggctccagaaataagaatgtctaagcccctggaggccgagaagcaaggtctggactccccatcagagcacacagacaccgaaagaaatggaccagacactaatcatcagaacccccaaaataagacctccccattctccgtgtccccaactggccccagtacaaagatcaaggctgaagaccccagtggcgattcagccccagcagcacccctgccccctcagccggcccagcctcatctgccccaggcccaactcatgttgacgggcagccagctagctggggacatacagcagctcctccagctccagcagctggtgcttgtgccaggccaccacctccagccacctgctcagttcctgctaccgcaggcccagcagagccagccaggcctgctaccgacaccaaatctattccagctacctcagcaaacccagggagctcttctgacctcccagccccgggccgggcttcccacacaggccgtgacccgccctacgctgcccgacccgcacctctcgcacccgcagccccccaaatgcttggagccaccatcccaccccgaggagcccagtgatctggaggagctggagcaattcgcccgcaccttcaagcaacgccgcatcaagctgggcttcacgcagggtgatgtgggcctggccatgggcaagctctacggcaacgacttcagccagacgaccatttcccgcttcgaggccctcaacctgagcttcaagaacatgtgcaaactcaagcccctcctggagaagtggctcaacgatgcagagactatgtctgtggactcaagcctgcccagccccaaccagctgagcagccccagcctgggtttcgacggcctgcccggccggagacgcaagaagaggaccagcatcgagacaaacgtccgcttcgccttagagaagagttttctagcgaaccagaagcctacctcagaggagatcctgctgatcgccgagcagctgcacatggagaaggaagtgatccgcgtctggttctgcaaccggcgccagaaggagaaacgcatcaacccctgcagtgcggcccccatgctgcccagcccagggaagccggccagctacagcccccatatggtcacaccccaagggggcgcggggaccttaccgttgtcccaagcttccagcagtctgagcacaacagttactaccttatcctcagctgtggggacgctccaccccagccggacagctggagggggtgggggcgggggcggggctgcgccccccctcaattccatcccctctgtcactcccccacccccggccaccaccaacagcacaaaccccagccctcaaggcagccactcggctatcggcttgtcaggcctgaaccccagcacgggaagcacaatggtggggttgagctccgggctgagtccagccctcatgagcaacaaccctttggccactatccaagccctggcctctggtggaaccctgccccttaccagccttgatggcagcgggaatctggtgctgggggcagccggtgcagccccggggagccctggcctggtgacctcgccgctcttcttgaatcatgctgggctgcccctgctcagcaccccgcctggtgtgggcctggtctcagcagcggctgcggctgtggcagcctccatctccagcaagtctcctggcctctcctcctcatcctcttcatcctcatcctcctcctcctccacttgcagcgagacggcagcacagacccctggaggtccaggggggcccgaggcagggtccaaacctgagtgagggccagccatgcctcccctcccattcctctggtccctgccttggtcccttgcctgggaagagggcgaggaggccagtggtggggacgcagagggtcctcagagcaggagtgacaagggaggaaagaccaaaaaaacaaccaaccaaaaaaaaaaaaaaaaaggaaagaaactaaccaacaaaagagaaaaccaaaaataatcacaacagaaaccagctgccccaaaggaaccagaggtgaaaaacaaacaaaaaaaaaccaaaaacaaaccaaaaaaaaaaaaaacccacaaaatcaaacaaaccaaaaaaccagtcgcgagccagacctcagcgtgctcaccctcactgctacgacgccaaataaaaaccccagccaggggcggagaagcctccagcaggtcagacctcatgccaccgagccctggctgtgggaccaacccccaaccctgcctcccccgtgggggctacagaaggaaaaagagaagatgccagcttcctaatcccagcccccagccctgggccagcgaagacagggcacagcctgggcagatgggctggggcttagcaccacccaccaaatgttcttttccagaaggtgaaagagaaagggcctgaacaaccttacaccaaatattcagtagcttcatccaaaggatgtacagaatttttagcattgtgctcaacagaatgtgtccctaccatgtgtccccttctcccctggcccccagctctccccacctgggcagggggtcttgctttaacctcctccctccccccagcaggggagagttcaagggaaggcctgcggacaacttttcatcccctgttcctccctcttttcccctttgaagggtgggctaggccattttgccaagttctagctctcacaagtccctcctcaaccctgtcaccctcctctgctctggaactgactccctccccagcctatgggaaggtggaaatttcaggcaagaggggatgaagacattcagttgagggcattcagttgtctttttccatcctgtctgtttccctgaaaaaaaaaaaaattcatattccagtgcctatccgtgggatccttcacgttctttgacattaaccagaaaccaaaaagagaactcacctcgcttttcccaccctgtgcccctctggtactggcgaatgcctctccctccccccacatgcacgcacgcacacaccccagtggtggggttcctcgagatggcatccccatcagggtccatgtggtggggacagtgccacagcctgtggtccccatctgagagggcgcggtggtggccaccactcccacaagacctccacaactcttggctggaccctgtgtttgaccagccccggacacgtctccactgacgacggacagaggagagacaccactgggagccaccctgccctcctgctattgtggaggccaacaaagttttgaaccgaaaaccaaaaaaacagaaacaaacaaacaataaatttaaactagaaaaaaaatttatatatatatataaacatatatatatatatatatataaaagggaaagaagatgaggactcttcaagaataagatggaaccgcgaggcggagccaagcccctgcaccggtggtccaggcccttgttccccaaggcggatggaaggacggatgcttctttctcttcacaaatacctcatggacgttgtctttgggaaagccggagggggcggctggggcagggcctgtccctcggccagggcagatggaagcgggtgggcggggctgagagagggtatcagggacaggggtgaagagccccaaactcccctcccaaatcaactgaaaaagctttaaaaaaagacaggaaaaaaaggagtaagaaagcaaaaagaacagatgaaggaaaacttaacaacttttgggtggtttgattcctcctttgatttctttttcggttctcttttgtctgacctctctcctcccctccttcctctctcctcccctccttcctctctcctctcctccttcctgtctcctctctctccctttgctctcctctcttctctctcaatcttgttctttctgtgtctctcctcaaaccaaagtgttgcagtgaaggacacgagccattgaaatcagggtggggcctgacagccgtagtgtggcccctgccccttgttgggcaggagcagagagagaggagagccctgagaccgcagggctttggcctgggcagcttccactttctgccggacactctgaggagaggcagatggagctccaggcctcagcgttctcttttttccttgtctcccttctcccacccgggaaatgaaactgttgggctgggcgacggaggcagcagagactcggccattgcaggggcctctgggtgccttgtccgggcagtggtgaagtagccgcccctcccaccccggcacgatggggcctggcacctcgtctacccaacctcaccggaatgtaagcatctccgctgaacgactccctgcccttaccctacctctgagtttgtccatgtttatttcctgaagagagaagggactggcaagagggcttgggccccagcccaagggtggagagggggccaagggctcctgaccaaataggaaggacatttgagcagagcaaaatgaaaggaattacaaccaaaaaccccctccgagaagacaggcagcatggaaggcatggtggagatgactcaaacaaaaactatgattctagacc

SEQ ID NO: 319810 - DNA, 1809 bp, Artificial Sequence
  derived and/or modified sequence
atggtccactcgtcaatgggagcccctgagattaggatgagcaagcccttggaggctgagaaacaggggttggattctccatctgagcacaccgatacagagcgcaacgggccagatactaaccaccagaacccacagaataagacatcccctttctctgtctccccaaccggtccatcaacaaaaatcaaggctgaagaccccagtggcgactcagctcctgctgctccactgcctccccagcccgctcagccacatctccctcaagcgcaactcatgcttacaggcagccaactggcaggcgacattcagcaactgctgcagcttcaacagctggtcttggtgcccggacaccatttgcagccgccagcacagttcctactgccacaggcccaacagagccagcccggacttttgcctacacccaacttgttccaactaccccagcagactcagggagctttgctcacctcccagcctagggccggacttccaacacaagccgtgacacggcctacgctgcccgacccccatctgtcacatcctcagcctccgaaatgtttggagccaccaagccaccctgaggagcctagcgacttagaggaactggagcaatttgctcgcacttttaagcagagaaggattaagctggggttcactcaaggcgatgtggggctggcaatggggaagttgtacgggaacgatttcagtcagactacaatcagtaggtttgaggcactcaacttgagtttcaaaaatatgtgtaagctgaagcctcttctggagaagtggctgaatgatgccgagactatgtccgtggatagcagcctgcctagtcctaatcagctttctagtccttctttaggctttgatggcttgccagggcgaagaaggaaaaaacgaacctctattgagacgaatgtaaggtttgctctggagaaaagcttcttggctaaccaaaaacctacttccgaagagatcctgctgattgccgagcagcttcacatggaaaaggaagtgatcagagtgtggttctgcaacaggcgccagaaagagaaacgaataaacccctgctcggctgcgcctatgctaccgtctcccggtaaacctgcctcatactcacctcacatggtgactcctcaaggcggagccggaacacttcccctttcacaagcatccagcagccttagcaccacggtgacaacactgtcctctgccgttgggacactgcatccttcccgcaccgctggcggaggcggaggaggtggtggcgctgcacctcctctgaactctatcccgagtgttacgccacctcccccagccacaactaacagcacaaacccatcaccccaaggctctcattccgctattggcttgtccgggctcaatccttcaacaggctctaccatggtgggtctgagttctggcctgtctccagccttgatgtccaacaatcccctggcgaccattcaggcacttgctagtggagggacacttcccctcacgtcgcttgacggttcgggaaacctagtgctaggcgcagcaggcgcagcccctggttccccgggactcgttacctcccccctttttcttaatcacgctgggcttccgctgctgtctacccctcctggagttggactcgtatctgctgctgctgctgcagtcgccgcttctattagcagcaaaagtccaggactgtcatccagtagttctagctcaagttcctccagcagctccacttgttccgagactgccgctcagacacctggcggacctgggggtcccgaggccggaagcaagcccgagtag

SEQ ID NO: 319811 - DNA, 1809 bp, Artificial Sequence
  derived and/or modified sequence
atggtgcacagcagcatgggcgcccccgagatcagaatgagcaagcccctggaggccgagaagcagggcctggacagccccagcgagcacaccgacaccgagagaaacggccccgacaccaaccaccagaacccccagaacaagaccagccccttcagcgtgagccccaccggccccagcaccaagatcaaggccgaggaccccagcggcgacagcgcccccgccgcccccctgcccccccagcccgcccagccccacctgccccaggcccagctgatgctgaccggcagccagctggccggcgacatccagcagctgctgcagctgcagcagctggtgctggtgcccggccaccacctgcagccccccgcccagttcctgctgccccaggcccagcagagccagcccggcctgctgcccacccccaacctgttccagctgccccagcagacccagggcgccctgctgaccagccagcccagagccggcctgcccacccaggccgtgaccagacccaccctgcccgacccccacctgagccacccccagccccccaagtgcctggagccccccagccaccccgaggagcccagcgacctggaggagctggagcagttcgccagaaccttcaagcagagaagaatcaagctgggcttcacccagggcgacgtgggcctggccatgggcaagctgtacggcaacgacttcagccagaccaccatcagcagattcgaggccctgaacctgagcttcaagaacatgtgcaagctgaagcccctgctggagaagtggctgaacgacgccgagaccatgagcgtggacagcagcctgcccagccccaaccagctgagcagccccagcctgggcttcgacggcctgcccggcagaagaagaaagaagagaaccagcatcgagaccaacgtgagattcgccctggagaagagcttcctggccaaccagaagcccaccagcgaggagatcctgctgatcgccgagcagctgcacatggagaaggaggtgatcagagtgtggttctgcaacagaagacagaaggagaagagaatcaacccctgcagcgccgcccccatgctgcccagccccggcaagcccgccagctacagcccccacatggtgaccccccagggcggcgccggcaccctgcccctgagccaggccagcagcagcctgagcaccaccgtgaccaccctgagcagcgccgtgggcaccctgcaccccagcagaaccgccggcggcggcggcggcggcggcggcgccgccccccccctgaacagcatccccagcgtgaccccccccccccccgccaccaccaacagcaccaaccccagcccccagggcagccacagcgccatcggcctgagcggcctgaaccccagcaccggcagcaccatggtgggcctgagcagcggcctgagccccgccctgatgagcaacaaccccctggccaccatccaggccctggccagcggcggcaccctgcccctgaccagcctggacggcagcggcaacctggtgctgggcgccgccggcgccgcccccggcagccccggcctggtgaccagccccctgttcctgaaccacgccggcctgcccctgctgagcaccccccccggcgtgggcctggtgagcgccgccgccgccgccgtggccgccagcatcagcagcaagagccccggcctgagcagcagcagcagcagcagcagcagcagcagcagcagcacctgcagcgagaccgccgcccagacccccggcggccccggcggccccgaggccggcagcaagcccgagtag

SEQ ID NO: 319812 - DNA, 2583 bp, Artificial Sequence
  derived and/or modified sequence
atgctgaccagaatcgagaacgccacccaggcccagctgccctgcctgctggtggccggcagcggcggcgccgccgactgcctggccgagaccctggaggacaccctggcccccggcagcggcggcgccagacagggcgaggccagagacagaatcagaagattcttccccaagggcgacctggaggtgctgcaggcccagagcttccacctggaggccagcctgatggacgccctgctgaacgacagacccgagttcgtgagactgctgatcagccacggcctgagcctgggccacttcctgacccccatgagactggcccagctgtacagcgccgcccccagcaacagcctgatcagaaacctgctggaccaggccagccacagcgccggcaccaaggcccccgccctgaagggcggcgccgccgagctgagaccccccgacgtgggccacgtgctgagaatgctgctgggcaagatgtgcgcccccagataccccagcggcggcgcctgggacccccaccccggccagggcttcggcgagagcatgtacctgctgagcgacaaggccaccagccccctgagcctggacgccggcctgggccaggccccctggagcgacctgctgctgtgggccctgctgctgaacagagcccagatggccatgtacttctgggagatgggcagcaacgccgtgagcagcgccctgggcgcctgcctgctgctgagagtgatggccagactggagcccgacgccgaggaggccgccagaagaaaggacctggccttcaagttcgagggcatgggcgtggacctgttcggcgagtgctacagaagcagcgaggtgagagccgccagactgctgctgagaagatgccccctgtggggcgacgccacctgcctgcagctggccatgcaggccgacgccagagccttcttcgcccaggacggcgtgcagagcctgctgacccagaagtggtggggcgacatggccagcaccacccccatctgggccctggtgctggccttcttctgcccccccctgatctacaccagactgatcaccttcagaaagagcgaggaggagcccaccagagaggagctggagttcgacatggacagcgtgatcaacggcgagggccccgtgggcaccgccgaccccgccgagaagacccccctgggcgtgcccagacagagcggcagacccggctgctgcggcggcagatgcggcggcagaagatgcctgagaagatggttccacttctggggcgcccccgtgaccatcttcatgggcaacgtggtgagctacctgctgttcctgctgctgttcagcagagtgctgctggtggacttccagcccgccccccccggcagcctggagctgctgctgtacttctgggccttcaccctgctgtgcgaggagctgagacagggcctgagcggcggcggcggcagcctggccagcggcggccccggccccggccacgccagcctgagccagagactgagactgtacctggccgacagctggaaccagtgcgacctggtggccctgacctgcttcctgctgggcgtgggctgcagactgacccccggcctgtaccacctgggcagaaccgtgctgtgcatcgacttcatggtgttcaccgtgagactgctgcacatcttcaccgtgaacaagcagctgggccccaagatcgtgatcgtgagcaagatgatgaaggacgtgttcttcttcctgttcttcctgggcgtgtggctggtggcctacggcgtggccaccgagggcctgctgagacccagagacagcgacttccccagcatcctgagaagagtgttctacagaccctacctgcagatcttcggccagatcccccaggaggacatggacgtggccctgatggagcacagcaactgcagcagcgagcccggcttctgggcccacccccccggcgcccaggccggcacctgcgtgagccagtacgccaactggctggtggtgctgctgctggtgatcttcctgctggtggccaacatcctgctggtgaacctgctgatcgccatgttcagctacaccttcggcaaggtgcagggcaacagcgacctgtactggaaggcccagagatacagactgatcagagagttccacagcagacccgccctggccccccccttcatcgtgatcagccacctgagactgctgctgagacagctgtgcagaagacccagaagcccccagcccagcagccccgccctggagcacttcagagtgtacctgagcaaggaggccgagagaaagctgctgacctgggagagcgtgcacaaggagaacttcctgctggccagagccagagacaagagagagagcgacagcgagagactgaagagaaccagccagaaggtggacctggccctgaagcagctgggccacatcagagagtacgagcagagactgaaggtgctggagagagaggtgcagcagtgcagcagagtgctgggctgggtggccgaggccctgagcagaagcgccctgctgccccccggcggcccccccccccccgacctgcccggcagcaaggactag

SEQ ID NO: 319813 - DNA, 2583 bp, Artificial Sequence
  derived and/or modified sequence
atgctgactagaattgaaaacgctacacaggcccaactgccatgcttgctcgtcgcggggagtggaggggcagcagactgcctcgctgagactttggaagatactctcgcccctggtagtggaggagcacgccagggtgaggcgcgggaccgcattcgaaggttttttcccaagggggatttggaggtactacaggcccagtccttccacctggaggcttctttaatggacgcccttttgaacgataggcctgaatttgtgcgacttctgatatcgcatggcttgtcactgggtcattttctgacccctatgagactggcccagctgtattcagccgcaccaagcaatagtctcattcggaacctgttggatcaagccagtcatagcgctgggacgaaggccccagctctcaagggaggcgccgccgaactgcgcccaccagatgtgggacacgtgctccgaatgctcctcggcaaaatgtgtgcacctaggtatccctccggaggggcatgggaccctcatccgggacagggatttggtgagtcaatgtacctgctgtccgacaaagcaactagtccgctctccctagacgccggcttgggacaggctccttggtctgatcttctgctctgggctcttctcctgaacagagcccaaatggctatgtatttttgggagatgggtagcaatgcggtttcctcagccctgggggcgtgtctacttctacgtgtcatggcgcgcctcgaacctgatgctgaagaagccgcccgtcgcaaagatctcgccttcaagtttgaagggatgggtgttgatctgttcggagaatgctatcgcagctccgaggtccgtgcagcacgactcctgcttcgaaggtgccccctgtggggcgatgcaacctgcctgcagcttgctatgcaagccgatgctagggccttttttgcccaagacggagtgcaatcactgctcacacaaaaatggtggggagacatggcttcgacaaccccaatttgggcactcgtgttagctttcttctgcccacctttgatctacacacggctgatcactttcaggaaaagcgaagaggagccaacgcgagaggaactggagtttgatatggattctgtcattaacggggaggggcctgtaggcacggctgatccagctgagaaaaccccattgggcgtgccacggcagtcaggccgcccagggtgttgcggcggccgatgtggagggagaaggtgtctgcgtaggtggttccacttctggggggctcctgttaccatctttatggggaacgtagtgtcctatttgctgtttttactcttgttttcacgtgtgctgctggtcgatttccaacccgcgcctccgggtagtttagagctcctactatacttttgggcttttactctactgtgcgaggagctacggcaaggcctgtctggtggaggtggctcactcgcctctggtggcccgggccccggccacgcaagccttagccagcggctgcgcttgtacctggccgactcttggaatcagtgcgatctagtagctctgacttgcttcctgctcggggtgggatgtaggctcacacctgggctctaccacctgggaagaaccgtgctgtgcatcgactttatggtgttcaccgtgcggcttttacacatatttaccgtaaataaacagctgggtcccaagatcgttatcgtgagtaaaatgatgaaagatgtgttcttcttcctattcttcctgggcgtgtggttggtggcttacggggtggccacagaagggctgctccgaccccgcgatagcgactttccttcaattctgagacgcgttttctatcgcccttacctgcagatttttggtcagattcctcaggaagacatggatgtggcattgatggagcactcaaactgttcttctgagcctgggttctgggcccaccctcccggagctcaagccggcacctgcgtctcccagtacgctaattggctcgtggttttacttttggtgattttcctcctcgtggctaacatcttgctagtgaatttgttgatcgccatgtttagctacaccttcggtaaggtacagggcaactctgacctctactggaaagcccaaagatatcggctaatccgggagttccacagcagaccggcgctcgctccaccattcatcgtgatcagtcacctgagactgcttctgaggcagctgtgtcggcgcccccgctctccccagccctcctcacccgcgcttgagcacttccgagtgtatctttctaaggaggcagagcgaaagttgctgacctgggagtctgtgcacaaagagaactttcttcttgcccgtgcgagggataagagggaatctgacagcgagcggctgaaaagaacatcccaaaaggtcgacctggctctgaaacaactgggccacatacgcgagtatgagcagagactcaaggtgctggaaagagaggtgcagcaatgctccagggttttgggttgggttgccgaagctctgagtcgtagcgccctgttgcccccaggtggcccccctcccccagacctgcccggcagtaaagactag

SEQ ID NO: 319814 - DNA, 2583 bp, Artificial Sequence
  derived and/or modified sequence
atgctgaccagaattgaaaatgccacccaggcccagctgccctgcctgctggtggccggcagcggcggcgctgctgactgcctggccgagaccctggaggacaccctggcccctggcagcggcggggcccggcagggcgaggcccgggaccgcatccgccgcttcttccccaagggggacctggaggtgctgcaggcccagagcttccacctggaggccagcctgatggatgccctgctgaatgacaggcctgagtttgtgcggctgctgatcagccacggcctgagcctgggccacttcctgacccccatgaggctggcccagctgtacagcgctgcccccagcaacagcctcatccggaacctgctggaccaggccagccacagcgctggcaccaaggccccagccctgaagggcggcgctgctgagctgcggcccccagatgtgggccacgtgctgaggatgctgctgggcaagatgtgtgccccccgctaccccagcggcggggcctgggacccccaccctggccagggctttggagagagcatgtacctgctgagtgacaaggccaccagccccctgagcctggatgctggcctgggccaggccccctggagcgacctgctgctgtgggccctgctgctgaacagagcccagatggccatgtacttctgggagatgggcagcaatgctgtgagcagcgccctgggcgcctgcctgctgctgcgggtgatggcccggctggagccagatgctgaggaggccgcccggaggaaggacctggccttcaagtttgagggcatgggcgtggacctgtttggagagtgctaccgcagcagcgaggtgcgggccgcccggctgctgctgcggcgctgccccctgtggggagatgccacctgcctgcagctggccatgcaggctgatgcccgggccttctttgcccaggatggagtgcagagcctgctgacccagaagtggtggggagacatggccagcaccacccccatctgggccctggtgctggccttcttctgccccccactcatctacaccaggctcatcaccttcaggaagtctgaggaggagcccacccgggaggagctggagtttgacatggacagcgtcatcaatggagagggccctgtgggcacagctgaccctgctgagaagacccccctgggcgtgccccggcagagcggccggcccggctgctgcggcggccgctgtggcggccgccgctgcctgcggcgctggttccacttctggggcgcccctgtgaccatcttcatgggaaatgtggtgtcctacctgctcttcctgctgctcttcagccgggtgctgctggtggacttccagcctgcccctcctggcagcctggagctgctgctgtacttctgggccttcaccctgctgtgtgaggagctgcggcagggcctgagcggcggcggcggcagcctggccagcggcggccctggccctggccacgccagcctgagccagaggctgcggctgtacctggccgacagctggaaccagtgtgacctggtggccctgacctgcttcctgctgggcgtgggctgccgcctgaccccaggcctgtaccacctgggccgcacagtgctgtgcatcgacttcatggtgttcaccgtgcggctgctgcacatcttcaccgtgaacaagcagctgggccccaagatcgtcatcgtgtccaagatgatgaaggatgtgttcttcttcctgttcttcctgggcgtgtggctggtggcctacggcgtggccacagagggcctgctgcggccccgggacagcgacttccccagcatcctgcggcgggtcttctaccggccctacctgcagatcttcggccagatcccccaggaggacatggatgtggccctgatggagcacagcaactgcagcagcgagcccggcttctgggcccaccccccaggggcccaggccggcacctgtgtgtcccagtatgccaactggctggtggtgctgctgctggtgatcttcctgctggtggccaacatcctgctggtgaacctgctgattgccatgttctcctacaccttcggcaaggtgcagggcaacagcgacctgtactggaaggcccagcgctaccgcctcatccgggagttccacagcaggcctgccctggccccacccttcatcgtcatcagccacctgcggctgctgctgcggcagctgtgccggcggcccaggagcccccagcccagcagccctgccctggagcacttccgggtgtacctgagcaaggaggccgagaggaagctgctgacctgggagagcgtgcacaaggagaacttcctgctggcccgggcccgggacaagcgggagagtgacagcgagcggctgaagaggaccagccagaaggtggacctggccctgaagcagctgggccacatccgggagtatgagcagaggctgaaggtgctggagcgggaggtgcagcagtgcagccgggtgctgggctgggtggccgaggccctgagccgcagcgccctgctgcccccaggcggccccccacctccagacctgcccggcagcaaggactag

SEQ ID NO: 319815 - DNA, 2583 bp, Artificial Sequence
  derived and/or modified sequence
atgctgacccggatcgagaacgccacccaggcccagctgccctgccttctggtcgcagggtccggaggcgcagcggattgtctggcagagactttagaagatacacttgccccaggatccggaggagctagacagggcgaagccagggacagaatccggagatttttccctaagggtgatttggaggtgcttcaggctcagagtttccatcttgaggccagtttgatggatgctctgcttaacgatcgccccgagtttgtgaggctgctgatctcccatggtttgtcactcggtcacttcctgacgcctatgcgactggctcagctgtatagcgccgcaccgtctaatagtcttatcagaaatctgctggaccaagcgtcgcatagcgccggcaccaaagccccagcgttgaaagggggcgccgcagagctcagacccccagatgtcgggcacgtcttgaggatgttactgggcaagatgtgtgctcctcgctatccaagcggtggagcttgggacccacatcctggccaggggttcggtgagtccatgtatttactcagcgataaagctacctcacccctttcgcttgacgccggcctcggccaagccccgtggagcgacctcctgctttgggcactgctcttgaaccgggcgcaaatggcaatgtatttctgggagatggggagcaatgcagtctccagcgccttaggagcctgtctgctgcttcgcgtgatggcgcgcctggagccagacgccgaagaggctgctcggcggaaggatctggcgttcaagtttgaggggatgggcgtagacctgttcggggaatgctatcgctctagtgaagtgagagcggcgagacttcttctcaggagatgcccactttggggagatgccacctgcctgcagcttgccatgcaagcagatgctagagctttttttgctcaggatggggtccagtctctactgactcagaagtggtggggggacatggcctctaccacccccatatgggcccttgtgttagctttcttctgcccccctctcatatacacacgactgataaccttcaggaagtcagaagaagaaccaacgcgtgaagagctggaattcgatatggacagcgtgatcaacggcgagggacccgtcggcaccgccgatccggccgaaaagactcccttaggcgtgccacggcagtcgggaaggccagggtgttgcgggggaagatgcgggggcagacgttgcctgagaagatggttccatttctggggagctccagtcactattttcatggggaacgtggtgtcctatctactcttcctcctactattcagccgcgtcctattggtagacttccaaccggcccccccaggttctttggagctgctgttatacttctgggcattcactctgttgtgcgaggagctgaggcaaggcctgagcgggggggggggctcactagcttccgggggccccggtcccgggcatgcaagtctgtcccagcgactgaggctctatctggcggacagctggaatcaatgtgacctggtagcgctaacttgctttctcctgggtgttgggtgtcgccttacccctgggttgtaccacctcggtcgcacagtcctgtgtatcgactttatggtcttcaccgtgagactgttacacatcttcaccgtcaacaaacaactgggcccaaaaatcgttattgtttcgaaaatgatgaaagacgtgtttttttttcttttttttctaggagtgtggttggttgcttatggtgtggcgactgaaggtctgctgagaccaagagactccgacttcccatcgattttaaggagggttttttaccgcccatatctgcaaatattcgggcaaatcccacaggaagacatggacgttgccctgatggagcactctaactgcagctcagagccgggattctgggcccaccctcccggcgcacaggcgggcacctgtgtgtcgcagtatgccaactggctcgttgtcctgctcctggtcatttttctgctggtggcaaatattctcctggtgaatctgctcatcgcgatgtttagctatacgtttggtaaagtacaagggaacagtgacctgtactggaaggcccaacgatacagactaatcagagagttccactcaagaccagcccttgcacccccttttatcgttatctcacatctccgcctgctcctgcgacagctgtgtcgacgcccccggtcccctcaaccctctagcccagcactggagcacttccgtgtatacctatcaaaagaggcggagcgcaaactgctgacttgggaatcagtgcataaggagaacttcctgctggcacgggcaagggacaaaagggagtccgatagcgagcggttgaagaggacctcacaaaaggtggacctcgctctcaagcagctggggcatattagggagtacgaacagcggctcaaagttctggaaagagaggtgcaacaatgttccagagttttgggatgggtggctgaggcactgtcccgcagcgcactcttaccccctggggggccccctccacctgaccttccgggttctaaagattag

SEQ ID NO: 319816 - DNA, 2583 bp, Artificial Sequence
  derived and/or modified sequence
atgctgacccggattgaaaacgccacccaggctcagttgccttgtcttctagtggcaggatcagggggagccgcagactgccttgctgagacactggaagatacgctcgctccgggtagtggaggcgctagacagggcgaggccagagatagaatcaggcgattctttcccaaaggggacctcgaagttctccaggctcagtcttttcacctcgaagcctcactaatggatgcgctgcttaacgaccggcctgagtttgtgcggctgctaataagccatggtctttcactcggccattttctcacaccaatgagactagctcagttgtactctgccgctccatccaatagtctgatccgcaacctgctcgatcaggcaagccattctgccggtaccaaagcccctgctctgaaaggcggtgccgctgagctgcgtcctcctgatgttggtcatgtcctccgcatgctgctcgggaaaatgtgtgcacctcggtatccatcaggaggcgcttgggatccgcatccagggcaaggctttggcgagtccatgtatctgttaagcgataaggcaactagtcctctaagcctggacgccggtctgggccaggccccatggagcgacttgctgctctgggccctcctgctgaatcgggcacaaatggccatgtatttttgggaaatgggaagcaatgcagtgagctccgctctgggagcatgtcttctgctccgcgtcatggctcgactcgaaccagacgccgaggaggcagccagaagaaaagatttagccttcaagtttgaaggtatgggtgtagacctgtttggagagtgctatcgcagctcagaggtacgcgcagccagactcttactacggaggtgtcccttatggggcgatgccacttgcctgcaactggccatgcaggcagatgctagagcattcttcgctcaagacggagttcagagcctccttacacagaaatggtggggcgacatggccagtacaaccccaatctgggctttagtactcgcttttttctgtccccctctgatatatactaggctgataacatttcgaaagtcggaagaagaacccacaagggaagagctcgagtttgacatggattcggtgatcaacggcgaaggtcccgtcgggacagccgatccagctgagaaaacccctctgggtgtcccacggcaatcaggacgccctggttgttgcgggggacggtgtggcggacgtcggtgtcttaggagatggttccacttctggggcgctccagtgaccatctttatgggcaatgtcgtgagttacttgctttttctgttgttattttcacgcgtcctgttagttgatttccagcctgccccaccaggttctttagagttgcttctatatttctgggcatttacactgctgtgtgaggagctccggcagggcttaagcggaggagggggatcccttgctagcggaggacctggcccaggtcatgcatctttgtctcagcgcctgagactgtacctcgctgactcctggaatcagtgcgatctagtggctctgacctgcttcctgttgggggttgggtgtcgtctaactccgggactctaccacctgggcaggaccgtgctgtgtatagactttatggtctttaccgtcaggctccttcatatttttacggtaaataagcagctcgggcctaaaatagtaatcgtctccaagatgatgaaggatgtttttttcttcctatttttcctgggcgtatggcttgtcgcctacggggtggctaccgaaggactcttgaggccgcgtgattcagatttcccatctatcctccggagggtcttttatcgaccctatctgcagatttttggccagatcccacaggaagacatggacgtggccctgatggagcattcaaattgcagtagtgagcccggtttttgggcccatcctcccggagcacaggcaggcacttgcgtctcccaatacgcgaactggctcgttgtcctgctcctcgtcatcttccttttagtggctaacatactgttagtgaacctcctcatcgctatgttcagctacacattcgggaaagtgcaaggaaattcagatttatactggaaggcccagcggtacagactgatccgtgaattccactcccgacctgcacttgcgccacccttcatcgtcatttcccacttgcgattactgctccgccagttatgcaggagacccaggagcccccagccttcttctcccgctctggagcactttagggtttatctttctaaggaggccgaacggaagctgctgacatgggagtccgtgcataaagagaacttccttttagctcgggcacgagataagagagaatctgatagcgagagactgaagcgcaccagtcaaaaggttgacctagctctgaagcagcttggacacattagagagtatgagcaacgattgaaggtcctggagcgtgaggtccagcagtgctctcgggtccttggctgggtggcggaggcgttatctcggtcagccctacttcccccaggaggcccacctcccccagatctaccaggcagtaaagattag

SEQ ID NO: 319817 - DNA, 3273 bp, Artificial Sequence
  derived and/or modified sequence
aggaggttgcggcggccgcggcagcatggtggtgccggagaaggagcagagctggatccccaagatcttcaagaagaagacctgcacgacgttcatagttgactccacagatccgggggctcgttccctgcgaggtaccggtggcgcggtgacccggaggacggggtccagtttcccctggactacaactactcggccttcttcctggtggacgacggcacacacggctgcctggggggcgagaaccgcttccgcttgcgcctggagtcctacatctcacagcagaagacgggcgtgggagggactggaattgacatccctgtcctgctcctcctgattgatggtgatgagaagatgttgacgcgaatagagaacgccacccaggctcagctcccatgtctcctcgtggctggctcagggggagctgcggactgcctggcggagaccctggaagacactctggccccagggagtgggggagccaggcaaggcgaagcccgagatcgaatcaggcgtttctttcccaaaggggaccttgaggtcctgcaggcccagtccttccatctcgaagcttccctcatggacgccctgctgaatgaccggcctgagttcgtgcgcttgctcatttcccacggcctcagcctgggccacttcctgaccccgatgcgcctggcccaactctacagcgcggcgccctccaactcgctcatccgcaaccttttggaccaggcgtcccacagcgcaggcaccaaagccccagccctaaaagggggagctgcggagctccggccccctgacgtggggcatgtgctgaggatgctgctggggaagatgtgcgcgccgaggtacccctccgggggcgcctgggaccctcacccaggccagggcttcggggagagcatgtatctgctctcggacaaggccacctcgccgctctcgctggatgctggcctcgggcaggccccctggagcgacctgcttctttgggcactgttgctgaacagggcacagatggccatgtacttctgggagatgggttccaatgcagtttcctcagctcttggggcctgtttgctgctccgggtgatggcacgcctggagcctgacgctgaggaggcagcacggaggaaagacctggcgttcaagtttgaggggatgggcgttgacctctttggcgagtgctatcgcagcagtgaggtgagggctgcccgcctcctcctccgtcgctgcccgctctggggggatgccacttgcctccagctggccatgcaagctgacgcccgtgccttctttgcccaggatggggtacagtctctgctgacacagaagtggtggggagatatggccagcactacacccatctgggccctggttctcgccttcttttgccctccactcatctacacccgcctcatcaccttcaggaaatcagaagaggagcccacacgggaggagctagagtttgacatggatagtgtcattaatggggaagggcctgtcgggacggcggacccagccgagaagacgccgctgggggtcccgcgccagtcgggccgtccgggttgctgcgggggccgctgcggggggcgccggtgcctacgccgctggttccacttctggggcgcgccggtgaccatcttcatgggcaacgtggtcagctacctgctgttcctgctgcttttctcgcgggtgctgctcgtggatttccagccggcgccgcccggctccctggagctgctgctctatttctgggctttcacgctgctgtgcgaggaactgcgccagggcctgagcggaggcgggggcagcctcgccagcgggggccccgggcctggccatgcctcactgagccagcgcctgcgcctctacctcgccgacagctggaaccagtgcgacctagtggctctcacctgcttcctcctgggcgtgggctgccggctgaccccgggtttgtaccacctgggccgcactgtcctctgcatcgacttcatggttttcacggtgcggctgcttcacatcttcacggtcaacaaacagctggggcccaagatcgtcatcgtgagcaagatgatgaaggacgtgttcttcttcctcttcttcctcggcgtgtggctggtagcctatggcgtggccacggaggggctcctgaggccacgggacagtgacttcccaagtatcctgcgccgcgtcttctaccgtccctacctgcagatcttcgggcagattccccaggaggacatggacgtggccctcatggagcacagcaactgctcgtcggagcccggcttctgggcacaccctcctggggcccaggcgggcacctgcgtctcccagtatgccaactggctggtggtgctgctcctcgtcatcttcctgctcgtggccaacatcctgctggtcaacttgctcattgccatgttcagttacacattcggcaaagtacagggcaacagcgatctctactggaaggcgcagcgttaccgcctcatccgggaattccactctcggcccgcgctggccccgccctttatcgtcatctcccacttgcgcctcctgctcaggcaattgtgcaggcgaccccggagcccccagccgtcctccccggccctcgagcatttccgggtttacctttctaaggaagccgagcggaagctgctaacgtgggaatcggtgcataaggagaactttctgctggcacgcgctagggacaagcgggagagcgactccgagcgtctgaagcgcacgtcccagaaggtggacttggcactgaaacagctgggacacatccgcgagtacgaacagcgcctgaaagtgctggagcgggaggtccagcagtgtagccgcgtcctggggtgggtggccgaggccctgagccgctctgccttgctgcccccaggtgggccgccaccccctgacctgcctgggtccaaagactgagccctgctggcggacttcaaggagaagcccccacaggggattttgctcctagagtaaggctcatctgggcctcggcccccgcacctggtggccttgtccttgaggtgagccccatgtccatctgggccactgtcaggaccacctttgggagtgtcatccttacaaaccacagcatgcccggctcctcccagaaccagtcccagcctgggaggatcaaggcctggatcccgggccgttatccatctggaggctgcagggtccttggggtaacagggaccacagacccctcaccactcacagattcctcacactggggaaataaagccatttcagagg

SEQ ID NO: 319818 - DNA, 696 bp, Artificial Sequence
  derived and/or modified sequence
atggccaagtgggtgcccgccctgctgctgcggcgggtgcccctgttctcgctccgcttcagacctgccagcagtaccttccttccagttctcgcagccaccgagcccgccgtttctgtgcctagtggcgatctgtccatgcctgtcaaaacaagggccgagggagaggacgacggatttggtgaggctggagatcctcgtcgtttactcgagagaccatggcgctttagggggtgtttacccggcaagggaaatagggacgtgggcttcgagggcaccgaggggcctacgagtactagacccgagtgggtgtggtcttgcaggtgttgtctggggtgtagagctagcacaagagagcgtgtgacatctcccgttcgagcagccggcccacagccacggtttaccgatcgcgaaacagaggctgcagcaggaacgttggcccacatgggcttcgcaccacctacctcattctcacacttcaccgatcaagaacttagagattgctccagtcttgaatgtttaggggtagtggaaggagacccccatgtgctgtgctcaaccctcagtttatcccggccgagcccatccgccactcttactttgctcttagcttccagctgtctgctggcccccgcccctccctctttcattctcctgctcttcacgctcatagcacctgacctaccacactcgtag

SEQ ID NO: 319819 - protein, 327 aa, Artificial Sequence
  derived and/or modified sequence
MEVAVPVKQEAEGLALDSPWHRFRRFHLGDAPGPREALGLLRALCRDWLRPEVHTKEQMLELLVLEQFLSALPADTQAWVCSRQPQSGEEAVALLEELWGPAASPDGSSATRVPQDVTQGPGATGGKEDSGMIPLAGTAPGAEGPAPGDSQAVRPYKQEPSSPPLAPGLPAFLAAPGTTSCPECGKTSLKPAHLLRHRQSHSGEKPHACPECGKAFRRKEHLRRHRDTHPGSPGSPGPALRPLPAREKPHACCECGKTFYWREHLVRHRKTHSGARPFACWECGKGFGRREHVLRHQRIHGRAAASAQGAVAPGPDGGGPFPPWPLG

SEQ ID NO: 319820 - DNA, 984 bp, Artificial Sequence
  derived and/or modified sequence
atggaggtggccgtgcccgtgaagcaggaggccgagggcctggccctggacagcccctggcacagattcagaagattccacctgggcgacgcccccggccccagagaggccctgggcctgctgagagccctgtgcagagactggctgagacccgaggtgcacaccaaggagcagatgctggagctgctggtgctggagcagttcctgagcgccctgcccgccgacacccaggcctgggtgtgcagcagacagccccagagcggcgaggaggccgtggccctgctggaggagctgtggggccccgccgccagccccgacggcagcagcgccaccagagtgccccaggacgtgacccagggccccggcgccaccggcggcaaggaggacagcggcatgatccccctggccggcaccgcccccggcgccgagggccccgcccccggcgacagccaggccgtgagaccctacaagcaggagcccagcagcccccccctggcccccggcctgcccgccttcctggccgcccccggcaccaccagctgccccgagtgcggcaagaccagcctgaagcccgcccacctgctgagacacagacagagccacagcggcgagaagccccacgcctgccccgagtgcggcaaggccttcagaagaaaggagcacctgagaagacacagagacacccaccccggcagccccggcagccccggccccgccctgagacccctgcccgccagagagaagccccacgcctgctgcgagtgcggcaagaccttctactggagagagcacctggtgagacacagaaagacccacagcggcgccagacccttcgcctgctgggagtgcggcaagggcttcggcagaagagagcacgtgctgagacaccagagaatccacggcagagccgccgccagcgcccagggcgccgtggcccccggccccgacggcggcggccccttccccccctggcccctgggctag

SEQ ID NO: 319821 - DNA, 984 bp, Artificial Sequence
  derived and/or modified sequence
atggaagtggcggtccctgtgaaacaggaagcggagggtctagctcttgatagcccctggcacaggtttcgcaggttccacctgggcgatgctcctggccctcgcgaagctctcggcctcctgagggctttgtgcagggactggctacggccagaagtccataccaaagaacagatgctcgagttgctcgtactcgagcaatttctttctgcgctacccgccgacactcaggcttgggtttgttctagacagcctcagagcggggaggaggctgtggcgctgctggaggagctctgggggccagcagcctcccccgacgggagctctgctacccgagtgccccaagatgttacgcaggggcctggcgctactggaggaaaagaagactcaggaatgatcccgctggccggcaccgcaccaggagccgaaggcccggcaccgggggactcacaagccgtgaggccatataaacaggagccgagcagccccccactggcccctggcctgcccgctttcctcgcagccccgggcacgacctcttgcccggaatgcggcaaaaccagtctcaaacccgcccatttgctgagacacaggcaaagccacagcggggagaaaccgcacgcatgtcccgagtgcgggaaggccttccgccgcaaggagcatctgagaaggcatcgcgacacccaccccgggagcccaggaagtccagggcctgccctgcggcctctcccggcaagagagaagccacacgcttgctgtgaatgcggtaaaacattctattggcgggaacatctggtacgacaccgaaagacccatagcggcgcgagacccttcgcttgctgggagtgtggaaagggtttcggcagacgggagcacgtcctgcgtcaccagaggattcacgggcgggccgccgctagcgctcagggagcagtggcaccagggcccgacggcggcggtccatttcctccctggccacttggatag

SEQ ID NO: 319822 - DNA, 984 bp, Artificial Sequence
  derived and/or modified sequence
atggaggtggccgtgcctgtgaagcaggaggccgagggcctggccctggacagcccctggcaccgcttccgccgcttccacctgggagatgcccctggcccccgggaggccctgggcctgctgcgggccctgtgccgggactggctgcggcctgaggtgcacaccaaggagcagatgctggagctgctggtgctggagcagttcctgagcgccctgcctgctgacacccaggcctgggtgtgcagccggcagccccagagcggggaggaggccgtggccctgctggaggagctgtggggccctgctgccagcccagatggcagcagcgccaccagggtgccccaggatgtgacccagggccctggggccaccggcggcaaggaggacagcggcatgatccccctggccggcacagcccctggagctgagggccctgcccctggggacagccaggccgtgcggccctacaagcaggagcccagcagcccccccctggcccctggcctgcctgccttcctggccgcccctggcaccaccagctgcccagaatgtgggaagaccagcctgaagccagcccacctgctgcggcaccggcagagccacagcggggagaagccccacgcctgcccagaatgtgggaaggccttccggaggaaggagcacctgcggcggcaccgggacacccaccctggcagccctggcagccctggccctgccctgcggcccctgcctgcccgggagaagccccacgcctgctgtgaatgtgggaagaccttctactggagggagcacctggtgcgccacaggaagacccacagcggggcccggccctttgcctgctgggagtgtgggaaaggatttggaagaagagagcacgtgctgcggcaccagaggatccacggccgggccgccgccagcgcccagggcgctgtggcccctggcccagatggcggcggccccttccccccctggcccctgggctag

SEQ ID NO: 319823 - DNA, 984 bp, Artificial Sequence
  derived and/or modified sequence
atggaggtggccgtgcccgtgaagcaggaggccgagggcctggccctggatagtccttggcataggttcagacggtttcatctcggtgacgctcccggtccccgggaagctctgggtctgctaagagctttgtgtcgcgattggctgcgaccagaggtccatactaaggagcagatgttggagctgttggtcctcgaacagtttctgtcagcactcccagcagacacccaggcctgggtttgctctcgccaacctcaaagtggtgaggaggcagtggctctgctcgaggagctgtgggggcccgctgctagccctgacggctcatcagccactcgtgtaccgcaggatgtgactcaggggcccggagccacaggtggaaaggaggattccggtatgatacccttggctgggaccgcacctggcgccgagggacccgcaccaggggattcgcaggccgtcaggccttataagcaagaaccttcttcgcctcccctggctcctggacttccagcatttctagccgcaccaggtaccacaagctgcccagaatgcggcaagacaagcctgaagcctgctcacttactgcggcatcgtcaatcacatagcggtgagaaaccacacgcatgcccagagtgtggcaaggctttcaggcgaaaagagcacttgcgtaggcaccgggacacgcaccccggctccccaggaagccctggcccagctttgagaccactgcctgcgagggagaaaccacacgcttgctgcgagtgtggcaagactttctattggagggaacatctggtgcgacaccggaagacccactctggtgctcggcctttcgcctgttgggagtgtggtaagggcttcgggagacgggagcacgtattgcgccaccaacggatccacggccgggctgcggcatcagcccaaggagccgtggctccaggccccgatggtggcggaccatttccgccatggccattgggctag

SEQ ID NO: 319824 - DNA, 984 bp, Artificial Sequence
  derived and/or modified sequence
atggaggtggccgtaccagttaagcaggaggcagagggtctggctctggactcaccctggcataggttcaggaggtttcaccttggtgatgcccctggccctcgggaggccctgggcttactccgcgcactctgtagggattggctacgaccagaagtgcacacaaaggagcagatgctggagcttctggtgctggagcagttcctgagcgcattgccggcagacactcaggcttgggtctgttctcgccaaccccagtcaggagaagaggccgtggccctcctcgaggaattgtgggggccagccgcaagtcccgatggatctagtgcgactagagtaccgcaggacgtcacacaagggccaggcgcaacgggaggcaaagaggactccggcatgatcccgctcgcgggtactgcccctggcgctgaggggcctgccccaggtgattcacaggcggttaggccttataaacaggaaccctcctcccccccattggcccctgggctccccgcattcctggccgcacccggaactaccagctgcccagaatgcggaaagaccagcctcaagcctgcccacttgctacggcacagacagagtcactctggtgaaaagccccacgcgtgcccagagtgtggcaaggccttccgtcggaaggagcacctgcggagacaccgggacacgcaccctgggtcacctggaagtcccggtcccgctctcagacccctacccgcaagggagaagccacatgcctgttgtgagtgtggtaagacattctattggagagagcacttggtgcgacataggaagacccacagcggagccaggcccttcgcttgctgggagtgcggcaaggggttcggcaggcgggaacacgttctaagacatcagaggatccacggccgagccgcagcttccgcccagggagccgtggcccctgggcctgatggcggtggcccattccctccttggcctttgggctag

SEQ ID NO: 319825 - DNA, 2042 bp, Artificial Sequence
  derived and/or modified sequence
cggggcttcatggggagttgttgggctgaacgagcggctcggagtatgggattgggggagggggacgggggagtttggcgcaaagcctgctggggcatggagtcccggcgagctttgtgcgcatgtgcggggaggtgagggggcttggggggcctcgcctgagagagtgaggacaggctgcgggaggagctgcaggactgaggtacagaggccaggggcccagggcaggacccagcctggacttgactccctgggatcccaggaagggcacaccctttcctcaccacccgagtgagcgctgccccctcacagagacctctttgccccctgggccaggcagagcaggcgctgcggtccgggaggccccatggaggtggcggtgcccgtgaagcaggaggccgagggcctggcgctggactccccgtggcaccgcttccgccgcttccacctgggcgacgcgccgggcccgcgggaggcgctggggctgctccgcgccctgtgccgggactggctgcggcccgaggtgcacaccaaggagcagatgttggagctgctggtgctggaacagttcctgagcgcgctgcccgccgacacgcaggcctgggtgtgcagccggcagccgcagagcggggaggaggcggtggccctgctggaggagctctgggggccagcagcctcccccgatgggtcgtcagcaacgagggtgcctcaggatgtgacgcagggccctggggccacaggtggaaaggaggacagtgggatgattcccttagcaggcaccgcccctggggctgaggggccggcgcctggggactcccaggctgtgcgcccctacaagcaggagcccagcagccccccgctggcgcctggcctgcccgccttcctagcggccccgggcaccacgtcctgccccgagtgcggcaaaacgtccctgaaaccagctcacctgctgcgccaccggcagagccactcgggcgagaagccgcacgcctgccctgagtgcgggaaggcctttcggcgcaaggagcacctgcggcgccaccgcgacacgcaccccggcagccccggcagccccgggcccgcgctgcgccctctgcccgcccgtgagaagccccacgcgtgctgcgagtgtggcaagaccttctactggcgcgagcacctggtgcgccaccgcaagacgcactcgggagcgcggccctttgcctgctgggagtgtggcaagggcttcgggcgccgcgagcacgtgctgcgccaccagcgcatccacggccgggcagcggccagcgcgcagggggcggtagctccgggcccggatggtggaggccccttcccgccctggcccttgggttagccgcctcccggccagcgccatctcccgcccttggtgctgcccccgggcggtacctgctctctcccagcgccacttggcctcttcctctcctccttccctcccatcgtcctcctccacctgcgcctcccttgtctgaacttcccaacgccttcctattcctttccaactccttttcccccaaatttcactttccttctcaggtctcacctcagccccccccttctccctgatttctcggcctctctctctgtgtgaaggggcctctccctaatgtctcctccttcccccctcttctctctcctgcggcccagcctccctctccctcctccattcctctctccctgcccttttcctgcctgaagagcagaggtgaggacctgggacccctgaggggcaggccaggaggagctcgggcgcaggccaggcccccttggtgaagcagaggctgaaggaaaggggtctgggtcttgtccctaggaattctcctccctcaggagattgggggttgggggaggcagcgggtgatggctctgaagctgaacccagggcctggctgtggtcttcttggtcttgctgccccctgtgacccaaaggcatgggatggacagagatgcctgcccccgtgaagctggttggggagggcagttcaccagcatccatagagtaataaagtcactgtgtgtagacccgg

SEQ ID NO: 319826 - protein, 171 aa, Artificial Sequence
  derived and/or modified sequence
MWLLLTLSFLLASTAAQDGDKLLEGDECAPHSQPWQVALYERGRFNCGASLISPHWVLSAAHCQSRFMRVRLGEHNLRKRDGPEQLRTTSRVIPHPRYEARSHRNDIMLLRLVQPARLNPQGDSGGPLVCGGILQGIVSWGDVPCDNTTKPGVYTKVCHYLEWIRETMKRN

SEQ ID NO: 319827 - DNA, 516 bp, Artificial Sequence
  derived and/or modified sequence
atgtggctgttgctgactttatctttcctgttagcatcgacagcggcccaggacggtgacaaactgctggagggtgatgaatgcgccccccatagccaaccttggcaggtcgctctgtatgagcgaggccggttcaattgcggcgccagcctgatcagccctcattgggtgttgagcgccgcacattgtcaatcccgattcatgcgcgttcggctcggcgagcacaatttgcggaaacgcgacggtcctgagcaactcaggaccacatcacgagtcattccacatcccaggtatgaagcccgatcccaccgaaatgacataatgcttctacgcctggtgcagcctgctcgcctcaatccgcaaggggattccggcgggcccctcgtgtgtgggggcattttacaggggatcgtaagttggggcgacgtgccttgcgataataccaccaaacctggggtgtacaccaaggtgtgtcattaccttgagtggatacgcgagacgatgaaacggaattag

SEQ ID NO: 319828 - DNA, 1054 bp, Artificial Sequence
  derived and/or modified sequence
actgcagccgaaccctggtccctcctccacaatgtggcttctcctcactctctccttcctgctggcatccacagcagcccaggatggtgacaagttgctggaaggtgacgagtgtgcaccccactcccagccatggcaagtggctctctacgagcgtggacgctttaactgtggcgcttccctcatctccccacactgggtgctgtctgcggcccactgccaaagccgcttcatgagagtgcgcctgggagagcacaacctgcgcaagcgcgatggcccagagcaactacggaccacgtctcgggtcattccacacccgcgctacgaagcgcgcagccaccgcaacgacatcatgttgctgcgcctagtccagcccgcacgcctgaacccccagggtgactctgggggacccctggtctgtgggggcatcctgcagggcattgtgtcctggggtgacgtcccttgtgacaacaccaccaagcctggtgtctataccaaagtctgccactacttggagtggatcagggaaaccatgaagaggaactgactattctagcctatctcctgtgcccctgactgagcagaagcccccacagctggccagcagccccgcctgacatggaacagaacggagccatcccccaagaccctgtccaaggcccagatgttagccaaggacttgtcccacctgaggacaaagctggcgctcaaggtcacctgtttaatgccaagataacaaagcgctgatccaagttgctctgtaggaatttctgtgacttttttctggggtcaaagagaaaccccgagacactgtacactgttccttttcacccaccaccccgatccctaggtgaggagaagcggcttgaagcagggctccattcattcaacacacatgaccacccgtgtgatcttgaacaagaggcccaatctcacttcgccttggtttccttatctgtaaaatgagaccatcttattgctgacttcaaagggctgttgtgaggattaaatgagatgattcgtctgaactgattaaaatcgtgtctggcactga

SEQ ID NO: 319829 - DNA, 516 bp, Artificial Sequence
  derived and/or modified sequence
atgtggctgctgctgaccctgtccttcctgctggccagcacagctgcccaggatggagacaagctgctggagggagatgaatgtgccccccacagccagccctggcaggtggccctgtatgaaagaggccgcttcaactgtggggccagcctcatcagcccccactgggtgctgtctgctgcccactgccagagccgcttcatgagggtgcggctgggggagcacaacctgaggaagagagatggccctgagcagctgcggaccaccagcagggtcatcccccaccccaggtatgaggcccggagccacagaaatgacatcatgctgctgcggctggtgcagcctgcccggctgaacccccagggcgacagcggcggccccctggtgtgtggcggcatcctgcagggcatcgtgtcctggggagatgtgccctgtgacaacaccaccaagccaggagtgtacaccaaggtgtgccactacctggagtggatccgggagaccatgaagaggaactag

SEQ ID NO: 319830 - DNA, 516 bp, Artificial Sequence
  derived and/or modified sequence
atgtggctgctgctgaccctgagcttcctgctggccagcaccgccgcccaagatggcgacaagctgctggagggagacgaatgtgccccacatagccaaccatggcaggtagccctctacgagcgcggacggtttaactgtggggccagtcttattagtccacactgggttttgtccgccgcgcactgtcagtccaggttcatgcgcgttcggctcggcgaacacaacctgcgaaagcgcgatggacccgaacaattgcgaactacaagccgagtcatccctcacccacgctacgaggctaggtctcatcgcaatgacattatgctactaaggttagtgcagccagcccgactaaatccgcagggggactccggcggacctctggtgtgcggtgggattttacagggcatagtatcctggggagacgtgccctgcgataatactacgaagccaggtgtttataccaaggtctgtcattatctggaatggatacgggaaaccatgaagaggaattag

SEQ ID NO: 319831 - DNA, 516 bp, Artificial Sequence
  derived and/or modified sequence
atgtggctgttgctgactcttagcttccttctcgcttcaacggctgctcaggatggagataagctactggagggagatgaatgcgccccacatagccaaccctggcaggtggctctatacgagcggggtcggtttaactgtggggctagcttgatatccccccactgggtgctatccgccgcacactgccaaagccgctttatgagagtgcggttgggggaacacaacctcagaaaacgagacggcccagaacagctgcggacaacttcacgggtcattcctcacccacgatacgaggcacgctcacacagaaatgatatcatgctgctacggcttgtgcagccagcgaggcttaatcctcagggagactcagggggacctcttgtgtgcggcggtattttgcagggcatcgtctcatggggcgacgttccatgcgataacaccaccaagcccggagtgtacacaaaagtgtgccactacttggaatggataagggaaactatgaaacgcaattag

SEQ ID NO: 319832 - DNA, 516 bp, Artificial Sequence
  derived and/or modified sequence
atgtggctgctgctgaccctgagcttcctgctggccagcaccgccgcccaggacggcgacaagctgctggagggcgacgagtgcgccccccacagccagccctggcaggtggccctgtacgagagaggcagattcaactgcggcgccagcctgatcagcccccactgggtgctgagcgccgcccactgccagagcagattcatgagagtgagactgggcgagcacaacctgagaaagagagacggccccgagcagctgagaaccaccagcagagtgatcccccaccccagatacgaggccagaagccacagaaacgacatcatgctgctgagactggtgcagcccgccagactgaacccccagggcgacagcggcggccccctggtgtgcggcggcatcctgcagggcatcgtgagctggggcgacgtgccctgcgacaacaccaccaagcccggcgtgtacaccaaggtgtgccactacctggagtggatcagagagaccatgaagagaaactag

SEQ ID NO: 319833 - protein, 161 aa, Artificial Sequence
  derived and/or modified sequence
MWLLLTLSFLLASTAAQDGDKLLEGDECAPHSQPWQVALYERGRFNCGASLISPHWVLSAAHCQSRFMRVRLGEHNLRKRDGPEQLRTTSRVIPHPRYEARSHRNDIMLLRLVQPARLNPQVRPAVLPTRCPHPGEACVVSGWGLVSHNEPGTAGSPRSQG

SEQ ID NO: 319834 - protein, 162 aa, Artificial Sequence
  derived and/or modified sequence
MWLLLTLSFLLASTAAQDGDKLLEGDECAPHSQPWQVALYERGRFNCGASLISPHWVLSAAHCQSRFMRVRLGEHNLRKRDGPEQLRTTSRVIPHPRYEARSHRNDIMLLRLVQPARLNPQVRPAVLPTRCPHPGEACVVSGWGLVSHNEPGTAGSPRSQGA

SEQ ID NO: 319835 - DNA, 486 bp, Artificial Sequence
  derived and/or modified sequence
atgtggctcctgctcacactaagcttcctgctggcctccaccgctgcccaggacggagataaactcctcgaaggtgacgaatgtgctcctcacagccagccgtggcaggtggccctgtatgaacgcggaaggttcaactgtggagcttcattaatcagcccccattgggttctgtcagccgctcattgccaaagcagattcatgcgcgttcggttgggggagcacaacctgcggaaacgcgatggccccgaacaactccggacgacctcccgcgtgattccgcaccctcggtacgaggcccgcagccaccgcaatgatatcatgttactgagactggtgcagccagctaggctgaacccccaggttagaccagctgtattaccaaccagatgccctcatcccggagaagcttgcgtggtcagcggctgggggctggtgtcccataacgagcccggcaccgccggctcaccgcgctcccagggatag

SEQ ID NO: 319836 - DNA, 489 bp, Artificial Sequence
  derived and/or modified sequence
atgtggctgctgctaactctgagctttctacttgcttccaccgccgcccaggacggcgacaagctgctggaaggtgatgaatgtgcgccacattcccagccctggcaggtcgcactgtacgaaagagggagatttaattgcggagcttctctcatttctcctcattgggtcctgagcgcagcacactgccaatcaagattcatgcgagtaagactgggggaacacaacctacgcaagcgcgacggccccgaacagctgaggacaacttcaagagtgatccctcaccctcgatacgaggctcgctcacataggaacgatatcatgttactgcgcctggtacagcccgctcgactaaatccccaggtgcgcccagccgtactgcccactaggtgccctcatcccggcgaggcttgtgttgtctctggctggggccttgtgagccacaacgaacctgggacagcggggtccccacgctcccagggggcctag

SEQ ID NO: 319837 - DNA, 486 bp, Artificial Sequence
  derived and/or modified sequence
atgtggctgctgctgaccctgtccttcctgctggccagcacagctgcccaggatggagacaagctgctggagggagatgaatgtgccccccacagccagccctggcaggtggccctgtatgaaagaggccgcttcaactgtggggccagcctcatcagcccccactgggtgctgtctgctgcccactgccagagccgcttcatgagggtgcggctgggggagcacaacctgaggaagagagatggccctgagcagctgcggaccaccagcagggtcatcccccaccccaggtatgaggcccggagccacagaaatgacatcatgctgctgcggctggtgcagcctgcccggctgaacccccaggtgcggcctgctgtgctgcccacccgctgcccccaccctggagaggcctgtgtggtgtctggctggggcctggtgagccacaatgaacctggaacagctggcagccccaggagccagggctag

SEQ ID NO: 319838 - DNA, 489 bp, Artificial Sequence
  derived and/or modified sequence
atgtggctgctgctgaccctgtccttcctgctggccagcacagctgcccaggatggagacaagctgctggagggagatgaatgtgccccccacagccagccctggcaggtggccctgtatgaaagaggccgcttcaactgtggggccagcctcatcagcccccactgggtgctgtctgctgcccactgccagagccgcttcatgagggtgcggctgggggagcacaacctgaggaagagagatggccctgagcagctgcggaccaccagcagggtcatcccccaccccaggtatgaggcccggagccacagaaatgacatcatgctgctgcggctggtgcagcctgcccggctgaacccccaggtgcggcctgctgtgctgcccacccgctgcccccaccctggagaggcctgtgtggtgtctggctggggcctggtgagccacaatgaacctggaacagctggcagccccaggagccagggcgcctag

SEQ ID NO: 319839 - DNA, 486 bp, Artificial Sequence
  derived and/or modified sequence
atgtggctgctgctgaccctgagcttcctgctggccagcaccgccgcacaagatggcgacaagctgctggaaggagatgagtgcgcgccccactcccagccatggcaagtggcactttatgaaagaggcaggttcaactgtggcgcctccctgattagccctcactgggtgctttccgccgctcactgccagtctagatttatgcgcgttcggctgggagagcacaatctgcgtaaaagggatggcccggagcagctgcgcacgactagtagggttattccgcaccccaggtatgaagcccgcagtcacagaaacgacattatgctgctccgcctggtgcagccagccaggttgaacccgcaggtgagaccagctgttcttccaactaggtgtcctcacccaggggaagcttgtgtagtttcaggctggggtctcgtgtcacataatgagcccggaactgctggctcccctagaagtcagggatag

SEQ ID NO: 319840 - DNA, 489 bp, Artificial Sequence
  derived and/or modified sequence
atgtggctgctgctgaccctgagcttcctgctggccagcaccgccgcccaggacggtgacaagctcctcgagggcgacgagtgcgcccctcatagtcagccttggcaggtggctctgtatgagcgaggtcgattcaactgtggggccagccttatcagtccgcactgggtcctgagtgccgcccattgtcagtcccgattcatgagggttcggctgggcgagcacaacctgcgaaaacgcgacggccccgagcagctgcgtacaactagcagggtaattccacaccctagatatgaagctagatctcaccgcaacgatataatgttgctgcggctggtacagcctgctcgcctgaaccctcaggtacgacccgctgttctccccaccaggtgcccccaccccggcgaggcttgcgttgtaagtggatggggcctggtcagccacaatgaacctggcactgccgggtcaccccgatcccaaggcgcctag

SEQ ID NO: 319841 - DNA, 486 bp, Artificial Sequence
  derived and/or modified sequence
atgtggcttcttcttaccctctccttcctgctggcaagtacggcagcacaggacggggataaactgctggaaggcgatgaatgcgccccacattctcagccatggcaggtcgccctgtacgaaagaggacgcttcaattgtggcgctagtctgatttccccacattgggtgctgtccgccgcacactgccaaagcaggttcatgcgcgtgcgactcggtgaacataaccttcgaaaaagagatgggcctgaacagctgaggacgaccagcagggtgataccacacccgagatacgaagctcgctcccacagaaacgatattatgctgctgaggctagtgcagccagctcgacttaatccacaagtgcggccagcagtgctcccaacaaggtgcccacatccgggtgaggcttgcgtcgtatccggctggggattggtgagtcacaatgaaccagggacagctggttctcctcgcagccaagggtag

SEQ ID NO: 319842 - DNA, 489 bp, Artificial Sequence
  derived and/or modified sequence
atgtggctcttgctaaccctaagcttcctgctcgcctccaccgccgctcaggacggcgataagctgcttgagggtgatgaatgcgcccctcacagtcaaccctggcaggttgcactttacgagcgaggcaggtttaactgcggagcatctttaatctccccacattgggtactgagcgctgctcattgccagtccagattcatgcgagtgaggctgggggaacataatctgcgcaagagagacggcccagagcagctacgtacaactagtcgcgtgatcccacatccacgctacgaagccaggtctcatcgcaacgatataatgctgctgcggctcgtccagccagcaagactgaatcctcaggtgcgacctgctgtgcttcccacaagatgtccccaccctggggaagcgtgcgttgtgtccggctggggcctggtctcacacaatgaaccaggcactgccggttcccccaggtcacaaggcgcatag

SEQ ID NO: 319843 - DNA, 486 bp, Artificial Sequence
  derived and/or modified sequence
atgtggctgctgctgaccctgagcttcctgctggccagcaccgccgcccaggacggcgacaagctgctggagggcgacgagtgcgccccccacagccagccctggcaggtggccctgtacgagagaggcagattcaactgcggcgccagcctgatcagcccccactgggtgctgagcgccgcccactgccagagcagattcatgagagtgagactgggcgagcacaacctgagaaagagagacggccccgagcagctgagaaccaccagcagagtgatcccccaccccagatacgaggccagaagccacagaaacgacatcatgctgctgagactggtgcagcccgccagactgaacccccaggtgagacccgccgtgctgcccaccagatgcccccaccccggcgaggcctgcgtggtgagcggctggggcctggtgagccacaacgagcccggcaccgccggcagccccagaagccagggctag

SEQ ID NO: 319844 - DNA, 489 bp, Artificial Sequence
  derived and/or modified sequence
atgtggctgctgctgaccctgagcttcctgctggccagcaccgccgcccaggacggcgacaagctgctggagggcgacgagtgcgccccccacagccagccctggcaggtggccctgtacgagagaggcagattcaactgcggcgccagcctgatcagcccccactgggtgctgagcgccgcccactgccagagcagattcatgagagtgagactgggcgagcacaacctgagaaagagagacggccccgagcagctgagaaccaccagcagagtgatcccccaccccagatacgaggccagaagccacagaaacgacatcatgctgctgagactggtgcagcccgccagactgaacccccaggtgagacccgccgtgctgcccaccagatgcccccaccccggcgaggcctgcgtggtgagcggctggggcctggtgagccacaacgagcccggcaccgccggcagccccagaagccagggcgcctag

SEQ ID NO: 319845 - protein, 542 aa, Artificial Sequence
  derived and/or modified sequence
MWEHRKEPWTIESQVRVARKPKGWEWIKGVKTDLSRNCVIKELAPQQEGNPGEVFHTVTLEQHEKHDIEEFCFREIKKKIHDFDCQWRDDERNCNKVTTAPKENLTCRRDQRDRRGIGNKSIKHQLGLSFLPHPHELQQFQAEGKIYECNHVEKSVNHGSSVSPPQIISSTIKTHVSNKYGTDFICSSLLTQEQKSCIREKPYRYIECDKALNHGSHMTVRQVSHSGEKGYKCDLCGKVFSQKSNLARHWRVHTGEKPYKCNECDRSFSRNSCLALHRRVHTGEKPYKCYECDKVFSRNSCLALHQKTHIGEKPYTCKECGKAFSVRSTLTNHQVIHSGKKPYKCNECGKVFSQTSSLATHQRIHTGEKPYKCNECGKVFSQTSSLARHWRIHTGEKPYKCNECGKVFSYNSHLASHRRVHTGEKPYKCNECGKAFSVHSNLTTHQVIHTGEKPYKCNQCGKGFSVHSSLTTHQVIHTGEKPYKCNECGKSFSVRPNLTRHQIIHTGKKPYKCSDCGKSFSVRPNLFRHQIIHTKEKPYKRN

SEQ ID NO: 319846 - DNA, 1629 bp, Artificial Sequence
  derived and/or modified sequence
atgtgggagcacagaaaggagccctggaccatcgagagccaggtgagagtggccagaaagcccaagggctgggagtggatcaagggcgtgaagaccgacctgagcagaaactgcgtgatcaaggagctggccccccagcaggagggcaaccccggcgaggtgttccacaccgtgaccctggagcagcacgagaagcacgacatcgaggagttctgcttcagagagatcaagaagaagatccacgacttcgactgccagtggagagacgacgagagaaactgcaacaaggtgaccaccgcccccaaggagaacctgacctgcagaagagaccagagagacagaagaggcatcggcaacaagagcatcaagcaccagctgggcctgagcttcctgccccacccccacgagctgcagcagttccaggccgagggcaagatctacgagtgcaaccacgtggagaagagcgtgaaccacggcagcagcgtgagccccccccagatcatcagcagcaccatcaagacccacgtgagcaacaagtacggcaccgacttcatctgcagcagcctgctgacccaggagcagaagagctgcatcagagagaagccctacagatacatcgagtgcgacaaggccctgaaccacggcagccacatgaccgtgagacaggtgagccacagcggcgagaagggctacaagtgcgacctgtgcggcaaggtgttcagccagaagagcaacctggccagacactggagagtgcacaccggcgagaagccctacaagtgcaacgagtgcgacagaagcttcagcagaaacagctgcctggccctgcacagaagagtgcacaccggcgagaagccctacaagtgctacgagtgcgacaaggtgttcagcagaaacagctgcctggccctgcaccagaagacccacatcggcgagaagccctacacctgcaaggagtgcggcaaggccttcagcgtgagaagcaccctgaccaaccaccaggtgatccacagcggcaagaagccctacaagtgcaacgagtgcggcaaggtgttcagccagaccagcagcctggccacccaccagagaatccacaccggcgagaagccctacaagtgcaacgagtgcggcaaggtgttcagccagaccagcagcctggccagacactggagaatccacaccggcgagaagccctacaagtgcaacgagtgcggcaaggtgttcagctacaacagccacctggccagccacagaagagtgcacaccggcgagaagccctacaagtgcaacgagtgcggcaaggccttcagcgtgcacagcaacctgaccacccaccaggtgatccacaccggcgagaagccctacaagtgcaaccagtgcggcaagggcttcagcgtgcacagcagcctgaccacccaccaggtgatccacaccggcgagaagccctacaagtgcaacgagtgcggcaagagcttcagcgtgagacccaacctgaccagacaccagatcatccacaccggcaagaagccctacaagtgcagcgactgcggcaagagcttcagcgtgagacccaacctgttcagacaccagatcatccacaccaaggagaagccctacaagagaaactag

SEQ ID NO: 319847 - DNA, 1629 bp, Artificial Sequence
  derived and/or modified sequence
atgtgggagcaccggaaggagccttggaccatcgagtcgcaagtgcgcgttgctcggaaaccgaagggttgggagtggatcaagggggttaagaccgatttatctcgcaattgtgtgatcaaagagctggctcctcaacaggaggggaaccctggcgaggtcttccacaccgtgacccttgagcagcatgagaaacatgatattgaagagttttgctttcgagagataaaaaagaaaatccacgactttgactgtcaatggagagatgacgaacggaattgtaacaaggttaccactgcccctaaggaaaacctgacatgcaggcgagatcagagagacaggcgcggaatagggaataaaagtattaaacatcagctcggcctctcctttctgcctcatcctcatgaactgcagcagtttcaggccgaagggaaaatttacgaatgcaatcatgtggagaaaagcgtgaatcacggatctagcgtgtctccaccacagattatctcttccaccattaaaacccacgtgtcaaataagtacggaacagattttatttgttcttcactccttacacaggaacaaaaaagttgtatccgggaaaagccatacaggtacattgagtgtgataaagcccttaatcacggtagccatatgacagtacgacaggtctcccactctggggaaaaggggtacaagtgcgatctctgcggaaaagtcttctcgcagaagtcaaacttagcccgccattggcgggttcacactggggaaaagccatacaagtgcaacgaatgcgatcgttcattctcaaggaacagctgtctcgctcttcacagacgggttcataccggtgagaagccatataaatgctacgagtgcgataaggttttttcacgtaatagctgtctcgctctacaccagaaaacacatattggggagaagccttacacttgtaaggagtgcggtaaggccttttccgtgcgctctacccttaccaatcaccaagtgatccatagtggaaagaagccatacaaatgtaacgagtgtggaaaggtgttctctcagactagctccctcgcaacacaccagagaatccataccggcgagaaaccctacaagtgtaacgaatgtggaaaggtcttctcgcagacgtcttctcttgccagacattggcgcatccacactggcgaaaagccttacaagtgcaacgagtgcggcaaggttttcagctataattcccacctcgcatcacaccggcgtgtccacacaggagaaaaaccatacaaatgcaatgaatgcgggaaggctttttcagttcacagcaacttgactacccatcaggttatacacacaggcgaaaagccatataagtgcaaccagtgcggcaaaggcttttcggttcatagtagcctcacgacgcatcaggttattcacaccggagagaaaccatacaaatgcaatgagtgcggtaaatccttcagtgttcgtccaaaccttactcgacaccaaatcattcatactggaaaaaagccatataagtgttccgattgcggaaagtccttcagcgttagacccaatctatttaggcaccagataatccatacaaaggaaaagccatataagcgcaattag

SEQ ID NO: 319848 - DNA, 1629 bp, Artificial Sequence
  derived and/or modified sequence
atgtgggagcacaggaaggagccctggaccatcgagagccaggtgcgggtggccaggaagcccaagggctgggagtggatcaagggcgtgaagacagacctgagcaggaactgtgtgatcaaggagctggccccccagcaggagggcaaccctggagaggtgttccacacagtgaccctggagcagcacgagaagcatgacatcgaggagttctgcttccgggagatcaagaagaagatccatgactttgactgccagtggagagatgatgagaggaactgcaacaaggtgaccacagcccccaaggagaacctgacctgccggcgggaccagagggaccggcggggcatcggcaacaagagcatcaagcaccagctgggcctgtccttcctgccccacccccatgagctgcagcagttccaggccgagggcaagatctatgagtgcaaccacgtggagaagtctgtgaaccacggcagctctgtgagccccccccagatcatcagcagcaccatcaagacccacgtgagcaacaagtatggaacagacttcatctgcagcagcctgctgacccaggagcagaagagctgcatccgggagaagccctaccgctacattgaatgtgacaaggccctgaaccacggcagccacatgacagtgcggcaggtgagccacagcggggagaagggctacaagtgtgacctgtgtgggaaggtgttcagccagaagagcaacctggcccggcactggagggtgcacactggagagaagccctacaagtgcaatgaatgtgaccgctccttcagcaggaacagctgcctggccctgcaccggcgggtgcacactggagagaagccctacaagtgctatgaatgtgacaaggtgttcagcaggaacagctgcctggccctgcaccagaagacccacatcggggagaagccctacacctgcaaggaatgtgggaaggccttctctgtgcgcagcaccctgaccaaccaccaggtgatccacagcggcaagaagccctacaagtgcaatgaatgtgggaaggtgttcagccagaccagcagcctggccacccaccagaggatccacactggagagaagccctacaagtgcaatgaatgtgggaaggtgttcagccagaccagcagcctggcccggcactggaggatccacactggagagaagccctacaagtgcaatgaatgtgggaaggtgttctcctacaacagccacctggccagccaccggcgggtgcacactggagagaagccctacaagtgcaatgaatgtgggaaggccttctctgtgcacagcaacctgaccacccaccaggtgatccacactggagagaagccctacaagtgcaaccagtgtgggaagggcttctctgtgcacagcagcctgaccacccaccaggtgatccacactggagagaagccctacaagtgcaatgaatgtgggaagagcttctctgtgcggcccaacctgaccaggcaccagatcatccacacaggcaagaagccctacaagtgcagcgactgtgggaagagcttctctgtgcggcccaacctcttccgccaccagatcatccacaccaaggagaagccctacaagagaaattag

SEQ ID NO: 319849 - DNA, 1629 bp, Artificial Sequence
  derived and/or modified sequence
atgtgggagcaccggaaggagccctggaccatcgagagccaggtgagagtcgctaggaagcctaaaggctgggagtggataaagggagtgaagacagacctgagcagaaattgtgttatcaaagagctggcccctcagcaagagggaaatccaggggaagtgtttcacacagtgaccttagagcagcacgaaaaacatgatattgaggagttctgctttagggaaataaagaagaagatacatgacttcgattgccagtggcgagacgacgaacgcaactgcaataaagtgaccacggcgcccaaggaaaaccttacctgtagaagagaccaacgagaccggcgaggcatcggaaacaaatcaattaagcaccaactgggtctgtcctttctcccccatccccatgaattacagcagttccaggccgaaggcaagatttacgaatgtaaccatgtggaaaaaagcgtgaaccacggttcatccgtgtctccaccgcagatcatctcatccacaatcaagacacacgttagcaacaaatatggaacagactttatatgttcctccttattgacgcaagagcagaagagctgcatcagagaaaagccatataggtacattgagtgcgataaagcacttaaccacgggagccacatgactgtgcggcaggtttcccatagtggggagaaaggctataaatgtgatctttgcggcaaagtattctcccagaaatcaaatctcgcgcgtcactggcgagttcacaccggtgaaaagccctataagtgtaacgagtgtgaccgctcttttagccggaatagctgcctggccctccacagacgggtgcatacgggagagaagccgtacaagtgttatgagtgtgacaaggtcttcagtagaaatagctgtttggccctgcaccagaaaacgcacatcggagagaagccctacacatgcaaggaatgcggaaaagcattcagcgttcgcagcaccctgacaaatcaccaggtgatccattctggaaagaaaccatataagtgcaatgagtgtgggaaggtgttttcccagacctccagcctggccactcatcagcgaatacacaccggcgagaagccctataaatgtaacgagtgcgggaaggttttctcccaaacctcttcactcgcgcgtcattggaggatacatacaggcgaaaaaccctacaagtgcaatgagtgtggcaaagtctttagctacaactcacaccttgctagtcacaggcgcgtgcataccggcgagaagccatacaaatgtaacgaatgcggtaaggcatttagtgtacattccaatctaacaacacaccaggtgatacacacaggggagaagccatataagtgcaaccagtgcggaaaagggttctccgtacactcatcccttaccacccaccaggtcattcacacgggggaaaaaccttataaatgtaacgagtgcggtaaatcgttttccgtgcggccgaaccttactaggcatcagatcatccatacagggaagaagccgtataagtgtagcgactgcggtaagtctttctcagtacgccccaacttgtttcgtcaccagattatccatactaaagagaagccctataaacgtaactag

SEQ ID NO: 319850 - DNA, 1629 bp, Artificial Sequence
  derived and/or modified sequence
atgtgggagcaccgcaaagaaccatggacaatagagtcccaagtgcgcgttgcacggaaaccaaaagggtgggagtggatcaagggtgtgaaaactgatctgagcagaaactgtgtgattaaagaattggcccctcaacaggaagggaatcccggtgaagtgtttcataccgtaactctggagcagcacgaaaagcatgatatcgaagagttctgctttagggaaatcaagaagaaaattcatgactttgattgccagtggcgtgatgacgagagaaattgcaataaggtgacaactgctccaaaggagaacctcacctgcaggcgggaccagagagacaggcgcggtatagggaacaagagtattaagcaccagctcgggctaagctttctgccccacccacatgagttacagcagtttcaggccgaaggaaagatctacgagtgcaaccacgttgagaagtctgtgaaccacggtagctcagtcagcccgcctcagatcatcagctccaccattaaaacgcacgtctcgaacaagtatggaacggacttcatctgctcctctctgctcactcaggagcagaaatcctgtatccgagagaagccctatcggtacatcgaatgcgacaaggccctaaatcacggatcgcacatgaccgtcagacaagtgagccactcaggcgagaagggatataagtgtgacttgtgtggtaaagtgttttctcagaagtcaaacctagctcggcactggcgcgtccacacaggggaaaagccatacaagtgcaacgaatgcgacagatcattctctcgaaactcatgtcttgccttgcacaggcgcgtgcacactggtgagaagccttacaagtgttacgagtgtgataaggtgttttctcggaacagctgtttagctttacatcagaaaacccatataggcgagaaaccctacacctgtaaagaatgtggcaaggcattttctgtgagatccacattgactaaccaccaggtgattcattccggtaaaaaaccctacaaatgtaacgagtgtggcaaggtgttttcccaaaccagctccctggcaacacatcagagaattcacacaggagaaaagccttataaatgcaatgagtgtggcaaagtcttctctcagacaagcagccttgctcggcactggaggatccacactggagagaaaccttacaagtgtaatgagtgcggcaaggtcttcagttacaactcgcatctggcctcccatcggagggtccatactggggaaaagccatacaagtgtaacgaatgtggcaaggccttttctgtccattctaatctaactactcaccaagtcattcatactggtgagaaaccttataaatgcaaccagtgcggcaaggggtttagtgtgcactctagtctgaccacacaccaggttatacatacaggagagaaaccgtataagtgtaacgagtgtgggaaaagcttctcagtgcgcccaaatctcactcggcaccagattatacacaccggaaagaaaccctacaagtgttccgactgcgggaaaagtttttcggttaggcctaacctgttccggcaccagatcatccataccaaagagaagccatacaaacggaattag

SEQ ID NO: 319851 - DNA, 432 bp, Artificial Sequence
  derived and/or modified sequence
atggggacacttagcgcgccaccctgtacccagcggatcaaatggaagggactccttcttactgcgtccctgcttaacttttggaatctgcctactaccgctcaagtcaccatcgaggctgaaccgactaaagtttcggagggaaaggatgtcttgttactagtacataatttaccacagaacctcactggatatatttggtataagggacaaatgcgcgacctctatcattatattactagttatgtcgtggacggggaaattataatatacggaccggcctattcgggcagagagactgcttatagtaatgctagccttttgatacagaacgtcacccgcgaggatgccggaagttataccctccatatcatcaagggggacgatggtaccagaggggtaacgggcaggtttaccttcactctgcattag

SEQ ID NO: 319852 - DNA, 432 bp, Artificial Sequence
  derived and/or modified sequence
atgggcaccctgagcgccccaccctgcacccagaggatcaagtggaagggcctgctgctgacagccagcctgctgaacttctggaacctgcccaccacagcccaggtgaccatcgaggccgagcccaccaaggtgtctgagggcaaggatgtgctgctgctggtgcacaacctgccccagaacctgaccggctacatctggtacaagggccagatgagggacctgtaccactacatcaccagctatgtggtggatggagagatcatcatctacggccctgcctacagcggccgggagacagcctacagcaatgccagcctgctgatccagaatgtgaccagagaagatgctggcagctacaccctgcacatcatcaagggagatgatggcacccggggcgtgacaggccgcttcaccttcaccctgcactag

SEQ ID NO: 319853 - DNA, 432 bp, Artificial Sequence
  derived and/or modified sequence
atgggcaccctgagcgcccccccctgcacccagcggatcaagtggaaaggcctcttgttaacggcgtctttattgaatttttggaatctgcccacaacggctcaggtcactattgaagcagagccgaccaaggtgtcagagggcaaagatgttttgctgctcgtgcacaatttgccccagaacctgaccggttacatctggtacaaaggccaaatgagagatctgtaccattacattacaagctacgtggtcgacggagagatcattatctatggacctgcctattccggacgcgagactgcttattccaatgcatctcttctcatacaaaatgtgacgcgagaggatgccggttcttatactctgcatatcattaaaggcgacgacggtacgcgcggggttacaggcagatttactttcacgctgcactag

SEQ ID NO: 319854 - DNA, 432 bp, Artificial Sequence
  derived and/or modified sequence
atggggaccctctccgcaccgccttgtacccagcggatcaagtggaagggattactattgactgcctccttgttaaatttctggaatctgcccaccaccgcgcaggtcacgatcgaagccgagccaaccaaagtctccgagggcaaggatgtcttattactggttcacaacctaccccagaatctgactgggtatatctggtacaaagggcagatgcgggatctctaccattacatcacgtcctacgtggttgacggcgagatcattatctatggaccggcatactccggcagagaaaccgcgtactctaatgcaagcctcctgatccagaacgtgacacgggaagatgcaggatcatacacccttcacatcattaagggcgacgatggtactcggggtgtaaccggcaggtttactttcaccctgcactag

SEQ ID NO: 319855 - DNA, 432 bp, Artificial Sequence
  derived and/or modified sequence
atgggcaccctgagcgcccccccctgcacccagagaatcaagtggaagggcctgctgctgaccgccagcctgctgaacttctggaacctgcccaccaccgcccaggtgaccatcgaggccgagcccaccaaggtgagcgagggcaaggacgtgctgctgctggtgcacaacctgccccagaacctgaccggctacatctggtacaagggccagatgagagacctgtaccactacatcaccagctacgtggtggacggcgagatcatcatctacggccccgcctacagcggcagagagaccgcctacagcaacgccagcctgctgatccagaacgtgaccagagaggacgccggcagctacaccctgcacatcatcaagggcgacgacggcaccagaggcgtgaccggcagattcaccttcaccctgcactag

SEQ ID NO: 319856 - protein, 616 aa, Artificial Sequence
  derived and/or modified sequence
MAPPPPPLAASTPLLHGEFGSYPARGPRFALTLTSQALHIQRLRPKPEARPRGGLVPLAEVSGCCTLRSRSPSDSAAYFCIYTYPRGRRGARRRATRTFRADGAATYEENRAEAQRWATALTCLLRGLPLPGDGEITPDLLPRPPRLLLLVNPFGGRGLAWQWCKNHVLPMISEAGLSFNLIQTERQNHARELVQGLSLSEWDGIVTVSGDGLLHEVLNGLLDRPDWEEAVKMPVGILPCGSGNALAGAVNQHGGPSWGDRDPYISHSAKPTVSQVNQPACGMLTPSSWTFLPACFPAVSRAPRTLPGMGGTQALGSARFTLGTVLGLATLHTYRGRLSYLPATVEPASPTPAHSLPRAKSELTLTPDPAPPMAHSPLHRSVSDLPLPLPQPALASPGSPEPLPILSLNGGGPELAGDWGGAGDAPLSPDPLLSSPPGSPKAALHSPVSEGAPVIPPSSGLPLPTPDARVGASTCGPPDHLLPPLGTPLPPDWVTLEGDFVLMLAISPSHLGADLVAAPHARFDDGLVHLCWVRSGISRAALLRLFLAMERGSHFSLGCPQLGYAAARAFRLEPLTPRGVLTVDGEQVEYGPLQAQMHPGIGTLLTGPPGCPGREP

SEQ ID NO: 319857 - DNA, 1851 bp, Artificial Sequence
  derived and/or modified sequence
atggcccccccccccccccccctggccgccagcacccccctgctgcacggcgagttcggcagctaccccgccagaggccccagattcgccctgaccctgaccagccaggccctgcacatccagagactgagacccaagcccgaggccagacccagaggcggcctggtgcccctggccgaggtgagcggctgctgcaccctgagaagcagaagccccagcgacagcgccgcctacttctgcatctacacctaccccagaggcagaagaggcgccagaagaagagccaccagaaccttcagagccgacggcgccgccacctacgaggagaacagagccgaggcccagagatgggccaccgccctgacctgcctgctgagaggcctgcccctgcccggcgacggcgagatcacccccgacctgctgcccagaccccccagactgctgctgctggtgaaccccttcggcggcagaggcctggcctggcagtggtgcaagaaccacgtgctgcccatgatcagcgaggccggcctgagcttcaacctgatccagaccgagagacagaaccacgccagagagctggtgcagggcctgagcctgagcgagtgggacggcatcgtgaccgtgagcggcgacggcctgctgcacgaggtgctgaacggcctgctggacagacccgactgggaggaggccgtgaagatgcccgtgggcatcctgccctgcggcagcggcaacgccctggccggcgccgtgaaccagcacggcggccccagctggggcgacagagacccctacatcagccacagcgccaagcccaccgtgagccaggtgaaccagcccgcctgcggcatgctgacccccagcagctggaccttcctgcccgcctgcttccccgccgtgagcagagcccccagaaccctgcccggcatgggcggcacccaggccctgggcagcgccagattcaccctgggcaccgtgctgggcctggccaccctgcacacctacagaggcagactgagctacctgcccgccaccgtggagcccgccagccccacccccgcccacagcctgcccagagccaagagcgagctgaccctgacccccgaccccgccccccccatggcccacagccccctgcacagaagcgtgagcgacctgcccctgcccctgccccagcccgccctggccagccccggcagccccgagcccctgcccatcctgagcctgaacggcggcggccccgagctggccggcgactggggcggcgccggcgacgcccccctgagccccgaccccctgctgagcagcccccccggcagccccaaggccgccctgcacagccccgtgagcgagggcgcccccgtgatcccccccagcagcggcctgcccctgcccacccccgacgccagagtgggcgccagcacctgcggcccccccgaccacctgctgccccccctgggcacccccctgccccccgactgggtgaccctggagggcgacttcgtgctgatgctggccatcagccccagccacctgggcgccgacctggtggccgccccccacgccagattcgacgacggcctggtgcacctgtgctgggtgagaagcggcatcagcagagccgccctgctgagactgttcctggccatggagagaggcagccacttcagcctgggctgcccccagctgggctacgccgccgccagagccttcagactggagcccctgacccccagaggcgtgctgaccgtggacggcgagcaggtggagtacggccccctgcaggcccagatgcaccccggcatcggcaccctgctgaccggcccccccggctgccccggcagagagccctag

SEQ ID NO: 319858 - DNA, 1857 bp, Artificial Sequence
  derived and/or modified sequence
atggcccccccccccccccccctggccgccagcacccccctgctgcacggcgagttcggcagctaccccgccagaggccccagattcgccctgaccctgaccagccaggccctgcacatccagagactgagacccaagcccgaggccagacccagaggcggcctggtgcccctggccgaggtgagcggctgctgcaccctgagaagcagaagccccagcgacagcgccgcctacttctgcatctacacctaccccagaggcagaagaggcgccagaagaagagccaccagaaccttcagagccgacggcgccgccacctacgaggagaacagagccgaggcccagagatgggccaccgccctgacctgcctgctgagaggcctgcccctgcccggcgacggcgagatcacccccgacctgctgcccagaccccccagactgctgctgctggtgaaccccttcggcggcagaggcctggcctggcagtggtgcaagaaccacgtgctgcccatgatcagcgaggccggcctgagcttcaacctgatccagaccgagagacagaaccacgccagagagctggtgcagggcctgagcctgagcgagtgggacggcatcgtgaccgtgagcggcgacggcctgctgcacgaggtgctgaacggcctgctggacagacccgactgggaggaggccgtgaagatgcccgtgggcatcctgccctgcggcagcggcaacgccctggccggcgccgtgaaccagcacggcggcttcgagcccgccctgggcctggacctgctgctgaactgcagcctgctgctgtgcagaggcggcggccaccccctggacctgctgagcgtgaccctggccagcggcagcagatgcttcagcttcctgagcgtggcctggggcttcgtgagcgacgtggacatccagagcgagagattcagagccctgggcagcgccagattcaccctgggcaccgtgctgggcctggccaccctgcacacctacagaggcagactgagctacctgcccgccaccgtggagcccgccagccccacccccgcccacagcctgcccagagccaagagcgagctgaccctgacccccgaccccgccccccccatggcccacagccccctgcacagaagcgtgagcgacctgcccctgcccctgccccagcccgccctggccagccccggcagccccgagcccctgcccatcctgagcctgaacggcggcggccccgagctggccggcgactggggcggcgccggcgacgcccccctgagccccgaccccctgctgagcagcccccccggcagccccaaggccgccctgcacagccccgtgagcgagggcgcccccgtgatcccccccagcagcggcctgcccctgcccacccccgacgccagagtgggcgccagcacctgcggcccccccgaccacctgctgccccccctgggcacccccctgccccccgactgggtgaccctggagggcgacttcgtgctgatgctggccatcagccccagccacctgggcgccgacctggtggccgccccccacgccagattcgacgacggcctggtgcacctgtgctgggtgagaagcggcatcagcagagccgccctgctgagactgttcctggccatggagagaggcagccacttcagcctgggctgcccccagctgggctacgccgccgccagagccttcagactggagcccctgacccccagaggcgtgctgaccgtggacggcgagcaggtggagtacggccccctgcaggcccagatgcaccccggcatcggcaccctgctgaccggcccccccggctgccccggcagagagccctag

SEQ ID NO: 319859 - DNA, 1851 bp, Artificial Sequence
  derived and/or modified sequence
atggctccaccaccgcctcctctcgccgccagtacgcccctgctccacggggaattcggtagttaccctgcacgcggtccccgctttgcacttaccctgacttcacaggccttgcacatccaacggcttaggcccaagccggaggccaggccacgtggcggcctggtgccacttgcagaggtgagtgggtgctgcactttgaggagtcgctcaccttcagactcagctgcctacttctgtatttacacgtacccgcgcggaaggaggggagcccgccgcagggccacacgaacattcagggctgatggggccgctacttacgaggagaacagggctgaagcccagcgctgggctaccgctttgacatgtctgctgagagggctgcccctacccggcgatggtgagattacacctgacctcctgccacgccccccccgccttttgctgctggtcaaccccttcggggggcggggcctggcttggcagtggtgcaagaaccacgtgttgcctatgatcagcgaggccggtctgtctttcaacttgatccagacagagagacagaatcatgctagggaacttgtgcaggggctgtcactctctgaatgggacggcatagtcacggtttcaggagacgggttgttgcatgaggtgctcaatggtctgctggatcggcctgattgggaagaggccgttaagatgcccgtcggaattctcccatgcggcagcgggaacgcactggcaggagccgtgaaccagcacggaggtccctcttggggcgatagagacccatacatctcccatagcgccaagccaaccgtgtcgcaggtgaaccagcctgcctgtggaatgttgactcccagctcgtggacattcctgccggcatgctttccagccgtcagcagagctcctagaacactccccggtatgggcggaactcaggcactggggagcgcccggtttactcttggaaccgtgctcgggttggctaccctgcacacataccgtggtaggttaagttacctgccagcaacagtggagcctgcctctcccacacccgcacacagccttcccagggccaagtctgagcttactctgacaccagatccagcacctcctatggcccattcccccctgcaccgttccgtgtccgacctgccacttccactcccccaacccgccttggcctccccaggttctcccgaacctcttcccatcctgtctcttaacgggggtggcccagagctcgcaggtgactgggggggcgccggggatgcccctctttcacccgatccccttctgtcctcaccgcccgggtctcctaaagccgctctacactccccagtgtctgagggagcacccgtcattcctccgagctcgggcctgcctctaccaacgccagacgctcgagtgggggcatcaacatgcggtccccctgaccatttgcttccccccctggggacgcccctgccccctgactgggtcactcttgagggcgatttcgttctaatgctggctatatctccaagccacctcggtgcagacctggtcgctgcccctcacgcccggttcgacgacgggctggtgcacttgtgctgggtaaggagcggcatcagtcgcgcagcgctgttgagactgtttctggcaatggagagggggtcccattttagcctgggttgccctcagctcggctatgctgccgccagggcctttagactggagccattaactcctagaggggtgctgacggttgatggtgagcaagtggagtacggccccctgcaggcgcagatgcaccctgggattggaaccttattgaccggccccccaggatgtcctggacgggagccctag

SEQ ID NO: 319860 - DNA, 1857 bp, Artificial Sequence
  derived and/or modified sequence
atggccccccctcctccacccctggccgcatccacccccctactgcacggggaattcgggtcataccctgccagaggcccgcggtttgctcttacactgaccagccaggctctgcacattcaaagacttcgaccaaagccagaggctcggcccagagggggcctggtacccctggcagaggtgtccggatgctgcacactgcgctcccggagtccctctgacagcgctgcctatttctgtatctacacctatcccaggggcaggagaggagccagacgccgagcaacaaggaccttccgtgctgacggggcagctacctatgaagaaaaccgggcagaggctcagcgatgggccacagccttgacttgcctgttgagagggctacccttgccgggggatggcgaaatcacacctgacctgctgccgcgcccgccgaggctgcttttgttagtgaatcctttcggggggcgaggtctagcatggcagtggtgtaaaaatcacgttctgcctatgatctctgaagcaggactcagcttcaatttgattcagactgaaagacaaaatcacgctagggaactcgtgcaaggactgagcttaagtgagtgggacggcatagtgacggttagtggagacggcctgctccatgaggtgctgaacggtctgctagatcgcccagattgggaagaagccgtgaagatgcctgttggtatcctgccttgcggctctgggaacgcccttgctggcgccgtgaatcagcacggggggtttgaaccagcgctgggtcttgacctcctgttgaactgctcccttcttctctgtcgcggcggaggacacccgttggatctactgtcagtgacgttagcatcagggtcgcgctgcttttcattcttgagcgtggcatggggctttgtatctgatgtggatatccagagcgagcgctttcgtgcgcttggatctgctagattcactctcggcaccgtattaggcctcgctaccctgcatacttatcggggcagattgtcctacctgccagcaactgtcgagccggcaagtcccacaccggcccatagtctgcccagagccaagtcagaactgactcttacccctgaccccgctccccctatggcccactctcctctgcatcggtctgtgtccgatctccctcttcccctcccccagcccgccctggcatcccctgggtcgcccgagccccttccaatcttgagcctcaatggcggtggcccagaattggcgggcgattggggcggtgccggtgacgcccctctgagcccagatcctcttctgtcaagtccccccggaagtcccaaagccgctctgcacagtcccgtgtctgagggagccccagtgatcccgccatctagtggcctgcctctccccacccctgacgccagggtcggtgcgtctacttgcggtccacctgatcacttgcttccaccactcggaaccccactcccgcctgactgggtcactcttgagggagacttcgttttaatgctcgccattagcccatcccatctgggcgctgatctagtcgctgccccacacgcgcggttcgacgacggcctagtccatttgtgttgggtcagatccggcatttctagagcggctctgcttcgcctgttcttggctatggagcgaggatcccatttcagcttagggtgcccacagctggggtacgccgcagcaagagccttccggctcgaaccacttacgccccgaggcgttcttaccgtggacggggagcaggtggagtacggacccctgcaggcacagatgcacccgggaatcggcactttgcttaccggaccaccaggttgcccaggaagggagccatag

SEQ ID NO: 319861 - DNA, 1851 bp, Artificial Sequence
  derived and/or modified sequence
atggcccctcctcctccacccctggccgccagcacccccctgctgcacggggagtttggcagctacccagcccggggccccaggtttgccctgaccctgaccagccaggccctgcacatccagaggctgcggcccaagccagaggcccggccccggggcggcctggtgcccctggccgaggtgtctggctgctgcaccctgcggagccgcagccccagcgacagcgctgcctacttctgcatctacacctacccccggggccggcggggggccaggagaagagccaccaggaccttccgggcagatggagctgccacctatgaagaaaatagagctgaggcccagcgctgggccacagccctgacctgcctgctgcggggcctgcccctgcctggagatggagagatcaccccagacctgctgccccggcccccccggctgctgctgctggtgaacccctttggaggccggggcctggcctggcagtggtgcaagaaccacgtgctgcccatgatcagcgaggccggcctgtccttcaacctgatccagacagagcggcagaaccacgcccgggagctggtgcagggcctgagcctgtctgagtgggatggcatcgtgacagtgtctggagatggcctgctgcacgaggtgctgaatggcctgctggacagaccagactgggaggaggccgtgaagatgcctgtgggcatcctgccctgtggcagcggaaatgccctggccggggctgtgaaccagcacggcggccccagctggggagaccgggacccctacatcagccacagcgccaagcccaccgtgtcccaggtgaaccagcctgcctgtggcatgctgacccccagctcctggaccttcctgcctgcctgcttccctgctgtgtcccgggcccccaggaccctgcccggcatgggcggcacccaggccctgggcagcgcccgcttcaccctgggcaccgtgctgggcctggccaccctgcacacctaccggggccgcctgagctacctgcctgccaccgtggagcccgccagccccaccccagcccacagcctgccccgggccaagtctgagctgaccctgaccccagaccctgccccacccatggcccacagccccctgcacaggtctgtgtctgacctgcccctgcccctgccccagcctgccctggccagccctggcagccctgagcccctgcccatcctgagcctgaatggaggcggccctgagctggccggggactggggcggcgctggagatgcccccctgagcccagaccccctgctgagcagccccccaggcagccccaaggccgccctgcacagccctgtgtctgagggcgcccctgtgatcccccccagcagcggcctgcccctgcccaccccagatgcccgggtgggcgccagcacctgtggccccccagaccacctgctgccccccctgggcacccccctgcccccagactgggtgaccctggagggggactttgtgctgatgctggccatcagccccagccacctgggcgctgacctggtggccgccccccacgccaggtttgatgatggcctggtgcacctgtgctgggtgcgcagcggcatcagccgggccgccctgctgcggctcttcctggccatggagcggggcagccacttcagcctgggctgcccccagctgggctatgctgctgcccgggccttccggctggagcccctgaccccccggggcgtgctgactgtggatggagagcaggtggagtatggccccctgcaggcccagatgcaccctggcatcggcaccctgctgaccggccccccaggctgccccggccgggagccctag

SEQ ID NO: 319862 - DNA, 1857 bp, Artificial Sequence
  derived and/or modified sequence
atggcccctcctcctccacccctggccgccagcacccccctgctgcacggggagtttggcagctacccagcccggggccccaggtttgccctgaccctgaccagccaggccctgcacatccagaggctgcggcccaagccagaggcccggccccggggcggcctggtgcccctggccgaggtgtctggctgctgcaccctgcggagccgcagccccagcgacagcgctgcctacttctgcatctacacctacccccggggccggcggggggccaggagaagagccaccaggaccttccgggcagatggagctgccacctatgaagaaaatagagctgaggcccagcgctgggccacagccctgacctgcctgctgcggggcctgcccctgcctggagatggagagatcaccccagacctgctgccccggcccccccggctgctgctgctggtgaacccctttggaggccggggcctggcctggcagtggtgcaagaaccacgtgctgcccatgatcagcgaggccggcctgtccttcaacctgatccagacagagcggcagaaccacgcccgggagctggtgcagggcctgagcctgtctgagtgggatggcatcgtgacagtgtctggagatggcctgctgcacgaggtgctgaatggcctgctggacagaccagactgggaggaggccgtgaagatgcctgtgggcatcctgccctgtggcagcggaaatgccctggccggggctgtgaaccagcacggcggctttgagcccgccctgggcctggacctgctgctgaactgcagcctgctgctgtgccggggcggcggccaccccctggacctgctgtctgtgaccctggccagcggcagccgctgcttctccttcctgtctgtggcctggggctttgtgtctgatgtggacatccagagcgagcgcttccgggccctgggcagcgcccgcttcaccctgggcaccgtgctgggcctggccaccctgcacacctaccggggccgcctgagctacctgcctgccaccgtggagcccgccagccccaccccagcccacagcctgccccgggccaagtctgagctgaccctgaccccagaccctgccccacccatggcccacagccccctgcacaggtctgtgtctgacctgcccctgcccctgccccagcctgccctggccagccctggcagccctgagcccctgcccatcctgagcctgaatggaggcggccctgagctggccggggactggggcggcgctggagatgcccccctgagcccagaccccctgctgagcagccccccaggcagccccaaggccgccctgcacagccctgtgtctgagggcgcccctgtgatcccccccagcagcggcctgcccctgcccaccccagatgcccgggtgggcgccagcacctgtggccccccagaccacctgctgccccccctgggcacccccctgcccccagactgggtgaccctggagggggactttgtgctgatgctggccatcagccccagccacctgggcgctgacctggtggccgccccccacgccaggtttgatgatggcctggtgcacctgtgctgggtgcgcagcggcatcagccgggccgccctgctgcggctcttcctggccatggagcggggcagccacttcagcctgggctgcccccagctgggctatgctgctgcccgggccttccggctggagcccctgaccccccggggcgtgctgactgtggatggagagcaggtggagtatggccccctgcaggcccagatgcaccctggcatcggcaccctgctgaccggccccccaggctgccccggccgggagccctag

SEQ ID NO: 319863 - DNA, 1851 bp, Artificial Sequence
  derived and/or modified sequence
atggcccccccccccccccccctggccgccagcacccccctgctgcacggcgaattcggctcatacccagcccgggggccccggtttgctctgactcttacctcccaggctcttcatatccagaggctgagacctaaaccagaggcccgccctagggggggcctagtgcctcttgctgaagtgagcggctgctgcactctccgttcgcgctcccccagcgactccgccgcttacttctgtatttacacttaccctcggggccgtcggggagctagacgccgcgctacccgaacctttagagctgatggagccgccacctatgaagagaatagggcggaagcccagagatgggccacagccttgacgtgcttgctgagaggcctgcccttgcctggtgatggagagatcaccccggaccttctaccgcgaccaccccgcctgctgctgttagtgaatccatttggtgggcgcggcctggcatggcagtggtgcaaaaatcacgtcttgccaatgatatcagaagccggactgtccttcaacttaatccagacggaacgccagaatcacgccagagagcttgtccaggggctctcactgtccgagtgggatggtattgtgactgtgtctggcgatggactcctgcacgaggtgttgaacggcctgctggacaggccagactgggaggaagcagttaaaatgcctgtcggaattctgccgtgtgggtccgggaatgctcttgcgggcgcagttaaccagcacgggggccccagctggggtgatagagacccatatatctcccactcagcgaaaccaacagtttcccaggtgaaccaaccggcctgcggcatgctcaccccttcatcctggacatttctcccagcttgttttcctgcagttagtagagcacctagaactctgcccggcatgggtggcactcaggcactgggctcagccagatttaccctcgggacagttctcggattagctaccttgcatacttaccgggggcgtctttcttatttgcctgccaccgtggaacctgcctctcccactccggcccattctcttcccagagcaaagagtgaattgactctgacccccgatcctgcccctccaatggcccattctccattacaccgctcagtgtctgaccttccactacctctgccccagccggctttggccagcccaggatctccagagccgctgcctatcctgtctctgaatggcgggggacctgagctggccggagactgggggggtgccggcgacgcgcccttgagccctgatcctctgttgtcaagccccccaggctcacccaaagccgcattacattcaccagtgtcagaaggggcgccggtgattccaccaagtagtggcctgccgcttcctacccctgatgcccgggtgggtgcatctacatgcggccctcccgaccacctgctcccccctttggggacccccttgccgcccgattgggtgactttagaaggggacttcgtcctcatgctagctatctccccctcgcatcttggggctgacctggtggcagcgccgcacgcgcgatttgacgacggactggtccatctgtgttgggtgaggtccggaatttccagggctgctcttctacgcctttttctggctatggaacggggatcacacttctcgctggggtgtccccagctcgggtacgctgccgcacgggcctttaggctagaacccctgacgccgcgtggagtgctgaccgtggacggagaacaagtggagtatggccctttgcaagcgcagatgcatccggggatcggtacgctcttgacaggaccgccgggttgtcccgggcgggagccgtag

SEQ ID NO: 319864 - DNA, 1857 bp, Artificial Sequence
  derived and/or modified sequence
atggcccccccccccccccccctggccgccagcacccccctgctgcatggagaattcggatcatacccggctagggggcctaggttcgcactgacgctgacctcacaagccctccacatacaaaggcttcggccgaagcccgaggcccgtccccgcggaggcctcgtccctctcgccgaagtttcagggtgttgcacacttcgcagcaggtcacctagcgacagtgccgcgtatttctgcatttatacatacccgcggggacgacggggggccaggcggcgagcaacccgtacctttcgagctgatggagctgctacttatgaagagaatagagcagaggcccagcgatgggccacagctttgacatgcctcctccggggactaccactgccgggggatggtgagattaccccagacctgctgcctcgtcctccgagactgcttctattagtgaacccctttggtgggcgaggtctggcctggcaatggtgcaagaaccatgttctgccaatgattagtgaagcaggactgtccttcaacctgatccagaccgaacgacagaatcatgcgcgggaactggtccagggtctttccctgtccgagtgggacggcattgtgactgttagcggcgatggactgctccacgaggtcctcaatggcttactagataggcccgactgggaagaagccgtgaagatgcccgttggaatcttaccgtgtggcagtggcaatgccctagcaggggcggtcaaccagcatggaggatttgagccggccctcgggctggacttgctgctcaattgctctcttcttctttgccgtgggggcggacaccctctagatctgctttccgtcacactcgcctccggttctcggtgtttctcttttctaagtgtagcgtggggattcgtgagtgatgtggatattcaatcagagcgatttcgagcacttggaagcgctcggttcaccttgggaaccgttctcggcctggcaacactgcacacttacagaggccgcttgagttacctgcccgccactgtggagcccgcgtcacctactcccgcccattccctccctcgcgccaagagcgagttgactctcacgccagatccggcacctccgatggcacactctccgctccatcggtcggtctcagatctgcccctgcccttaccacagccagccctggctagcccagggagccctgagccactcccaattctctccttgaacggcggcggtcctgagttggctggggattggggcggtgccggcgatgctcccttgagtccggaccccttactgtctagtccaccaggaagtcctaaggccgccctccatagccccgttagtgaaggcgcgcctgtcatccctccttccagcggcctccccttaccaacgccagacgctagggtgggtgcttctacttgtggtcctccagatcatctccttccgcccctgggtacccctttgccccccgattgggtcacactggagggagacttcgtgctcatgcttgccataagccctagtcatctgggcgcggatctggtcgccgctcctcatgcccgatttgatgatggtcttgtgcacctttgttgggttaggagcggtattagcagggcagctttgctgcggctgtttttggcaatggagcgggggtcacatttctctcttggatgtccccaactggggtatgcagcggcgcgcgctttccgcctggagccgctcaccccgaggggcgtgctgactgtagacggagaacaggttgaatacggaccactgcaggcccagatgcatcctggcataggaaccttactgaccgggcctcccggctgccccggaagagagccctag

SEQ ID NO: 319865 - DNA, 1851 bp, Artificial Sequence
  derived and/or modified sequence
atggcaccgcctccaccccctctggcagcaagcacaccgctgcttcatggcgaatttggttcttaccctgcacgcggacccaggttcgcccttacactgacaagtcaggccctccatatccagaggttgaggcctaagcctgaggcaaggcctcggggtggcctcgtcccactggctgaagtatcaggatgctgcaccttgagaagcagaagtccttcggattcggcagcctatttctgcatctatacgtaccctagaggtagaaggggagcaagacggagagcaactagaacttttagggcagacggggctgccacctatgaggaaaatagggccgaagctcagcgttgggcaacagctctaacttgcctcttgcggggattgcctcttcctggggatggggagatcacacctgatttgctcccgcgacccccacgcctcctgcttcttgtcaatccatttggtggtcggggtctggcctggcaatggtgtaaaaaccacgtcctgccaatgatctctgaagcgggactgagctttaatctgatccagactgaacgacagaaccacgcgcgagagctggtacaggggctatccttgtctgagtgggacggaatcgtgacagtatcaggtgacggtctcctgcacgaagttctcaacggactgctagatagacctgactgggaggaggcagtcaagatgccagtgggcatacttccttgtgggagcggaaatgcgctggccggtgccgttaaccaacacggcggaccaagctggggagatagagatccatacataagccacagtgcaaagcccactgtctcacaagtaaaccagcccgcatgtggaatgcttactccgtctagctggacgtttcttcctgcatgcttcccagctgtgagccgggctccacgaactctgcctgggatggggggtacgcaagctctcggttcagcgagattcacattggggacagttctcggccttgctactctgcatacatatcgcggtcggctgagctatttgccagccacagtcgagccagccagccctacgcccgctcattcgctgcctcgcgctaaaagtgagttgacccttactcccgaccctgccccacccatggcacatagccccctgcacagaagcgttagtgacctccctctgcccctgccacaacccgctctggcttcgccaggcagccccgaaccgctccccattctctctcttaacggcggaggccctgagctcgccggagactggggaggtgctggcgacgccccactgtcacctgacccacttttgtcttcaccacctgggtcacccaaagcggcactccactctcccgtctcagagggcgctccagtcatccccccatctagcggtctgcccctccctacccccgacgcacgagtcggagcctcaacttgcgggccaccagatcacctgctcccaccgctggggactccgcttccgccagactgggttacactagaaggagattttgtcctgatgctggcgatctccccatctcacctgggcgctgatctggttgccgctccacacgcccgtttcgacgacggcctggtgcatctgtgctgggtcaggtcaggtatttcccgggcagctcttttacggctgttcctggcaatggagcgaggcagccacttctccctcggctgtccccagctgggatacgccgcagccagggctttccgcttggagcctctcacacccagaggcgttcttaccgtagatggcgagcaggtggagtatgggcctctccaggcacaaatgcatcccggaatcggaactttgctgacaggaccccctggctgtccagggagggagccgtag

SEQ ID NO: 319866 - DNA, 1857 bp, Artificial Sequence
  derived and/or modified sequence
atggcccctccccctccccctctggccgcaagtaccccactgctgcacggtgagtttggatcttatcccgcacgcggtcctagattcgctctcacactgacctcacaggctctgcatattcaaagactccggccaaagcccgaggcacgaccacgaggaggtcttgtgccgctcgccgaagtgtcgggttgctgcaccttgcgctctagaagtccatcagacagcgccgcatatttttgtatatacacttatccaagagggaggcggggtgccagacggagagcaaccaggacatttcgcgctgacggcgcagcgacatacgaggagaaccgagctgaggcccagcgctgggctacggctctcacctgcctcctacgcggtctacccctgcctggggacggcgagataactccggatctgctgcctagaccccctcgtcttcttttgctagtgaatccatttggcggaagaggactggcctggcagtggtgtaaaaaccacgtactgccaatgatctccgaagctgggctctcgtttaacctgatccagaccgaaagacagaaccacgccagagaactggtgcaaggactttcactgagtgaatgggacggcatcgtgaccgtaagcggcgacggactgctgcatgaggtactcaacggcctgcttgataggccagactgggaagaggccgtgaagatgcctgtgggaatcctgccttgtggctcaggcaatgctttggccggtgcggttaatcagcacggtggcttcgagccggcactgggtctcgacctgcttctgaactgctctttgctgctctgtcgcggtggagggcaccccctggaccttctgagcgttaccctggcctccggcagtagatgctttagtttccttagcgtagcatgggggtttgtgagcgatgtcgacattcagagcgagaggttccgggcactggggtccgcacgattcacattggggaccgtcctggggctggcgacactccacacctatagaggaaggctaagctacctgcctgccactgtggaaccagcgagtccgacacctgctcactcattgcccagggccaaatcagagctgaccctcacgcctgacccggcaccccctatggctcatagccccctgcacagaagtgtttccgacttgcccctgccactgccccagcctgccctcgccagccccggaagccccgagcctctcccgatcctgagcttaaatggcggaggtccagagcttgctggagactgggggggagcgggagacgccccactgtcccccgatccactgttatcctcccccccagggtcacccaaagccgcactgcattcacctgtctctgaaggtgcacctgtcatacccccatcgtccggactcccattgcccacccccgacgcccgtgtgggtgcctcaacttgcgggccacctgatcacctgcttccccctctaggcacccctctgccccctgactgggtgacccttgaaggagacttcgtgctgatgctggccatcagtcccagccacctcggtgcagaccttgttgctgcacctcatgcccgattcgacgacggtcttgttcacctctgttgggttcgctctggaatctcgagggctgcattgctgaggctcttcctcgctatggagagaggatcacatttttcactgggctgtccacagctcggttacgcggctgctagagcgttcagactggaaccactgacccccaggggggtgctgacagtggatggggagcaagtggagtatggacctttgcaggcccagatgcatcctggcataggtacactgctgactggtccccctggatgtcccggacgtgagccctag

SEQ ID NO: 319867 - DNA, 150 bp, Artificial Sequence
  derived and/or modified sequence
atgaacggccacctggaggccgaggagcagcaggaccagagaagccccctgacctgctacctgggcagacccggctgcttctactggagcatccccctgggcgtgggcgcctggcccggcagcggcgtgagaaccacctgcttcccctag

SEQ ID NO: 319868 - DNA, 150 bp, Artificial Sequence
  derived and/or modified sequence
atgaacggccatctcgaggccgaggagcaacaggatcagaggtcacccctgacctgctacctgggccgccccggctgcttttattggagtattcctctaggagtcggagcatggccaggttccggagtgagaacaacctgcttcccctag

SEQ ID NO: 319869 - DNA, 150 bp, Artificial Sequence
  derived and/or modified sequence
atgaatggccacctggaggccgaggagcagcaggaccagaggagccccctgacctgctacctgggccggcccggctgcttctactggagcatccccctgggcgtgggcgcctggccaggcagcggcgtgaggaccacctgcttcccctag

SEQ ID NO: 319870 - DNA, 150 bp, Artificial Sequence
  derived and/or modified sequence
atgaacggccacctggaggccgaggagcagcaggaccagcggagccctctcacttgttacttagggcgacctggctgcttctattggtccattcctttaggggtcggagcatggcctggatcaggggtgcggacgacgtgttttccatag

SEQ ID NO: 319871 - DNA, 150 bp, Artificial Sequence
  derived and/or modified sequence
atgaatggccaccttgaggctgaagaacagcaggaccaaaggagccccctgacctgctatttagggaggccgggatgtttttattggagtatacctctaggggttggcgcttggcctggtagcggggttaggacaacctgtttcccttag

SEQ ID NO: 319872 - protein, 1461 aa, Artificial Sequence
  derived and/or modified sequence
MEARSRSAEELRRAELVEIIVETEAQTGVSGINVAGGGKEGIFVRELREDSPAARSLSLQEGDQLLSARVFFENFKYEDALRLLQCAEPYKVSFCLKRTVPTGDLALRPGTVSGYEIKGPRAKVAKLNIQSLSPVKKKKMVPGALGVPADLAPVDVEFSFPKFSRLRRGLKAEAVKGPVPAAPARRRLQLPRLRVREVAEEAQAARLAAAAPPPRKAKVEAEVAAGARFTAPQVELVGPRLPGAEVGVPQVSAPKAAPSAEAAGGFALHLPTLGLGAPAPPAVEAPAVGIQVPQVELPALPSLPTLPTLPCLETREGAVSVVVPTLDVAAPTVGVDLALPGAEVEARGEAPEVALKMPRLSFPRFGARAKEVAEAKVAKVSPEARVKGPRLRMPTFGLSLLEPRPAAPEVVESKLKLPTIKMPSLGIGVSGPEVKVPKGPEVKLPKAPEVKLPKVPEAALPEVRLPEVELPKVSEMKLPKVPEMAVPEVRLPEVELPKVSEMKLPKVPEMAVPEVRLPEVQLLKVSEMKLPKVPEMAVPEVRLPEVQLPKVSEMKLPEVSEVAVPEVRLPEVQLPKVPEMKVPEMKLPKVPEMKLPEMKLPEVQLPKVPEMAVPDVHLPEVQLPKVPEMKLPEMKLPEVKLPKVPEMAVPDVHLPEVQLPKVPEMKLPKMPEMAVPEVRLPEVQLPKVSEMKLPKVPEMAVPDVHLPEVQLPKVCEMKVPDMKLPEIKLPKVPEMAVPDVHLPEVQLPKVSEIRLPEMQVPKVPDVHLPKAPEVKLPRAPEVQLKATKAEQAEGMEFGFKMPKMTMPKLGRAESPSRGKPGEAGAEVSGKLVTLPCLQPEVDGEAHVGVPSLTLPSVELDLPGALGLQGQVPAAKMGKGERVEGPEVAAGVREVGFRVPSVEIVTPQLPAVEIEEGRLEMIETKVKPSSKFSLPKFGLSGPKVAKAEAEGAGRATKLKVSKFAISLPKARVGAEAEAKGAGEAGLLPALDLSIPQLSLDAHLPSGKVEVAGADLKFKGPRFALPKFGVRGRDTEAAELVPGVAELEGKGWGWDGRVKMPKLKMPSFGLARGKEAEVQGDRASPGEKAESTAVQLKIPEVELVTLGAQEEGRAEGAVAVSGMQLSGLKVSTAGQVVTEGHDAGLRMPPLGISLPQVELTGFGEAGTPGQQAQSTVPSAEGTAGYRVQVPQVTLSLPGAQVAGGELLVGEGVFKMPTVTVPQLELDVGLSREAQAGEAATGEGGLRLKLPTLGARARVGGEGAEEQPPGAERTFCLSLPDVELSPSGGNHAEYQVAEGEGEAGHKLKVRLPRFGLVRAKEGAEEGEKAKSPKLRLPRVGFSQSEMVTGEGSPSPEEEEEEEEEGSGEGASGRRGRVRVRLPRVGLAAPSKASRGQEGDAAPKSPVREKSPKFRFPRVSLSPKARSGSGDQEEGGLRVRLPSVGFSETGAPGPARMEGAQAAAV

SEQ ID NO: 319873 - protein, 1396 aa, Artificial Sequence
  derived and/or modified sequence
MEARSRSAEELRRAELVEIIVETEAQTGVSGINVAGGGKEGIFVRELREDSPAARSLSLQEGDQLLSARVFFENFKYEDALRLLQCAEPYKVSFCLKRTVPTGDLALRPGTVSGYEIKGPRAKVAKLNIQSLSPVKKKKMVPGALGVPADLAPVDVEFSFPKFSRLRRGLKAEAVKGPVPAAPARRRLQLPRLRVREVAEEAQAARLAAAAPPPRKAKVEAEVAAGARFTAPQVELVGPRLPGAEVGVPQVSAPKAAPSAEAAGGFALHLPTLGLGAPAPPAVEAPAVGIQVPQVELPALPSLPTLPTLPCLETREGAVSVVVPTLDVAAPTVGVDLALPGAEVEARGEAPEVALKMPRLSFPRFGARAKEVAEAKVAKVSPEARVKGPRLRMPTFGLSLLEPRPAAPEVVESKLKLPTIKMPSLGIGVSGPEVKVPKGPEVKLPKAPEVKLPKVPEAALPEVRLPEVELPKVSEMKLPKVPEMAVPEVRLPEVELPKVSEMKLPKVPEMAVPEVRLPEVQLLKVSEMKLPKVPEMAVPEVRLPEVQLPKVSEMKLPEVSEVAVPEVRLPEVQLPKVPEMKVPEMKLPKVPEMKLPEMKLPEVQLPKVPEMAVPDVHLPEVQLPKVPEMKLPEMKLPEVKLPKVPEMAVPDVHLPEVQLPKVPEMKLPKMPEMAVPEVRLPEVQLPKVSEMKLPKVPEMAVPDVHLPEVQLPKVCEMKVPDMKLPEIKLPKVPEMAVPDVHLPEVQLPKVSEIRLPEMQVPKVPDVHLPKAPEVKLPRAPEVQLKATKAEQAEGMEFGFKMPKMTMPKLGRAESPSRGKPGEAGAEVSGKLVTLPCLQPEVDGEAHVGVPSLTLPSVELDLPGALGLQGQVPAAKMGKGERVEGPEVAAGVREVGFRVPSVEIVTPQLPAVEIEEGRLEMIETKVKPSSKFSLPKFGLSGPKVAKAEAEGAGRATKLKVSKFAISLPKARVGAEAEAKGAGEAGLLPALDLSIPQLSLDAHLPSGKVEVAGADLKFKGPRFALPKFGVRGRDTEAAELVPGVAELEGKGWGWDGRVKMPKLKVSTAGQVVTEGHDAGLRMPPLGISLPQVELTGFGEAGTPGQQAQSTVPSAEGTAGYRVQVPQVTLSLPGAQVAGGELLVGEGVFKMPTVTVPQLELDVGLSREAQAGEAATGEGGLRLKLPTLGARARVGGEGAEEQPPGAERTFCLSLPDVELSPSGGNHAEYQVAEGEGEAGHKLKVRLPRFGLVRAKEGAEEGEKAKSPKLRLPRVGFSQSEMVTGEGSPSPEEEEEEEEEGSGEGASGRRGRVRVRLPRVGLAAPSKASRGQEGDAAPKSPVREKSPKFRFPRVSLSPKARSGSGDQEEGGLRVRLPSVGFSETGAPGPARMEGAQAAAV

SEQ ID NO: 319874 - DNA, 285 bp, Artificial Sequence
  derived and/or modified sequence
atgggagcactgtttaggctcttgcttcaggaacgcggaaaggctgcagagttctattcccgcggccggaagcagcgcaggcctagcgcttcatgtaccttcggcggcatctggtcttccggggtggacatgcttccaaacggagccgttggaagtctcacccagctaggaccaagcaggcctgtccttggtattgactactccaagaaggaatttagggggactgctgaaaacgtcaccggactgaatacaatcctccacttccggaagcgcactaggtcgtag

SEQ ID NO: 319875 - DNA, 4386 bp, Artificial Sequence
  derived and/or modified sequence
atggaggcgaggtctagaagcgccgaggaacttcgccgcgcggagctggtggaaatcatcgtagagactgaggcccaaacaggcgtctccggaataaatgtggccggaggagggaaagaaggaatcttcgttcgtgaactccgcgaggattcacccgcagcgcggtccctgtctctccaagaaggggatcagctcttaagcgcccgcgtcttctttgaaaacttcaaatacgaagatgcactgcggctgctccaatgcgctgaaccttacaaggtgtccttctgtctgaagaggactgtgccgaccggggacctggctttgcgccctggtactgtttccggatacgagatcaaaggcccccgggccaaggtggcaaaactgaatatacagagtctctctccagttaaaaaaaagaaaatggtgccaggcgctctcggagtgccagccgacttagcacccgtggatgtcgagtttagcttccccaagttcagccgccttcgtcggggactgaaagctgaggccgtgaagggtcccgtccccgccgcccctgcgagacggaggttacagctgccacgcttacgagtgcgggaagtggcagaagaggctcaggctgctcggctggccgctgcggcccccccaccccggaaagctaaggtcgaagctgaagttgccgccggcgctaggttcacggcaccacaggtcgaacttgtcgggcctagactgcccggcgcggaagtgggggtgccacaggtgtcggcccctaaggcagccccgtccgccgaagccgccggggggttcgccctacacctgcccactctgggtctcggagcccccgcgccccccgcggtcgaagcacctgctgttgggatacaagtacctcaggttgagctgcctgcactgccgagtttgcccactctccccaccctcccgtgccttgagaccagggaaggcgcggtctctgtcgtcgttcctacgctggacgtagcagcaccaaccgtgggagttgacttggcgctacctggagcggaggtggaagcacggggtgaagctcccgaggtggccctgaagatgccaagattaagtttccctaggttcggggccagagcaaaagaagtcgcggaggcaaaagtggcaaaggtgagccccgaggcccgggtgaagggccctaggttgcgcatgcccacgttcggattatctctgctagagcccaggcctgctgcccccgaggtcgtcgaatcaaaactaaagttaccaacaatcaagatgccctccctgggcatcggggtgagtggccccgaagtgaaagttccgaaaggacccgaagtgaagttgcccaaagcaccagaggtgaaactgcccaaggtccccgaggccgcactgcctgaggtgcgactgcctgaggtagaactgccaaaggttagtgaaatgaagttgccaaaagtgccggaaatggcagtccctgaggttagactgcccgaggttgagttgcctaaagttagtgagatgaagttaccaaaagtccccgaaatggccgtgcccgaggtcaggctaccggaggttcaattgctgaaggtctccgagatgaagcttcctaaagtgccagaaatggccgtacctgaagtgcgcctacctgaggttcaactgccaaaagtctcagaaatgaaacttccggaggtctcggaggtggccgtgcccgaggtgaggctccctgaagtgcagctgcccaaggtgcctgaaatgaaggtaccagagatgaagttgcctaaggtccccgaaatgaaactgcccgagatgaagcttcctgaagtccaacttcccaaggtcccagagatggctgtgcccgatgtccacctgccagaagtgcagttgcccaaggtgcccgaaatgaaactcccggaaatgaagttacccgaagtgaaactgccaaaagtgccagaaatggcagtccccgatgtgcatctgcctgaggtgcaactgcccaaggtcccagaaatgaagcttcccaaaatgccagagatggccgtccctgaggttcgcctaccagaggtacagctgccaaaggtgagcgagatgaagctccctaaagtcccggagatggcagttcccgacgttcacctcccagaagtgcagttgccaaaagtgtgcgagatgaaggtaccagacatgaaacttcctgaaatcaaactgcctaaagttcccgagatggccgttccagacgtccatcttcccgaggttcaattacccaaagtgagcgagatccgattacctgagatgcaggtgccaaaagtgcctgatgtgcacctgccgaaagcccctgaggtcaaactacctagggcacctgaagtgcagctcaaggctacgaaggctgaacaagccgaaggtatggagttcggctttaagatgccaaaaatgacaatgccaaaactgggccgcgcagagtccccctctagaggcaaacccggggaagccggagccgaggtgagcggcaaactggtcaccctgccctgccttcagcctgaagtggatggagaggcacatgtcggcgtcccctctctgacgttgccatctgtggaactggatttacctggggccctgggtttgcagggacaggtgcctgccgccaagatgggcaaaggggagcgggtggagggcccagaggtcgctgccggtgtacgggaggtaggtttccgcgtgccaagcgtagagatcgtgacaccccagcttcctgccgtggagatcgaggaaggaagactcgagatgatcgagacaaaggtcaagccctcaagcaaattttccctccctaaatttgggctcagcggtccgaaagtcgctaaggcagaagcggagggcgccggaagagcaacaaagctgaaggtgtcaaagtttgctataagcctgccgaaagcccgcgtgggggcggaggcagaggcaaaaggcgccggtgaggctggtctgttacccgccctggaccttagtatcccacagcttagcttggatgcacacttgccgtcaggcaaagttgaagtcgctggcgcagacctgaagttcaaaggcccccgcttcgcgctgcctaagttcggggttagggggcgggataccgaagccgcagagctggtaccaggagtagccgagctggagggcaaggggtggggctgggacgggcgcgttaagatgcctaaattaaagatgcctagctttggactcgcccgcggcaaagaagccgaggttcaaggtgatagagcaagcccgggtgaaaaagctgagtcgacagctgtgcagctgaagattcccgaagtcgaactggttacgctcggcgcgcaggaggaaggccgtgcagagggcgccgttgccgtgagcggcatgcagctatctggactgaaagtgtcaaccgcaggacaggtggtgaccgagggacatgatgccggactccgcatgcccccgctaggcatctccctcccacaggtggaactcactggattcggtgaggcaggtaccccaggccagcaagcgcagtcaactgtgccttcggcagaaggcactgcagggtatcgcgttcaggtaccgcaggtaactctgtctctgcccggagcgcaagtggccggaggcgagctcctggtcggagaaggcgtctttaagatgccaaccgtgacagtgccacagctcgagctggatgtgggtttatctcgagaagcccaggctggagaagctgcaactggtgagggcggcctacggctaaaactgccaacgctcggagccagagccagagttgggggtgaaggcgccgaagagcagccaccaggcgctgagaggacattttgtttgagcctccctgatgtggagctgtctccgtcggggggcaatcacgcggagtaccaggtggccgagggtgagggcgaagcaggtcacaagctaaaggtgcggttgcccagattcggcctcgtccgcgccaaagaaggagctgaagaaggagagaaggcgaaatcaccaaaattgcgacttccacgggtgggattctcccagtccgaaatggtcaccggggaaggaagtccaagtcccgaggaggaagaagaggaggaggaggagggttccggggagggggccagcgggcggcgaggaagagtcagagtgcggctaccacgggtaggcttggccgcaccctccaaggcaagcaggggacaggagggggatgcagcaccaaaatcccccgtgagagaaaagtctccgaagttcagatttccacgggtcagcctcagtccaaaggcccgctccgggagtggggaccaggaagagggcgggctgcgtgtgagactcccatctgtgggattctccgaaaccggggcccctggtccggcaaggatggaaggcgcccaagctgccgctgtttag

SEQ ID NO: 319876 - DNA, 4191 bp, Artificial Sequence
  derived and/or modified sequence
atggaagcccgcagcagaagcgctgaggagttaaggagagcggagttagtggaaatcatcgtagagactgaggcccaaaccggagtgagcggcatcaacgtcgctggaggcggaaaagaaggcatctttgtgcgtgaactcagagaggactccccagcagcgcgaagcctctctttgcaggagggtgaccagctgctgtctgcacgggttttttttgaaaatttcaagtacgaggatgccctgaggcttctgcagtgtgccgaaccgtataaagtatcgttctgcttgaaaagaaccgtacctacgggggatctggccttgagaccaggaacagtatctggctacgaaattaaaggcccgagagctaaagttgccaagttgaacatacaatcactaagtccggtcaagaagaagaagatggtgcctggggcattaggggtgcctgcagacctcgcaccagtggatgtggaattcagcttccctaaattttctagacttaggcgcggacttaaagcggaggccgtcaagggccccgtccccgcggccccagccagaaggcggctgcagcttcctaggcttcgcgtacgcgaggtggccgaagaggcgcaggcagcgcgactggccgccgctgctcccccccccagaaaagccaaggtggaggctgaggtggcagcaggggcaaggttcaccgcccctcaggttgagctagttggaccccggttacccggcgctgaggttggagtgccccaagtgtcagcccctaaggcagccccatcggcagaagctgcgggcggattcgccctgcacctgcccacgctcgggctcggcgcaccagcaccccctgctgtggaggcacccgctgtagggattcaagttccccaggtcgaattgcctgcgttgccgtccctgccaaccctacctaccctgccatgtcttgaaacccgagagggagcagtgtcagtcgtcgtgcccacgttggacgtggctgcgccgacagttggtgtcgacctggcactccccggcgccgaagtcgaagcccgcggggaggcccctgaggtcgcccttaagatgccacgcctctcgtttcctcggttcggggcacgggcaaaggaagtggccgaagcaaaggtagccaaggtctctccagaggccagggtgaaggggcctagattaaggatgccaactttcgggctgtctcttctcgagccccggcccgctgcccccgaggtcgtggaaagtaaattgaaactccccactattaaaatgccaagcctcggtattggcgtgagcggccccgaggtcaaagtgcccaagggacccgaggtgaagctccctaaggcccccgaagtcaaacttcccaaggttcctgaggcagcattgcccgaggtccggcttcctgaggttgaattacctaaggtgtctgagatgaagctgcccaaggtaccagaaatggccgttcccgaagtacgacttcccgaggttgaattaccaaaggtgagtgaaatgaaactgcccaaagtccccgagatggctgtcccggaagtgagactccctgaggttcagctgttgaaagtcagtgagatgaagctaccaaaagtgccagagatggccgtgcccgaggtacggctgccggaagtgcagctcccgaaggtcagcgagatgaaactgcctgaagttagcgaagtggccgtgcctgaggtcagacttccagaagttcaacttccaaaggtgccggaaatgaaagtgcctgagatgaaactgccgaaggtgccagaaatgaagctgccagagatgaaattgcccgaggtccagctacccaaagtcccggaaatggctgtcccagacgtgcatctcccagaagtccagctgccaaaagtcccggagatgaaactgcctgaaatgaagctaccggaggtgaagctcccaaaggtgcctgaaatggctgtccccgacgtgcatcttccggaagtgcagctgcctaaagtgcctgagatgaagctacccaaaatgcctgagatggccgtgcccgaagttcggttgcccgaagtccagctccccaaagtctctgagatgaagctgcctaaggtccctgaaatggctgtcccagacgttcatctgcctgaggtgcagctgccaaaggtgtgtgagatgaaggttcccgacatgaagctccctgagattaaactccccaaagttcctgaaatggctgtgcccgatgtccaccttcctgaagtgcagttgcctaaggtcagcgagatcaggttgcccgaaatgcaagtgcctaaggtgccagatgtgcacctgcccaaagctccggaagtgaaactgccaagagcacctgaggtgcagctgaaagctacgaaagcagaacaagctgaaggaatggaatttggtttcaagatgcccaagatgaccatgccgaaactggggagagccgagtctccatcccgcggaaaaccaggggaagccggggccgaagtatccggcaagctggtcactctgccctgtcttcagccagaagtggacggagaggctcacgttggggtaccatccctcaccctccccagtgtggaactggatctaccaggtgccctgggtctgcagggacaagtgcctgctgctaagatggggaaaggagagagggttgaaggacccgaggttgccgccggcgttcgagaggtgggattcagagtaccttcagtggaaatagtgaccccacagctccccgccgtcgagatcgaggaaggtagactcgaaatgattgagactaaagttaagcctagtagcaaattttctctgccgaagttcggactctctggcccgaaggtggcaaaagccgaggccgaaggcgccgggagggcgacaaaactgaaggtgagcaaattcgccatatctctgccaaaagccagagtaggcgctgaggcggaagctaagggtgccggagaggcaggattgcttcccgccctcgatttgtctattccccagctgagcctggatgcgcatttgccatcaggtaaagtggaagtcgccggcgccgacctaaagtttaaagggccaagatttgcgctgccaaaattcggagtacgcggccgggataccgaagccgcagagcttgtgccaggcgtggccgagctcgaagggaagggatggggttgggacggacgcgtcaagatgccgaagctaaaggtttctactgctgggcaggtggtcaccgagggtcacgacgctggcctgagaatgcccccattgggaatttccttgccacaagtagagttaacaggcttcggggaggccggaacaccgggtcagcaggcccaatccacagttcccagcgcggagggtaccgctgggtatcgggtccaagtcccccaagtgactttgagcttaccgggggcccaggttgcaggcggcgaactattagtgggcgaaggcgttttcaagatgcccacggtcacagtgccacagctggagctggacgtggggctgtcacgggaggcacaggccggggaagctgccacaggggagggcggcttgaggctcaagctgcccactttaggcgctagggccagggtggggggggaaggcgccgaagagcagccccctggtgcagagcgcaccttctgcctgagcttgcccgatgtcgagctctcaccctctggcggcaatcacgctgaataccaggtggccgagggagaaggcgaggcagggcataaactgaaagtgcgcctaccacggttcggactcgtccgcgccaaggaaggcgctgaagaaggtgaaaaggctaagtcccctaagcttaggctgccccgggtaggcttcagccagagtgagatggttacaggtgagggaagcccgtcccctgaggaggaggaagaggaagaggaagaagggagtggggaaggcgcttcggggcggaggggcagggtcagagtgcgcctaccacgggtggggctggcagctccctctaaggccagccggggccaggaaggagatgccgctcccaaaagccccgtgcgggaaaagtccccgaaattccgttttcccagggtaagcctgtcaccaaaggctagatcggggtccggagaccaggaggagggggggctgcgggtgagactgcccagcgtgggtttctctgagacgggagccccgggaccagcccgaatggaaggcgctcaagctgccgccgtgtag

SEQ ID NO: 319877 - DNA, 4386 bp, Artificial Sequence
  derived and/or modified sequence
atggaggcccggagccgctctgctgaggagctgcggcgggcagagctggtggagatcatcgtggagacagaggcccagacaggagtgtctggcatcaacgtggccggcggcggcaaggagggcatctttgtgcgggagctgcgggaggacagccctgctgcccggagcctgagcctgcaggagggggaccagctgctgagcgcccgggtcttctttgagaacttcaagtatgaagatgccctgcggctgctgcagtgtgccgagccctacaaggtgtccttctgcctgaagaggacagtgcccaccggggacctggccctgcggcccggcaccgtgtctggctatgagatcaagggcccccgggccaaggtggccaagctgaacatccagagcctgagccctgtgaagaagaagaagatggtgcctggggccctgggcgtgcctgctgacctggcccctgtggatgtggagttctccttccccaagttcagccggctgcggcggggcctgaaggccgaggccgtgaagggccctgtgcctgctgccccagcccggcggcggctgcagctgccccggctgcgggtgcgggaggtggccgaggaggcccaggccgcccggctggccgccgccgcccccccacccaggaaggccaaggtggaggccgaggtggccgccggggcccgcttcaccgccccccaggtggagctggtgggcccccggctgcccggggctgaggtgggcgtgccccaggtgtctgcccccaaggccgcccccagcgctgaggccgccggcggctttgccctgcacctgcccaccctgggcctgggcgccccagcccccccagctgtggaggccccagctgtgggcatccaggtgccccaggtggagctgcctgccctgcccagcctgcccaccctgcccaccctgccctgcctggagacccgggagggcgctgtgtctgtggtggtgcccaccctggatgtggccgcccccaccgtgggcgtggacctggccctgcccggggctgaggtggaggcccggggggaggcccctgaggtggccctgaagatgccccggctgtccttccccaggtttggagcccgggccaaggaggtggccgaggccaaggtggccaaggtgtccccagaggcccgggtgaagggcccccggctgaggatgcccaccttcggcctgagcctgctggagcccaggcctgctgcccctgaggtggtggagagcaagctgaagctgcccaccatcaagatgcccagcctgggcattggagtgtctggccctgaggtgaaggtgcccaagggccctgaggtgaagctgcccaaggcccctgaggtgaagctgcccaaggtgcctgaggccgccctgcctgaggtgcggctgcctgaggtggagctgcccaaggtgtctgagatgaagctgcccaaggtgcctgagatggctgtgcctgaggtgcggctgcctgaggtggagctgcccaaggtgtctgagatgaagctgcccaaggtgcctgagatggctgtgcctgaggtgcggctgcctgaggtgcagctgctgaaggtgtctgagatgaagctgcccaaggtgcctgagatggctgtgcctgaggtgcggctgcctgaggtgcagctgcccaaggtgtctgagatgaagctgcctgaggtgtctgaggtggccgtgcctgaggtgcggctgcctgaggtgcagctgcccaaggtgcctgagatgaaggtgcctgagatgaagctgcccaaggtgcctgagatgaagctgcctgagatgaagctgcctgaggtgcagctgcccaaggtgcctgagatggctgtgcctgatgtgcacctgcctgaggtgcagctgcccaaggtgcctgagatgaagctgcctgagatgaagctgcctgaggtgaagctgcccaaggtgcctgagatggctgtgcctgatgtgcacctgcctgaggtgcagctgcccaaggtgcctgagatgaagctgcccaagatgcctgagatggctgtgcctgaggtgcggctgcctgaggtgcagctgcccaaggtgtctgagatgaagctgcccaaggtgcctgagatggctgtgcctgatgtgcacctgcctgaggtgcagctgcccaaggtgtgtgagatgaaggtgcctgacatgaagctgcctgagatcaagctgcccaaggtgcctgagatggctgtgcctgatgtgcacctgcctgaggtgcagctgcccaaggtgtctgagatccggctgcctgagatgcaggtgcccaaggtgcctgatgtgcacctgcccaaggcccctgaggtgaagctgccccgggcccctgaggtgcagctgaaggccaccaaggccgagcaggccgagggcatggagtttggcttcaagatgcccaagatgaccatgcccaagctgggccgggcagagagccccagccggggcaagccaggagaggccggggctgaggtgtctgggaagctggtgaccctgccctgcctgcagcctgaggtggatggagaggcccacgtgggcgtgcccagcctgaccctgcccagcgtggagctggacctgcccggggccctgggcctgcagggccaggtgcctgctgccaagatgggcaagggggagcgggtggagggccctgaggtggccgccggcgtgcgggaggtgggcttccgggtgcccagcgtggagatcgtgaccccccagctgcctgctgtggagattgaggagggccgcctggagatgattgagaccaaggtgaagcccagcagcaagttcagcctgcccaagtttggcctgagcggccccaaggtggccaaggccgaggccgagggcgccggccgggccaccaagctgaaggtgtccaagtttgccatcagcctgcccaaggcccgggtgggcgctgaggccgaggccaagggggccggggaggccggcctgctgcctgccctggacctgagcatcccccagctgagcctggatgcccacctgcccagcggcaaggtggaggtggccggggctgacctgaagttcaagggccccaggtttgccctgcccaagtttggagtgcggggccgggacacagaagctgctgagctggtgcctggggtggccgagctggagggcaagggctggggctgggatggccgggtgaagatgcccaagctgaagatgcccagctttggcctggcccggggcaaggaggccgaggtgcagggcgaccgggccagccctggagagaaggccgagagcacagctgtgcagctgaagatccctgaggtggagctggtgaccctgggcgcccaggaggagggccgggcagagggcgctgtggccgtgtctggcatgcagctgagcggcctgaaggtgtccacagctggccaggtggtgacagagggccatgatgctggcctgaggatgccacccctgggcatcagcctgccccaggtggagctgaccggctttggagaggccggcaccccaggccagcaggcccagagcacagtgcccagcgctgagggcacagctggctacagagtgcaggtgccccaggtgaccctgagcctgcccggggcccaggtggccggcggggagctgctggtgggggagggcgtcttcaagatgcccaccgtgacagtgccccagctggagctggatgtgggcctgagccgggaggcccaggccggggaggccgccaccggggagggcggcctgcggctgaagctgcccaccctgggcgcccgggcccgggtgggcggggagggcgctgaggagcagcccccaggagctgagaggaccttctgcctgagcctgcctgatgtggagctgagccccagcggcggcaaccacgccgagtaccaggtggccgagggggagggggaggccggccacaagctgaaggtgcggctgcccaggtttggcctggtgcgggccaaggagggcgctgaggagggggagaaggccaagagccccaagctgcggctgccccgggtgggcttcagccagagcgagatggtgactggagagggcagccccagccctgaggaggaggaggaggaggaggaggagggcagcggggagggcgccagcggccggcggggccgggtgcgggtgcggctgccccgggtgggcctggccgcccccagcaaggccagccggggccaggagggagatgctgcccccaagagccctgtgcgggagaagagccccaagttccgcttcccccgggtgtccctgagccccaaggcccggagcggcagcggggaccaggaggagggcggcctgcgggtgcggctgcccagcgtgggcttcagcgagactggagcccctggccctgccaggatggagggcgcccaggccgctgctgtgtag

SEQ ID NO: 319878 - DNA, 4191 bp, Artificial Sequence
  derived and/or modified sequence
atggaggcccggagccgctctgctgaggagctgcggcgggcagagctggtggagatcatcgtggagacagaggcccagacaggagtgtctggcatcaacgtggccggcggcggcaaggagggcatctttgtgcgggagctgcgggaggacagccctgctgcccggagcctgagcctgcaggagggggaccagctgctgagcgcccgggtcttctttgagaacttcaagtatgaagatgccctgcggctgctgcagtgtgccgagccctacaaggtgtccttctgcctgaagaggacagtgcccaccggggacctggccctgcggcccggcaccgtgtctggctatgagatcaagggcccccgggccaaggtggccaagctgaacatccagagcctgagccctgtgaagaagaagaagatggtgcctggggccctgggcgtgcctgctgacctggcccctgtggatgtggagttctccttccccaagttcagccggctgcggcggggcctgaaggccgaggccgtgaagggccctgtgcctgctgccccagcccggcggcggctgcagctgccccggctgcgggtgcgggaggtggccgaggaggcccaggccgcccggctggccgccgccgcccccccacccaggaaggccaaggtggaggccgaggtggccgccggggcccgcttcaccgccccccaggtggagctggtgggcccccggctgcccggggctgaggtgggcgtgccccaggtgtctgcccccaaggccgcccccagcgctgaggccgccggcggctttgccctgcacctgcccaccctgggcctgggcgccccagcccccccagctgtggaggccccagctgtgggcatccaggtgccccaggtggagctgcctgccctgcccagcctgcccaccctgcccaccctgccctgcctggagacccgggagggcgctgtgtctgtggtggtgcccaccctggatgtggccgcccccaccgtgggcgtggacctggccctgcccggggctgaggtggaggcccggggggaggcccctgaggtggccctgaagatgccccggctgtccttccccaggtttggagcccgggccaaggaggtggccgaggccaaggtggccaaggtgtccccagaggcccgggtgaagggcccccggctgaggatgcccaccttcggcctgagcctgctggagcccaggcctgctgcccctgaggtggtggagagcaagctgaagctgcccaccatcaagatgcccagcctgggcattggagtgtctggccctgaggtgaaggtgcccaagggccctgaggtgaagctgcccaaggcccctgaggtgaagctgcccaaggtgcctgaggccgccctgcctgaggtgcggctgcctgaggtggagctgcccaaggtgtctgagatgaagctgcccaaggtgcctgagatggctgtgcctgaggtgcggctgcctgaggtggagctgcccaaggtgtctgagatgaagctgcccaaggtgcctgagatggctgtgcctgaggtgcggctgcctgaggtgcagctgctgaaggtgtctgagatgaagctgcccaaggtgcctgagatggctgtgcctgaggtgcggctgcctgaggtgcagctgcccaaggtgtctgagatgaagctgcctgaggtgtctgaggtggccgtgcctgaggtgcggctgcctgaggtgcagctgcccaaggtgcctgagatgaaggtgcctgagatgaagctgcccaaggtgcctgagatgaagctgcctgagatgaagctgcctgaggtgcagctgcccaaggtgcctgagatggctgtgcctgatgtgcacctgcctgaggtgcagctgcccaaggtgcctgagatgaagctgcctgagatgaagctgcctgaggtgaagctgcccaaggtgcctgagatggctgtgcctgatgtgcacctgcctgaggtgcagctgcccaaggtgcctgagatgaagctgcccaagatgcctgagatggctgtgcctgaggtgcggctgcctgaggtgcagctgcccaaggtgtctgagatgaagctgcccaaggtgcctgagatggctgtgcctgatgtgcacctgcctgaggtgcagctgcccaaggtgtgtgagatgaaggtgcctgacatgaagctgcctgagatcaagctgcccaaggtgcctgagatggctgtgcctgatgtgcacctgcctgaggtgcagctgcccaaggtgtctgagatccggctgcctgagatgcaggtgcccaaggtgcctgatgtgcacctgcccaaggcccctgaggtgaagctgccccgggcccctgaggtgcagctgaaggccaccaaggccgagcaggccgagggcatggagtttggcttcaagatgcccaagatgaccatgcccaagctgggccgggcagagagccccagccggggcaagccaggagaggccggggctgaggtgtctgggaagctggtgaccctgccctgcctgcagcctgaggtggatggagaggcccacgtgggcgtgcccagcctgaccctgcccagcgtggagctggacctgcccggggccctgggcctgcagggccaggtgcctgctgccaagatgggcaagggggagcgggtggagggccctgaggtggccgccggcgtgcgggaggtgggcttccgggtgcccagcgtggagatcgtgaccccccagctgcctgctgtggagattgaggagggccgcctggagatgattgagaccaaggtgaagcccagcagcaagttcagcctgcccaagtttggcctgagcggccccaaggtggccaaggccgaggccgagggcgccggccgggccaccaagctgaaggtgtccaagtttgccatcagcctgcccaaggcccgggtgggcgctgaggccgaggccaagggggccggggaggccggcctgctgcctgccctggacctgagcatcccccagctgagcctggatgcccacctgcccagcggcaaggtggaggtggccggggctgacctgaagttcaagggccccaggtttgccctgcccaagtttggagtgcggggccgggacacagaagctgctgagctggtgcctggggtggccgagctggagggcaagggctggggctgggatggccgggtgaagatgcccaagctgaaggtgtccacagctggccaggtggtgacagagggccatgatgctggcctgaggatgccacccctgggcatcagcctgccccaggtggagctgactggatttggagaggccggcaccccaggccagcaggcccagagcacagtgcccagcgctgagggcacagctggctacagagtgcaggtgccccaggtgaccctgagcctgcccggggcccaggtggccggcggggagctgctggtgggggagggcgtcttcaagatgcccaccgtgacagtgccccagctggagctggatgtgggcctgagccgggaggcccaggccggggaggccgccactggagagggcggcctgcggctgaagctgcccaccctgggcgcccgggcccgggtgggcggggagggcgctgaggagcagcccccaggagctgagaggaccttctgcctgagcctgcctgatgtggagctgagccccagcggcggcaaccacgccgagtaccaggtggccgagggggagggggaggccggccacaagctgaaggtgcggctgccccgcttcggcctggtgcgggccaaggagggcgctgaggagggggagaaggccaagagccccaagctgcggctgccccgggtgggcttcagccagagcgagatggtgactggagagggcagccccagccctgaggaggaggaggaggaggaggaggagggcagcggggagggcgccagcggcagaagaggccgggtgcgggtgcggctgccccgggtgggcctggccgcccccagcaaggccagccggggccaggagggagatgctgcccccaagagccctgtgcgggagaagagccccaagttccgcttcccccgggtgtccctgagccccaaggcccggagcggcagcggggaccaggaggagggcggcctgcgggtgcggctgcccagcgtgggcttcagcgagaccggggcccctggccctgccaggatggagggcgcccaggccgctgctgtgtag

SEQ ID NO: 319879 - DNA, 4386 bp, Artificial Sequence
  derived and/or modified sequence
atggaggcccggagccggagcgccgaggagctgcggcgggccgagctggtcgagataatagtggagacggaggcccaaacgggcgtgagcggtataaatgtagcgggcggcggaaaagagggaattttcgtgagagagctccgagaagatagccccgccgcgagaagcttgtcgctacaggaaggcgaccagttgctcagcgcgagggtgttttttgaaaattttaaatacgaagatgctctgcgcctgctgcagtgtgccgagccttacaaagtgtccttctgtctgaaacggaccgtcccgactggcgacttggctctcaggccgggcacagtgtccgggtatgagataaaaggccccagggctaaggtggctaagctcaacatccaatctctctctcctgtcaaaaaaaagaaaatggtgcccggggcccttggtgtgcctgctgacctggcaccagtggacgtagagttctcttttcccaagttttcacgtctaagacgggggttgaaggctgaggccgttaaaggtccagtgcctgctgcacctgccagaagaaggctgcagctgcccagacttagagtccgggaggtcgctgaagaggcccaggctgcccgtctggccgctgccgctccaccaccccggaaagccaaggttgaggccgaagtagcagcgggagctcgatttacggcccctcaggttgaactggttggtcccagacttccaggggcagaggtaggcgtgccgcaggtgtcggcccctaaggcagccccctcggccgaagccgctggagggtttgccctgcacttgccaaccttgggacttggcgctcctgctcctccagcggtggaagcccctgcagtcgggattcaagtgccccaggtggaactgccggctctgccatcgttgcctactctgcccacactgccctgtctggaaactagggagggggctgttagcgttgttgtgcccaccctcgacgtggctgcaccaaccgtgggagtggatctcgccttgcctggcgcagaggtagaagcccgaggtgaagccccagaggtggctctgaagatgccaaggctctcatttcctcgattcggagctcgcgccaaagaagtggcagaggccaaagtagctaaggtgtctccagaagctagggtgaaggggccaaggctgaggatgcccaccttcgggctctctctcttggaaccccggcccgctgcccctgaagtggtggagagtaaattaaaattgcccaccatcaagatgccctctctgggtataggcgtgagtggccccgaggtgaaggtccccaagggtccggaggtgaagttgcccaaggcacctgaggtgaaactgccaaaggtgccggaggctgcgctaccagaagtgagactgccagaggtcgaactaccaaaggtgagcgagatgaagcttccaaaggtgcctgaaatggcagtgccagaggtccgcctcccagaggtggagcttcccaaagtgtctgagatgaagcttccaaaagtgccagagatggctgtccccgaagtgagacttccggaggtacagttgcttaaagtttcagaaatgaagctgccgaaggttccagaaatggccgtgccggaagtcaggctgcctgaggtgcaactcccaaaagtatctgagatgaaactgcctgaagtcagcgaggtagccgtcccggaagtccgtctgcctgaggtgcagctccctaaagtccccgagatgaaagtacctgaaatgaagctcccgaaagtgcccgaaatgaagcttcctgagatgaaattgcctgaggtgcaattgccgaaagtgcctgagatggccgtgccagacgtccacctccccgaagtgcagttgcccaaagtacccgaaatgaagctgccagagatgaagctaccggaggtcaagcttccaaaagtaccggaaatggcagtgccagatgtgcatctgcccgaggtccagctcccaaaggtgcccgagatgaagctccccaagatgccggaaatggccgtaccagaagttcgcctgcccgaagtccagctccctaaggtctccgaaatgaaactccccaaagtgcccgagatggcagtcccagatgtccacttacccgaagtgcagctgccaaaggtgtgtgagatgaaggtgccagacatgaaactacccgaaattaagttgccaaaagtgcctgagatggcagtccctgatgtgcatttgcccgaggtccagttacccaaggtttctgagatcagactccccgagatgcaggttccaaaggtacctgacgtccatctgccaaaagccccagaggttaagctgccgcgggccccagaagtacaacttaaggccaccaaagcagaacaggccgaggggatggaattcggctttaagatgcctaagatgactatgccaaagcttggccgagcagagagtccatcccgtggcaaacctggtgaggctggggcagaggtatccggcaagctggtgacactgccttgtctacaaccagaggtagacggcgaagcacatgtaggcgttccctcgctgacacttccatctgtggaactggatctaccaggcgctctgggtcttcagggccaagtgcctgccgccaagatgggaaagggtgagagagttgaaggtcctgaagttgctgctggcgtaagggaagtgggcttcagggtgccaagtgttgagatcgtgacccctcagcttcccgccgtggaaatagaggaaggcagactagaaatgatcgaaactaaagtgaaacctagctctaagttcagcctaccaaagttcggcttaagtggcccgaaggtcgctaaggctgaggctgagggggccggccgggccaccaagttaaaagtgtcaaagtttgccatctcgctgcccaaagctcgggtgggggcggaggcagaagcaaagggcgccggcgaggcaggactgctgccagccctcgacttgtccattcctcaactgtctcttgacgcccatttgccttcaggaaaggtggaggtagccggagcagatctgaagttcaaaggtcctaggtttgcattacctaagtttggtgtgcgcggcagagatactgaggccgctgaactcgtcccaggagtggccgaactggaaggcaaagggtggggctgggacggaagggtcaaaatgcccaagcttaagatgcccagcttcggccttgcgagaggaaaagaagccgaggtgcagggagaccgagcatctcccggtgagaaagccgaaagtaccgccgtgcagctgaaaattcccgaggtggaactggtcactctcggcgcacaggaagagggtcgtgccgagggcgcggtagccgtgtccggaatgcaactgagcgggctgaaagtgagcacagcaggccaggtcgtaactgaggggcatgatgctggcttgaggatgccgccactaggcatttccctgcctcaggtggagctgacagggttcggcgaagccggcacacctggccaacaggcccaatcgacggttccttctgccgaaggaacggccggatatagggtgcaagtccctcaggtcaccttgagcttgcccggcgcgcaggttgcgggaggagagttactggtcggcgaaggagtctttaaaatgccgacagtaactgtgccccagctggaactggatgttggcctaagccgagaagcacaagcaggcgaagctgcgactggggaaggaggactcagattgaagctcccaactctcggggcacgggcacgcgtgggcggagaaggggctgaggagcagccccctggagccgaacgtacattttgtctgagtctgcccgatgtagaattatctccgtcaggggggaaccatgctgaatatcaggtggctgagggtgagggtgaggccgggcacaaacttaaggttagactcccccggttcggcttagttcgcgcgaaggagggtgcagaagagggagaaaaggctaagtcccctaaacttcgattaccgagagtgggcttttctcagtccgaaatggtgaccggcgagggatcaccatctcctgaagaagaggaggaggaggaagaagaagggtctggggaaggggcctccggacgaagggggcgggtgcgtgtccgtctgccacgggttggtttggcggcaccctccaaagcctctcgagggcaggaaggagacgccgcaccaaagagccctgtgcgagaaaaatctcctaagttccgcttccccagagtgtccctgagccccaaggctcggtcagggtcaggggatcaggaggaaggtggcttgagagttcggctgccctcagtaggcttctctgaaacaggggcccctgggcccgctcggatggagggcgcccaggccgccgcagtgtag

SEQ ID NO: 319880 - DNA, 4191 bp, Artificial Sequence
  derived and/or modified sequence
atggaggcccggagccggagcgccgaggagctgcggcgggccgagctggtcgagataatcgtggagaccgaagcccagactggcgtcagtggcatcaacgtggcaggcggaggcaaggagggcatttttgtgagagagttgcgggaggattcccctgcagccaggagcctgagtcttcaggaaggggatcagctgttatccgctagagtttttttcgagaatttcaagtatgaggatgctctccggttgctgcagtgcgcagagccctacaaggtcagtttttgtctgaagagaaccgtccctaccggtgatttagctctgaggcctggaaccgtgagcggatacgaaatcaaagggcctagggctaaggttgcaaagttgaatatccaaagcctcagccccgtaaaaaaaaagaaaatggtcccaggcgcattaggcgtgcctgcagatctcgcccctgtcgacgtggagttcagtttccccaagtttagccggttgcgcagggggctcaaagctgaggccgtgaagggccccgtgcctgctgccccggcgcggcgcaggctccaacttccccggctgcgagtgcgggaagtggccgaagaagctcaggccgctaggcttgccgcagctgctcctcccccacggaaagctaaggtcgaggcagaggtggctgctggcgctaggttcactgcccctcaagtagagttggtgggcccgcgcttgcctggagcagaggtgggcgtccctcaagttagtgcccctaaggctgccccttccgctgaggcagcaggaggctttgcattacacctgcctactctcggacttggcgccccagcaccacccgcagtagaggcccctgcagtcggtattcaggttccccaggtggagctaccagccctaccatctctgcccacgctgccgacactgccctgtttggaaacccgagagggggctgtttctgtagtggtgcctaccctggacgtggcggcacctaccgtgggtgttgacctggctctgcccggggccgaggttgaagccaggggtgaagcgcctgaagtggctttgaagatgccccgattaagcttcccccgattcggcgcacgcgctaaagaggtggccgaggcaaaggtagccaaggtgagtcccgaggccagggtcaaaggcccaagacttagaatgccgactttcgggctgagcctcctagaacccagacccgccgctcccgaagttgttgagagtaaacttaagctacccactataaaaatgccttccctggggatcggagtgtcaggtcccgaagtgaaagttcctaaggggccagaagtgaaactgccaaaagcccctgaagttaagctgcctaaggtccccgaagctgcgctgcctgaagtgaggctgccagaagtcgaactgccaaaagtctctgagatgaaactcccgaaggtgccagaaatggcggtgccggaggttcgactgcccgaagtagagctaccaaaagtgtccgaaatgaaactgcctaaagtcccagaaatggcagttccagaggttaggttacccgaggtgcaactcctcaaggtctccgaaatgaagttgcccaaggttcccgagatggccgtgcctgaggtgcgactgccagaggtgcaattgcccaaggtctctgaaatgaaacttccagaggtgtccgaggtggccgtgccagaagttcggctgccagaggtccagctgcctaaggttcctgagatgaaagtgccagagatgaagctccctaaggtgcccgagatgaaactaccagagatgaagttaccagaggtgcagctacccaaagtgcccgaaatggctgtgccagacgtgcacctccctgaggtgcagcttccaaaagttcccgagatgaagctgcccgagatgaaattacctgaagtcaaactgcctaaagtgccagagatggcagtgcccgatgtacacctgcctgaagtgcagcttcccaaagtccccgaaatgaaactaccaaaaatgccagagatggctgtcccagaggttcgtctgccggaagtccagcttcctaaagtcagtgagatgaaattgcctaaggtgcccgaaatggcagtgccagacgttcacctgcctgaggtgcagttacccaaggtatgtgagatgaaggtgccggacatgaaactgccagagattaaactgcccaaagtcccagagatggcagtccctgacgtccatctgccagaggtgcagctgcccaaggtttcggagatcaggctaccagagatgcaggtaccaaaggtgccggatgtgcatttgcctaaggcacctgaagtgaaactccctagagctccagaggtgcagctcaaagcgacaaaggcagagcaggcggagggcatggagttcgggttcaagatgccaaagatgaccatgccaaaactcggtagagccgagtctccctctcgggggaagcccggggaagccggcgctgaagtctctggcaagctggtcacactgccgtgcctacaacctgaagttgatggtgaagctcacgtcggcgtaccatcactgaccttaccaagtgtagagcttgatctgcccggcgccctgggactccagggacaagtgcccgctgccaagatgggcaagggagagagagtggagggccccgaggtggccgctggagtacgcgaagtgggttttcgggttccgtcagttgagatcgtaacaccgcagctgccggccgtggagatcgaagagggaaggctggaaatgatcgagaccaaagttaaaccgtcctctaagttcagccttcccaaattcggtctatcgggtccaaaggttgcgaaggcagaagccgagggcgctggaagagccaccaaactgaaagtctccaaattcgccatcagcctgccgaaggcccgggtgggagctgaggctgaagctaaaggagctggcgaggccggccttctccctgctctggacctgtccataccccaactttctctggacgcgcacctgccgtccggaaaggtggaggtggccggcgccgaccttaagttcaaggggccaaggttcgctttgcctaaatttggagtgcgcggccgggatactgaagccgccgaactggttcccggggtcgctgagctggagggcaaaggctggggctgggatgggagagtcaaaatgcctaaacttaaggtgtcaaccgctggtcaggtcgtgactgaagggcatgacgcagggcttcggatgccaccactgggtatttctctgcctcaggtggaactcacgggatttggtgaggcgggcaccccaggccaacaggcccagagcacggtgccctcagcggaggggaccgctgggtaccgggtacaagttccgcaggtaaccctcagcttacccggagcccaggtggcgggcggcgaattgctggttggagaaggagtgttcaaaatgcctacagtgaccgtcccacagctggaacttgacgttggactgagcagagaagctcaggccggagaggccgccaccggggaaggggggctgcggctcaagctgccaacgctgggtgcacgtgccagggtggggggcgagggggccgaagagcagccgccgggtgctgaacggactttctgtctgtccctcccggatgtcgaactgtctccttccgggggcaatcatgcagagtaccaggtggccgaaggcgagggcgaggctggccataaattaaaggttcgtttgcccaggttcggactggtacgcgcaaaagaaggggctgaagaaggagagaaggccaaaagtccaaaattacggctgccaagggtgggattctcccagtcagagatggtgaccggtgaaggaagccctagcccagaggaggaagaagaagaagaagaggaaggcagtggagagggcgctagtggccggagaggccgcgtacgggtgcggctgcctcgtgtgggcctggcagccccatccaaggcaagccgcgggcaggagggtgatgccgctccaaagtccccagtcagggagaaatctcctaagttcagatttccgagagtttcactaagtccaaaagcacgttctggctctggcgatcaggaagagggggggctccgggtgaggctgcccagcgtgggctttagtgagacaggtgctcctgggccagcaagaatggagggggctcaggcagcggccgtgtag

SEQ ID NO: 319881 - DNA, 5505 bp, Artificial Sequence
  derived and/or modified sequence
gctctcgaggtgtctggaggctcagcgagcgccggacccaggaggcccaaggagctggaggtgaccctcaggcagcaagaaccccacggaagggcgtgagccctgcagacagctgtgcggcacctcgggctgggctcctgttaggaggaagtgcctgcacccaggcagcggctcagaggcagctgctccatgcagaactgaagctggttctgcagcagaaaggggagaggacacaggagcctggggtgcaggtgcctcccagcaacgccatggaggccaggagccggagtgccgaggagctgaggcgggcggagttggtggaaattatcgtggagacggaggcgcagaccggggtcagcggcatcaacgtagcgggcggcggcaaagagggaatcttcgttcgggagctgcgcgaggactcacccgccgccaggagcctcagcctgcaggaaggggaccagctgctgagtgcccgagtgttcttcgagaacttcaagtacgaggacgcactacgcctgctgcaatgcgccgagccttacaaagtctccttctgcctgaagcgcactgtgcccaccggggacctggctctgcggcccgggaccgtgtctggctacgagatcaagggcccgcgggccaaggtggccaagctggtacgcgtgcttagcccggccccggccctggactgccccagcgatccggtctctgcgccgtgagccccattccccgccatcgtgggccagccttgccctctgtcttgtcactaacccaagctaattccaccctctgccccttcctctctgccccaaactcttccccgggaagggggacagacccaccccagcccagggccctcacccacctcggagaggcgtccccaccatcggatccaggcttgctaggggtcctgaaccaggctacttcgaaccaggaaagccagattccagcctgagtgctggcccaattactgctgagtggccctggacaaagttgtttctctccctgggcctcagtttccccatctctagaatgaggatgttggggaaaatcccggatcaggatctagaagtcttgggtccccgtccctacactcctgttgactcatttggagatcctagatggctgcctgctttcctgggcactcatggtgaaatgacaggcaagaagtggggatgatgtttggggaacaagatacttgacccagcacatcccccgcctggtccaataccaggtggggctcttcctgtccactcccagcctcccactgtcccaccgcctcctgcctctctcctctctccccagaacatccagagtctgtcccctgtgaagaagaagaagatggtgcctggggctctgggggtccccgctgacctggcccctgttgacgtcgagttctcctttcccaagttctcccgcctgcgtcggggcctcaaagccgaggctgtcaagggtcctgtcccggctgcccctgcccgccggcgcctccagctgcctcggctgcgtgtacgagaagtggccgaagaggctcaggcagcccggctggccgccgccgctcctccccccaggaaagccaaggtggaggctgaggtggctgcaggagctcgtttcacagcccctcaggtggagctggttgggccgcggctgccaggggcggaggtgggtgtcccccaggtctcagcccccaaggctgccccctcagcagaggcagctggtggctttgccctccacctgccaacccttgggctcggagccccggctccgcctgctgtggaggccccagccgtgggaatccaggtcccccaggtggagctgcctgccttgccctcactgcccactctgcccacacttccctgcctagagacccgggaaggggctgtgtcggtagtggtgcccaccctggatgtggcagcaccgactgtgggggtggacctggccttgccgggtgcagaggtggaggcccggggagaggcacctgaggtggccctgaagatgccccgccttagttttccccgatttggggctcgagcaaaggaagttgctgaggccaaggtagccaaggtcagccctgaggccagggtgaaaggtcccagacttcgaatgcccacctttgggctttccctcttggagccccggcccgctgctcctgaagttgtagagagcaagctgaagctgcccaccatcaagatgccctcccttggcatcggagtgtcagggcccgaggtcaaggtgcccaagggacctgaagtgaagctccccaaggctcctgaggtcaagcttccaaaagtgcccgaggcagcccttccagaggttcgactcccagaggtggagctccccaaggtgtcagagatgaaactcccaaaggtgccagagatggctgtgccggaggtgcggcttccagaggtagagctgcccaaagtgtcagagatgaaactcccaaaggtgccagagatggctgtgccggaggtgcggcttccagaggtacagctgctgaaagtgtcggagatgaaactcccaaaggtgccagagatggctgtgccggaggtgcggcttccagaggtacagctgccgaaagtgtcagagatgaaactcccagaggtgtcagaggtggctgtgccagaggtgcggcttccagaggtgcagctgccgaaagtgccagagatgaaagtccctgagatgaagcttccaaaggtgcctgagatgaaacttcctgagatgaaactccctgaagtgcaactcccgaaggtgcccgagatggccgtgcccgatgtgcacctcccagaagtgcagcttccaaaagtcccagagatgaagctccctgagatgaaactccctgaggtgaaactcccgaaggtgcccgagatggctgtgcccgatgtgcacctcccggaagtgcagctcccgaaagtcccagagatgaaactccctaaaatgcctgagatggctgtgccagaggttcgactccccgaggtgcagctgccaaaagtctcagagatgaaactccccaaggtgcctgaaatggccgtgcccgatgtgcacctcccagaggtgcagctgcccaaagtctgtgaaatgaaagtccctgacatgaagctcccagagataaaactccccaaggtgcctgagatggctgtgcccgatgtgcacctccccgaggtgcagctgccgaaagtgtcagagattcggctgccggaaatgcaagtgccgaaggttcccgacgtgcatcttccgaaggcaccagaggtgaagctgcccagggctccggaggtgcagctaaaggccaccaaggcagaacaggcagaagggatggaatttggcttcaagatgcccaagatgaccatgcccaagctagggagggcagagtccccatcacgtggcaagccaggcgaggcgggtgctgaggtctcagggaagctggtaacacttccctgtctgcagccagaggtggatggtgaggctcatgtgggtgtcccctctctcactctgccttcagtggagctagacctgccaggagcacttggcctgcaggggcaggtcccagccgctaaaatgggcaagggagagcgggtggagggccctgaggtggcagcaggggtcagggaagtgggcttccgagtgccctctgttgaaattgtcaccccacagctgcccgccgtggaaattgaggaagggcggctggagatgatagagacaaaagtcaagccctcttccaagttctccttacctaagtttggactctcggggccaaaggtggctaaggcagaggctgagggggctgggcgagctaccaagctgaaggtatccaaatttgccatctcactccccaaggctcgggtgggggctgaggctgaggccaaaggggctggggaggcaggcctgctgcctgccctcgatctgtccatcccacagctcagcctggatgcccacctgccctcaggcaaggtagaggtggcaggggccgacctcaagttcaaggggcccaggtttgctctccccaagtttggggtcagaggccgggacactgaggcagcagaactagtgccaggggtggctgagttggagggcaagggctggggctgggatgggagggtgaagatgcccaagctgaagatgccttcctttgggctggctcgagggaaggaagcagaagttcaaggtgatcgtgccagcccgggggaaaaggctgagtccaccgctgtgcagcttaagatccccgaggtggagctggtcacgctgggcgcccaggaggaagggagggcagagggggctgtggccgtcagtggaatgcagctgtcaggcctgaaggtgtccacagccgggcaggtggtcactgagggccatgacgcggggctgaggatgcctccgctgggcatctccctgccacaggtggagctgaccggctttggggaggcaggtaccccagggcagcaggctcagagtacagtcccttcagcagagggcacagcaggctacagggttcaggtgccccaggtgaccctgtctctgcctggagcccaggttgcaggtggtgagctgctggtgggtgagggtgtctttaagatgcccaccgtgacagtgccccagcttgagctggacgtggggctaagccgagaggcacaggcgggcgaggcggccacaggcgagggtgggctgaggctgaagttgcccacactgggggccagagctagggtggggggcgagggtgctgaggagcagcccccaggggccgagcgtaccttctgcctctcactgcccgacgtggagctctcgccatccgggggcaaccatgccgagtaccaggtggcagagggggagggagaggccggacacaagctcaaggtacggctgccccggtttggcctggtgcgggccaaggagggggccgaggagggtgagaaggccaagagccccaaactcaggctgccccgagtgggcttcagccaaagtgagatggtcactggggaagggtcccccagccccgaggaggaggaggaggaggaggaagagggcagtggggaaggggcctcgggtcgccggggccgggtccgggtccgcttgccacgtgtaggcctggcggccccttctaaagcctctcgggggcaggagggcgatgcagcccccaagtcccccgtcagagagaagtcacccaagttccgcttccccagggtgtccctaagccccaaggcccggagtgggagtggggaccaggaagagggtggattgcgggtgcggctgcccagcgtggggttttcagagacaggggctccaggcccggccaggatggagggggctcaggctgcggctgtctgaagcccctagtcagatggggatcccttcttgccttcctttctctaccccctcgctgttgtgtgtgtgataactagcactaaccctaagagggccgggaggtgggtgactgaccagggctggcagggaggcctgctcctgtctctctggcaggagtgcctgtaccccaccaagccatgtgaataaaataatctggaagtagcc

SEQ ID NO: 319882 - DNA, 4856 bp, Artificial Sequence
  derived and/or modified sequence
gctctcgaggtgtctggaggctcagcgagcgccggacccaggaggcccaaggagctggaggtgaccctcaggcagcaagaaccccacggaagggcgtgagccctgcagacagctgtgcggcacctcgggctgggctcctgttaggaggaagtgcctgcacccaggcagcggctcagaggcagctgctccatgcagaactgaagctggttctgcagcagaaaggggagaggacacaggagcctggggtgcaggtgcctcccagcaacgccatggaggccaggagccggagtgccgaggagctgaggcgggcggagttggtggaaattatcgtggagacggaggcgcagaccggggtcagcggcatcaacgtagcgggcggcggcaaagagggaatcttcgttcgggagctgcgcgaggactcacccgccgccaggagcctcagcctgcaggaaggggaccagctgctgagtgcccgagtgttcttcgagaacttcaagtacgaggacgcactacgcctgctgcaatgcgccgagccttacaaagtctccttctgcctgaagcgcactgtgcccaccggggacctggctctgcggcccgggaccgtgtctggctacgagatcaagggcccgcgggccaaggtggccaagctgaacatccagagtctgtcccctgtgaagaagaagaagatggtgcctggggctctgggggtccccgctgacctggcccctgttgacgtcgagttctcctttcccaagttctcccgcctgcgtcggggcctcaaagccgaggctgtcaagggtcctgtcccggctgcccctgcccgccggcgcctccagctgcctcggctgcgtgtacgagaagtggccgaagaggctcaggcagcccggctggccgccgccgctcctccccccaggaaagccaaggtggaggctgaggtggctgcaggagctcgtttcacagcccctcaggtggagctggttgggccgcggctgccaggggcggaggtgggtgtcccccaggtctcagcccccaaggctgccccctcagcagaggcagctggtggctttgccctccacctgccaacccttgggctcggagccccggctccgcctgctgtggaggccccagccgtgggaatccaggtcccccaggtggagctgcctgccttgccctcactgcccactctgcccacacttccctgcctagagacccgggaaggggctgtgtcggtagtggtgcccaccctggatgtggcagcaccgactgtgggggtggacctggccttgccgggtgcagaggtggaggcccggggagaggcacctgaggtggccctgaagatgccccgccttagttttccccgatttggggctcgagcaaaggaagttgctgaggccaaggtagccaaggtcagccctgaggccagggtgaaaggtcccagacttcgaatgcccacctttgggctttccctcttggagccccggcccgctgctcctgaagttgtagagagcaagctgaagctgcccaccatcaagatgccctcccttggcatcggagtgtcagggcccgaggtcaaggtgcccaagggacctgaagtgaagctccccaaggctcctgaggtcaagcttccaaaagtgcccgaggcagcccttccagaggttcgactcccagaggtggagctccccaaggtgtcagagatgaaactcccaaaggtgccagagatggctgtgccggaggtgcggcttccagaggtagagctgcccaaagtgtcagagatgaaactcccaaaggtgccagagatggctgtgccggaggtgcggcttccagaggtacagctgctgaaagtgtcggagatgaaactcccaaaggtgccagagatggctgtgccggaggtgcggcttccagaggtacagctgccgaaagtgtcagagatgaaactcccagaggtgtcagaggtggctgtgccagaggtgcggcttccagaggtgcagctgccgaaagtgccagagatgaaagtccctgagatgaagcttccaaaggtgcctgagatgaaacttcctgagatgaaactccctgaagtgcaactcccgaaggtgcccgagatggccgtgcccgatgtgcacctcccagaagtgcagcttccaaaagtcccagagatgaagctccctgagatgaaactccctgaggtgaaactcccgaaggtgcccgagatggctgtgcccgatgtgcacctcccggaagtgcagctcccgaaagtcccagagatgaaactccctaaaatgcctgagatggctgtgccagaggttcgactccccgaggtgcagctgccaaaagtctcagagatgaaactccccaaggtgcctgaaatggccgtgcccgatgtgcacctcccagaggtgcagctgcccaaagtctgtgaaatgaaagtccctgacatgaagctcccagagataaaactccccaaggtgcctgagatggctgtgcccgatgtgcacctccccgaggtgcagctgccgaaagtgtcagagattcggctgccggaaatgcaagtgccgaaggttcccgacgtgcatcttccgaaggcaccagaggtgaagctgcccagggctccggaggtgcagctaaaggccaccaaggcagaacaggcagaagggatggaatttggcttcaagatgcccaagatgaccatgcccaagctagggagggcagagtccccatcacgtggcaagccaggcgaggcgggtgctgaggtctcagggaagctggtaacacttccctgtctgcagccagaggtggatggtgaggctcatgtgggtgtcccctctctcactctgccttcagtggagctagacctgccaggagcacttggcctgcaggggcaggtcccagccgctaaaatgggcaagggagagcgggtggagggccctgaggtggcagcaggggtcagggaagtgggcttccgagtgccctctgttgaaattgtcaccccacagctgcccgccgtggaaattgaggaagggcggctggagatgatagagacaaaagtcaagccctcttccaagttctccttacctaagtttggactctcggggccaaaggtggctaaggcagaggctgagggggctgggcgagctaccaagctgaaggtatccaaatttgccatctcactccccaaggctcgggtgggggctgaggctgaggccaaaggggctggggaggcaggcctgctgcctgccctcgatctgtccatcccacagctcagcctggatgcccacctgccctcaggcaaggtagaggtggcaggggccgacctcaagttcaaggggcccaggtttgctctccccaagtttggggtcagaggccgggacactgaggcagcagaactagtgccaggggtggctgagttggagggcaagggctggggctgggatgggagggtgaagatgcccaagctgaagatgccttcctttgggctggctcgagggaaggaagcagaagttcaaggtgatcgtgccagcccgggggaaaaggctgagtccaccgctgtgcagcttaagatccccgaggtggagctggtcacgctgggcgcccaggaggaagggagggcagagggggctgtggccgtcagtggaatgcagctgtcaggcctgaaggtgtccacagccgggcaggtggtcactgagggccatgacgcggggctgaggatgcctccgctgggcatctccctgccacaggtggagctgaccggctttggggaggcaggtaccccagggcagcaggctcagagtacagtcccttcagcagagggcacagcaggctacagggttcaggtgccccaggtgaccctgtctctgcctggagcccaggttgcaggtggtgagctgctggtgggtgagggtgtctttaagatgcccaccgtgacagtgccccagcttgagctggacgtggggctaagccgagaggcacaggcgggcgaggcggccacaggcgagggtgggctgaggctgaagttgcccacactgggggccagagctagggtggggggcgagggtgctgaggagcagcccccaggggccgagcgtaccttctgcctctcactgcccgacgtggagctctcgccatccgggggcaaccatgccgagtaccaggtggcagagggggagggagaggccggacacaagctcaaggtacggctgccccggtttggcctggtgcgggccaaggagggggccgaggagggtgagaaggccaagagccccaaactcaggctgccccgagtgggcttcagccaaagtgagatggtcactggggaagggtcccccagccccgaggaggaggaggaggaggaggaagagggcagtggggaaggggcctcgggtcgccggggccgggtccgggtccgcttgccacgtgtaggcctggcggccccttctaaagcctctcgggggcaggagggcgatgcagcccccaagtcccccgtcagagagaagtcacccaagttccgcttccccagggtgtccctaagccccaaggcccggagtgggagtggggaccaggaagagggtggattgcgggtgcggctgcccagcgtggggttttcagagacaggggctccaggcccggccaggatggagggggctcaggctgcggctgtctgaagcccctagtcagatggggatcccttcttgccttcctttctctaccccctcgctgttgtgtgtgtgataactagcactaaccctaagagggccgggaggtgggtgactgaccagggctggcagggaggcctgctcctgtctctctggcaggagtgcctgtaccccaccaagccatgtgaataaaataatctggaagtagcc

SEQ ID NO: 319883 - DNA, 4462 bp, Artificial Sequence
  derived and/or modified sequence
gagctctcgaggtgtctggaggctcagcgagcgccggacccaggaggcccaaggagctggaggtgaccctcaggcagcaagaaccccacggaagggcgtgagccctgcagacagctgtgcggcacctcgggctgggctcctgttaggaggaagtgcctgcacccaggcagcggctcagaggcagctgctccatgcagaactgaagctggttctgcagcagaaaggggagaggacacaggagcctggggtgcaggtgcctcccagcaacgccatggaggccaggagccggagtgccgaggagctgaggcgggcggagttggtggaaattatcgtggagacggaggcgcagaccggggtcagcggcatcaacgtagcgggcggcggcaaagagggaatcttcgttcgggagctgcgcgaggactcacccgccgccaggagcctcagcctgcaggaaggggaccagctgctgagtgcccgagtgttcttcgagaacttcaagtacgaggacgcactacgcctgctgcaatgcgccgagccttacaaagtctccttctgcctgaagcgcactgtgcccaccggggacctggctctgcggcccgggaccgtgtctggctacgagatcaagggcccgcgggccaaggtggccaagctgaacatccagagtctgtcccctgtgaagaagaagaagatggtgcctggggctctgggggtccccgctgacctggcccctgttgacgtcgagttctcctttcccaagttctcccgcctgcgtcggggcctcaaagccgaggctgtcaagggtcctgtcccggctgcccctgcccgccggcgcctccagctgcctcggctgcgtgtacgagaagtggccgaagaggctcaggcagcccggctggccgccgccgctcctccccccaggaaagccaaggtggaggctgaggtggctgcaggagctcgtttcacagcccctcaggtggagctggttgggccgcggctgccaggggcggaggtgggtgtcccccaggtctcagcccccaaggctgccccctcagcagaggcagctggtggctttgccctccacctgccaacccttgggctcggagccccggctccgcctgctgtggaggccccagccgtgggaatccaggtcccccaggtggagctgcctgccttgccctcactgcccactctgcccacacttccctgcctagagacccgggaaggggctgtgtcggtagtggtgcccaccctggatgtggcagcaccgactgtgggggtggacctggccttgccgggtgcagaggtggaggcccggggagaggcacctgaggtggccctgaagatgccccgccttagttttccccgatttggggctcgagcaaaggaagttgctgaggccaaggtagccaaggtcagccctgaggccagggtgaaaggtcccagacttcgaatgcccacctttgggctttccctcttggagccccggcccgctgctcctgaagttgtagagagcaagctgaagctgcccaccatcaagatgccctcccttggcatcggagtgtcagggcccgaggtcaaggtgcccaagggacctgaagtgaagctccccaaggctcctgaggtcaagcttccaaaagtgcccgaggcagcccttccagaggttcgactcccagaggtggagctccccaaggtgtcagagatgaaactcccaaaggtgccagagatggctgtgccggaggtgcggcttccagaggtagagctgcccaaagtgtcagagatgaaactcccaaaggtgccagagatggctgtgccggaggtgcggcttccagaggtacagctgctgaaagtgtcggagatgaaactcccaaaggtgccagagatggctgtgccggaggtgcggcttccagaggtacagctgccgaaagtgtcagagatgaaactcccagaggtgtcagaggtggctgtgccagaggtgcggcttccagaggtgcagctgccgaaagtgccagagatgaaagtccctgagatgaagcttccaaaggtgcctgagatgaaacttcctgagatgaaactccctgaagtgcaactcccgaaggtgcccgagatggccgtgcccgatgtgcacctcccagaagtgcagcttccaaaagtcccagagatgaagctccctgagatgaaactccctgaggtgaaactcccgaaggtgcccgagatggctgtgcccgatgtgcacctcccggaagtgcagctcccgaaagtcccagagatgaaactccctaaaatgcctgagatggctgtgccagaggttcgactccccgaggtgcagctgccaaaagtctcagagatgaaactccccaaggtgcctgaaatggccgtgcccgatgtgcacctcccagaggtgcagctgcccaaagtctgtgaaatgaaagtccctgacatgaagctcccagagataaaactccccaaggtgcctgagatggctgtgcccgatgtgcacctccccgaggtgcagctgccgaaagtgtcagagattcggctgccggaaatgcaagtgccgaaggttcccgacgtgcatcttccgaaggcaccagaggtgaagctgcccagggctccggaggtgcagctaaaggccaccaaggcagaacaggcagaagggatggaatttggcttcaagatgcccaagatgaccatgcccaagctagggagggcagagtccccatcacgtggcaagccaggcgaggcgggtgctgaggtctcagggaagctggtaacacttccctgtctgcagccagaggtggatggtgaggctcatgtgggtgtcccctctctcactctgccttcagtggagctagacctgccaggagcacttggcctgcaggggcaggtcccagccgctaaaatgggcaagggagagcgggtggagggccctgaggtggcagcaggggtcagggaagtgggcttccgagtgccctctgttgaaattgtcaccccacagctgcccgccgtggaaattgaggaagggcggctggagatgatagagacaaaagtcaagccctcttccaagttctccttacctaagtttggactctcggggccaaaggtggctaaggcagaggctgagggggctgggcgagctaccaagctgaaggtatccaaatttgccatctcactccccaaggctcgggtgggggctgaggctgaggccaaaggggctggggaggcaggcctgctgcctgccctcgatctgtccatcccacagctcagcctggatgcccacctgccctcaggcaaggtagaggtggcaggggccgacctcaagttcaaggggcccaggtttgctctccccaagtttggggtcagaggccgggacactgaggcagcagaactagtgccaggggtggctgagttggagggcaagggctggggctgggatgggagggtgaagatgcccaagctgaaggtgtccacagccgggcaggtggtcactgagggccatgacgcggggctgaggatgcctccgctgggcatctccctgccacaggtggagctgaccggctttggggaggcaggtaccccagggcagcaggctcagagtacagtcccttcagcagagggcacagcaggctacagggttcaggtgccccaggtgaccctgtctctgcctggagcccaggttgcaggtggtgagctgctggtgggtgagggtgtctttaagatgcccaccgtgacagtgccccagcttgagctggacgtggggctaagccgagaggcacaggcgggcgaggcggccacaggcgagggtgggctgaggctgaagttgcccacactgggggccagagctagggtggggggcgagggtgctgaggagcagcccccaggggccgagcgtaccttctgcctctcactgcccgacgtggagctctcgccatccgggggcaaccatgccgagtaccaggtggcagagggggagggagaggccggacacaagctcaaggtacggctgccccggtttggcctggtgcgggccaaggagggggccgaggagggtgagaaggccaagagccccaaactcaggctgccccgagtgggcttcagccaaagtgagatggtcactggggaagggtcccccagccccgaggaggaggaggaggaggaggaagagggcagtggggaaggggcctcgggtcgccggggccgggtccgggtccgcttgccacgtgtaggcctggcggccccttctaaagcctctcgggggcaggagggcgatgcagcccccaagtcccccgtcagagagaagtcacccaagttccgcttccccagggtgtccctaagccccaaggcccggagtgggagtggggaccaggaagagggtggattgcgggtgcggctgcccagcgtggggttttcagagacaggggctccaggcccggccaggatggagggggctcaggctgcggctgtctga

SEQ ID NO: 319884 - DNA, 4386 bp, Artificial Sequence
  derived and/or modified sequence
atggaggccagatccaggagcgccgaggaattaaggcgcgcagaactcgttgaaataatcgtagagacggaagcccagactggcgtgtcaggcatcaatgtcgcaggcggaggaaaggaggggattttcgtcagagaactcagggaagattcgccggcagctaggagtctgagcttacaggagggcgaccagctccttagcgcccgagtcttcttcgagaatttcaagtatgaagatgcactgcggctcttacagtgtgctgaaccatacaaggtgtccttctgcctgaagcggaccgtgcctacaggtgatttagcccttcggccaggcacggtgtccgggtatgaaatcaaggggcctcgggctaaggttgctaagcttaacatacaaagcctgagccccgtgaagaagaagaagatggtgccaggcgctttaggggtacctgccgacctggcgcctgtcgacgtggaattttccttccccaaattctcgcgtctgcggcgaggcctgaaagccgaagctgtcaaaggccctgtgccggctgctcccgctaggaggcgcctccagctgcctaggctcagagttcgcgaagtggccgaagaagcccaggccgctagactcgccgcagcagcccctccgcctaggaaagccaaagtggaggcagaggtggcagccggtgcaaggtttaccgcgcctcaggtcgaactggtaggccctaggttgccaggcgctgaggtgggtgtgccccaggtgtctgctcccaaggcagccccatcggccgaagccgcaggcggatttgcgctccatctacctactctgggtctcggcgcacctgccccacctgcggtggaggcccctgctgtaggcatccaggtaccgcaggtcgaactgcctgccttaccatccctgccaactcttccaacacttccatgcctggaaacacgtgagggcgcagtaagtgtcgtggtgccaaccctcgatgtggctgcacccacagtaggagtggacctagctctaccaggcgctgaggtggaggcccgaggcgaggctccagaagtagccttaaaaatgccccgtctctcctttcccaggtttggggcacgggcaaaagaggtggccgaggccaaagttgccaaggtttcacctgaagcccgtgttaaaggcccacgactacggatgcctacattcgggctgtcactgctggaacctcgccctgccgcaccagaggtggtggagtccaagcttaagctgccaaccatcaaaatgccgtcacttgggatcggagtctcgggtcccgaagtgaaagtaccgaagggcccagaggttaagctccctaaggctcccgaggtaaagcttcctaaagtgccggaggccgctcttcctgaagttaggttgcccgaagtcgagctgccgaaggtgtctgagatgaagctgcctaaagtcccagagatggctgttcctgaagttcgtctcccagaagtagagctcccgaaagtatcagagatgaaattacccaaagtgcccgaaatggccgtgccggaggtgaggctgcccgaagtccagctcctgaaggtctccgagatgaagctgcccaaagtgccggagatggccgtgccagaggtcagactccccgaggtccagcttccaaaggtctccgaaatgaagctccctgaagtgagcgaagttgctgtgccagaggtgaggttacctgaagtccaactaccaaaggtccctgagatgaaagtgcccgagatgaagctacccaaagttcctgaaatgaagctgcctgaaatgaaactgccagaggtgcaattacctaaggtacctgaaatggccgtgccagatgtgcaccttccggaggtgcagctgccaaaggtacccgagatgaaattacccgagatgaagctgcccgaagtgaagttgcctaaagtgcctgaaatggctgtccccgatgtgcatcttccagaagtgcaactccctaaagtgccggagatgaagctgccaaagatgcccgagatggccgttcctgaggttcggctccctgaagttcagctgcccaaggttagcgaaatgaaactccccaaggtgccagagatggcagtgcccgatgtccacctcccagaagtacaactacccaaggtgtgcgagatgaaagtgccagacatgaagctccctgagataaaactccctaaagtcccggaaatggcagtccccgacgtgcatcttcccgaagtgcaactgccaaaagtgtcagagatccggttaccagagatgcaggttcctaaagtacccgacgtgcacttacccaaggctccggaggtgaaacttcctagggctcccgaggtccaactgaaggcaacaaaggccgaacaggccgagggaatggagtttggttttaaaatgccaaagatgacaatgccaaaactcggtagggccgaaagtccctccagaggaaagcccggtgaggctggagctgaggtcagcggtaaactcgtgaccctgccttgtctccagcccgaagttgatggggaagcccatgtgggggttccttcccttaccctcccatcagtggaactggacctgccaggagcgttgggactgcaggggcaagttcccgctgccaaaatggggaagggggagcgagtagaagggcctgaagtggcagctggggtgagggaggttggcttcagggttccctccgttgaaatcgttacaccacagctgcctgcggttgagatcgaagagggaaggttagagatgatagagactaaagtgaaaccaagtagcaaattttctttgccgaagtttgggctttccggtcccaaggtggctaaagcagaggcagagggggctggtcgcgcaaccaagctgaaggtcagtaaatttgctatctcactgcccaaggcccgtgtgggggcagaggcggaggccaaaggtgcaggggaagccggactgctgcccgcactggacctgtctattccgcaactgagcttggatgcccatctcccgtccggaaaggttgaggtggcaggcgcagacctgaagttcaaaggaccaaggtttgccctgcctaaattcggcgtcaggggccgagacaccgaggccgcagaattggtccctggcgttgctgaactcgaggggaagggctggggatgggacggcagggtgaaaatgccaaaactcaaaatgccgtcctttggtctggcgaggggaaaagaggccgaggtgcaaggcgacagggccagtcctggtgagaaggctgagtcgactgccgttcagctcaagatcccggaagtggagcttgttacccttggggctcaggaggagggcagagctgaaggggctgtggcggtctcaggaatgcaactgtctgggctgaaggtgtcgacagctggccaggtcgtgacagagggacatgacgctggactcagaatgcctccacttggtattagtcttcctcaggttgaactcacggggttcggcgaagctgggacaccagggcagcaggcacagagcacagtccctagcgccgagggcaccgccggatatcgagttcaggtaccccaggttaccctttccctccccggagcacaggtggctggaggcgagctgctggtcggtgagggtgtctttaagatgcctacggtgacggtgccccaactcgagcttgacgtaggcctgtctagagaggcccaggcgggagaggcagccactggcgagggcggactgcgactgaaattaccgaccctcggggctcgcgcacgagttggaggcgaaggagctgaggagcagccacctggggctgagcgtaccttctgcttatctcttccagacgtggagttatccccctctggcggtaatcacgctgaataccaggttgccgaaggcgagggtgaggccggacacaagcttaaagtcagattaccgcgatttggcctggttagagctaaagagggtgcagaagaaggcgagaaagccaagtctcctaagctgcgtctgccacgcgtggggttcagccagagtgagatggtcacgggcgagggctccccttctccagaggaggaggaagaggaggaagaggaggggagcggcgaaggcgcaagtggccgacgaggtcgcgtacgggtgcgactacccagagtaggattggctgcccctagtaaggcttcccgcggtcaagagggtgacgcagcccctaaatcacccgttagggaaaaatccccaaagttcagattcccgagagttagcctgagtcctaaggcgcgatctggcagtggcgaccaggaagagggcggactccgagtccgacttccttctgtcgggttcagtgaaacgggcgcacctggcccagcgcgaatggagggagctcaggccgcagccgtgtag

SEQ ID NO: 319885 - DNA, 4191 bp, Artificial Sequence
  derived and/or modified sequence
atggaagccaggagcagaagtgcagaagaactccggcgtgccgagctggtggaaatcatcgtcgagaccgaggcacagaccggcgtgagcggtataaacgtggccggtggcggaaaagaagggatatttgtgagagaacttcgcgaggattcgcctgcggctagatctctgagtctccaggaaggagatcagctgcttagcgccagggtgttcttcgagaacttcaaatacgaagacgctctgagactgctgcagtgtgctgagccctacaaagtgagcttttgtcttaaacgaacggtgcccacaggcgatttagctctccgacctggaacagtgagtggctatgagatcaaaggtcctagggccaaggtcgccaaactcaatatccagtccctcagtccggtaaagaagaagaagatggtgcctggggctctaggagtacccgcagaccttgctccagtcgatgtcgaattctcttttccaaagttcagcaggctccgcagaggtctcaaagctgaagcagtcaagggacccgtgcccgctgctcccgcacggagaaggctccagttgcccagactccgagtcagagaggttgccgaagaagcccaggccgctaggctcgccgctgccgctcctccaccgagaaaggctaaggtggaagccgaggtggccgcaggcgcacgctttacagcaccccaggtggagttggtgggcccaaggctgcccggagcagaagtaggggtcccccaagtgagcgcccctaaggccgctccgtctgcggaggcagccggaggatttgcactgcacctgcctacactgggactgggggcacccgctcctcccgctgtggaagcaccggcagtgggtatccaggtcccccaggtcgaactccccgcactgccatcattgccaacactgcccaccctcccgtgtctggagacacgtgaaggggctgtctccgtcgtcgtgcctacactcgacgtggcggctcccactgtaggagtggatcttgccctgcctggtgctgaggtggaagctcggggtgaggcacctgaggtggctttgaagatgcctcgactctcctttcctcggttcggggctcgggcaaaggaagtcgctgaggccaaagtggcgaaggtctctcccgaggcaagggtgaagggaccgcgtctgagaatgccgacatttgggctgagtcttctcgagcctcgacccgctgcccctgaggtggtcgagtccaagttaaagctgcccaccattaagatgccctccctcgggatcggcgtctcaggccctgaggtcaaggtaccgaagggtccagaagtcaaacttccgaaagctcccgaggtgaagctgcctaaggtgccggaggcagctctccccgaggtccgcctgcccgaagttgagctacctaaggtttcagaaatgaaacttcctaaggtgcccgaaatggccgttcccgaagtgcgcctgcccgaagtggagctccctaaggtctccgaaatgaaactgccaaaggtccccgagatggctgtgccggaagtgaggttgccagaagtgcagctgctgaaagtctccgagatgaaattgcccaaagtgccagagatggcggttcccgaagtcaggctcccagaagtccaactgcccaaggtctcagagatgaaattgccagaggtctctgaagtggccgtacccgaggtgagactccctgaagtgcagctgcctaaggtgcctgaaatgaaagtgccagagatgaagctgccaaaagtgcctgagatgaagctccctgaaatgaaactaccagaggtacagcttcctaaggtgccagaaatggcagtccctgacgtccaccttcccgaagtccagctgcctaaggtgccagaaatgaagctgccagagatgaaactaccggaggtgaagctgccaaaagtgcccgagatggccgtgcctgacgtgcacctgcctgaggtgcagctgccaaaggtaccagaaatgaagctgcccaagatgccagaaatggcagtgccggaagtccggcttccagaggtgcagctccccaaagtgagcgagatgaaactgccgaaggtcccagaaatggctgttcccgacgtccacctgcctgaggttcaactgcccaaagtgtgcgaaatgaaggtgccagacatgaaactgccagagattaagctgccaaaggttcccgagatggcagtcccagacgttcatctgcctgaagtgcagctgccaaaagtcagcgaaattcgcctcccagaaatgcaggttccgaaagtccctgacgttcacctgccgaaagctcctgaggtgaagctgcccagggcacccgaagtacaactaaaggctacaaaggcggagcaggccgaagggatggagttcggtttcaagatgccgaagatgacaatgccaaagctgggcagagcagagtcgccttccagaggaaagccaggagaagccggagctgaggtgagtggcaagctagttaccctgccgtgcctgcagcccgaggtggacggagaagcccatgttggggtgccctctctgactcttccctccgtcgagcttgacctgcctggagcattgggacttcaaggtcaggtccctgccgctaaaatgggcaagggagaaagggtggagggacccgaagtggcagctggcgtcagggaagtgggttttcgggtgccatcagttgaaatagttacacctcagctgccggctgtcgaaatcgaagaaggcaggctggaaatgatcgaaactaaggttaagcccagctccaaattctcacttcccaagtttgggctcagtggccctaaggtggccaaagcagaggccgagggcgcaggtagagcaactaaactgaaggtgtccaagttcgccatctccctgcccaaggcacgcgttggcgctgaagcagaggccaagggagccggagaggcaggtcttctccctgccttagacctaagcatcccccagttgagtcttgacgcccatttgccgtccggcaaggtggaggtggccggagctgacctgaaattcaaaggacctcggtttgcactacccaaattcggggtcagaggcagagataccgaggcggcagaacttgtcccaggagttgcggaactggagggcaaagggtggggatgggacgggagagtcaagatgccgaagctcaaggtctccaccgccggacaagtagtgacagagggccatgatgcgggtctcaggatgcctccccttgggatctctttgccccaggtagaactcacgggtttcggtgaagcaggaacccctggccagcaggcgcagagcacggtgccgagtgctgagggcaccgccggatatagagtacaggtcccccaagtgacactcagcttgccaggcgcacaggtcgcaggcggagagctgctggtcggagaaggcgtgttcaaaatgccaactgtcaccgtaccccagttggagctggacgtggggctatctcgggaagcccaagctggcgaggctgctaccggtgagggcggactccggttgaaactgcccaccctgggggcaagagccagggttggcggtgagggggctgaggagcagcctccaggggcagaaagaaccttctgcctgtcgcttcctgatgttgagctctccccatctggcggaaaccatgcagagtatcaggtggctgaaggagagggcgaagctgggcacaaactcaaagtccgactaccccgatttgggctggttcgcgcaaaagaaggcgctgaagagggcgaaaaagcaaaatcccctaagcttcgactaccaagggtcggcttcagtcagtcggagatggtgactggcgagggttccccaagcccagaggaggaagaggaggaagaagaagaaggttcaggtgaaggagcctctggcaggcggggaagggttcgggtgcggctgcctcgagtggggttggcggctccaagtaaagccagccgcggtcaggaaggggatgcggctcccaaatccccagtccgagaaaagtcaccaaaattccgtttcccacgagtgtccctttctcccaaagcccgttccggcagcggcgaccaagaggagggcggactccgggttcgcctaccatctgtgggtttctccgagaccggagcgcctggtccggctcgcatggagggagcacaagctgcagccgtatag

SEQ ID NO: 319886 - DNA, 4386 bp, Artificial Sequence
  derived and/or modified sequence
atggaggccagaagcagaagcgccgaggagctgagaagagccgagctggtggagatcatcgtggagaccgaggcccagaccggcgtgagcggcatcaacgtggccggcggcggcaaggagggcatcttcgtgagagagctgagagaggacagccccgccgccagaagcctgagcctgcaggagggcgaccagctgctgagcgccagagtgttcttcgagaacttcaagtacgaggacgccctgagactgctgcagtgcgccgagccctacaaggtgagcttctgcctgaagagaaccgtgcccaccggcgacctggccctgagacccggcaccgtgagcggctacgagatcaagggccccagagccaaggtggccaagctgaacatccagagcctgagccccgtgaagaagaagaagatggtgcccggcgccctgggcgtgcccgccgacctggcccccgtggacgtggagttcagcttccccaagttcagcagactgagaagaggcctgaaggccgaggccgtgaagggccccgtgcccgccgcccccgccagaagaagactgcagctgcccagactgagagtgagagaggtggccgaggaggcccaggccgccagactggccgccgccgcccccccccccagaaaggccaaggtggaggccgaggtggccgccggcgccagattcaccgccccccaggtggagctggtgggccccagactgcccggcgccgaggtgggcgtgccccaggtgagcgcccccaaggccgcccccagcgccgaggccgccggcggcttcgccctgcacctgcccaccctgggcctgggcgcccccgccccccccgccgtggaggcccccgccgtgggcatccaggtgccccaggtggagctgcccgccctgcccagcctgcccaccctgcccaccctgccctgcctggagaccagagagggcgccgtgagcgtggtggtgcccaccctggacgtggccgcccccaccgtgggcgtggacctggccctgcccggcgccgaggtggaggccagaggcgaggcccccgaggtggccctgaagatgcccagactgagcttccccagattcggcgccagagccaaggaggtggccgaggccaaggtggccaaggtgagccccgaggccagagtgaagggccccagactgagaatgcccaccttcggcctgagcctgctggagcccagacccgccgcccccgaggtggtggagagcaagctgaagctgcccaccatcaagatgcccagcctgggcatcggcgtgagcggccccgaggtgaaggtgcccaagggccccgaggtgaagctgcccaaggcccccgaggtgaagctgcccaaggtgcccgaggccgccctgcccgaggtgagactgcccgaggtggagctgcccaaggtgagcgagatgaagctgcccaaggtgcccgagatggccgtgcccgaggtgagactgcccgaggtggagctgcccaaggtgagcgagatgaagctgcccaaggtgcccgagatggccgtgcccgaggtgagactgcccgaggtgcagctgctgaaggtgagcgagatgaagctgcccaaggtgcccgagatggccgtgcccgaggtgagactgcccgaggtgcagctgcccaaggtgagcgagatgaagctgcccgaggtgagcgaggtggccgtgcccgaggtgagactgcccgaggtgcagctgcccaaggtgcccgagatgaaggtgcccgagatgaagctgcccaaggtgcccgagatgaagctgcccgagatgaagctgcccgaggtgcagctgcccaaggtgcccgagatggccgtgcccgacgtgcacctgcccgaggtgcagctgcccaaggtgcccgagatgaagctgcccgagatgaagctgcccgaggtgaagctgcccaaggtgcccgagatggccgtgcccgacgtgcacctgcccgaggtgcagctgcccaaggtgcccgagatgaagctgcccaagatgcccgagatggccgtgcccgaggtgagactgcccgaggtgcagctgcccaaggtgagcgagatgaagctgcccaaggtgcccgagatggccgtgcccgacgtgcacctgcccgaggtgcagctgcccaaggtgtgcgagatgaaggtgcccgacatgaagctgcccgagatcaagctgcccaaggtgcccgagatggccgtgcccgacgtgcacctgcccgaggtgcagctgcccaaggtgagcgagatcagactgcccgagatgcaggtgcccaaggtgcccgacgtgcacctgcccaaggcccccgaggtgaagctgcccagagcccccgaggtgcagctgaaggccaccaaggccgagcaggccgagggcatggagttcggcttcaagatgcccaagatgaccatgcccaagctgggcagagccgagagccccagcagaggcaagcccggcgaggccggcgccgaggtgagcggcaagctggtgaccctgccctgcctgcagcccgaggtggacggcgaggcccacgtgggcgtgcccagcctgaccctgcccagcgtggagctggacctgcccggcgccctgggcctgcagggccaggtgcccgccgccaagatgggcaagggcgagagagtggagggccccgaggtggccgccggcgtgagagaggtgggcttcagagtgcccagcgtggagatcgtgaccccccagctgcccgccgtggagatcgaggagggcagactggagatgatcgagaccaaggtgaagcccagcagcaagttcagcctgcccaagttcggcctgagcggccccaaggtggccaaggccgaggccgagggcgccggcagagccaccaagctgaaggtgagcaagttcgccatcagcctgcccaaggccagagtgggcgccgaggccgaggccaagggcgccggcgaggccggcctgctgcccgccctggacctgagcatcccccagctgagcctggacgcccacctgcccagcggcaaggtggaggtggccggcgccgacctgaagttcaagggccccagattcgccctgcccaagttcggcgtgagaggcagagacaccgaggccgccgagctggtgcccggcgtggccgagctggagggcaagggctggggctgggacggcagagtgaagatgcccaagctgaagatgcccagcttcggcctggccagaggcaaggaggccgaggtgcagggcgacagagccagccccggcgagaaggccgagagcaccgccgtgcagctgaagatccccgaggtggagctggtgaccctgggcgcccaggaggagggcagagccgagggcgccgtggccgtgagcggcatgcagctgagcggcctgaaggtgagcaccgccggccaggtggtgaccgagggccacgacgccggcctgagaatgccccccctgggcatcagcctgccccaggtggagctgaccggcttcggcgaggccggcacccccggccagcaggcccagagcaccgtgcccagcgccgagggcaccgccggctacagagtgcaggtgccccaggtgaccctgagcctgcccggcgcccaggtggccggcggcgagctgctggtgggcgagggcgtgttcaagatgcccaccgtgaccgtgccccagctggagctggacgtgggcctgagcagagaggcccaggccggcgaggccgccaccggcgagggcggcctgagactgaagctgcccaccctgggcgccagagccagagtgggcggcgagggcgccgaggagcagccccccggcgccgagagaaccttctgcctgagcctgcccgacgtggagctgagccccagcggcggcaaccacgccgagtaccaggtggccgagggcgagggcgaggccggccacaagctgaaggtgagactgcccagattcggcctggtgagagccaaggagggcgccgaggagggcgagaaggccaagagccccaagctgagactgcccagagtgggcttcagccagagcgagatggtgaccggcgagggcagccccagccccgaggaggaggaggaggaggaggaggagggcagcggcgagggcgccagcggcagaagaggcagagtgagagtgagactgcccagagtgggcctggccgcccccagcaaggccagcagaggccaggagggcgacgccgcccccaagagccccgtgagagagaagagccccaagttcagattccccagagtgagcctgagccccaaggccagaagcggcagcggcgaccaggaggagggcggcctgagagtgagactgcccagcgtgggcttcagcgagaccggcgcccccggccccgccagaatggagggcgcccaggccgccgccgtgtag

SEQ ID NO: 319887 - DNA, 4191 bp, Artificial Sequence
  derived and/or modified sequence
atggaggccagaagcagaagcgccgaggagctgagaagagccgagctggtggagatcatcgtggagaccgaggcccagaccggcgtgagcggcatcaacgtggccggcggcggcaaggagggcatcttcgtgagagagctgagagaggacagccccgccgccagaagcctgagcctgcaggagggcgaccagctgctgagcgccagagtgttcttcgagaacttcaagtacgaggacgccctgagactgctgcagtgcgccgagccctacaaggtgagcttctgcctgaagagaaccgtgcccaccggcgacctggccctgagacccggcaccgtgagcggctacgagatcaagggccccagagccaaggtggccaagctgaacatccagagcctgagccccgtgaagaagaagaagatggtgcccggcgccctgggcgtgcccgccgacctggcccccgtggacgtggagttcagcttccccaagttcagcagactgagaagaggcctgaaggccgaggccgtgaagggccccgtgcccgccgcccccgccagaagaagactgcagctgcccagactgagagtgagagaggtggccgaggaggcccaggccgccagactggccgccgccgcccccccccccagaaaggccaaggtggaggccgaggtggccgccggcgccagattcaccgccccccaggtggagctggtgggccccagactgcccggcgccgaggtgggcgtgccccaggtgagcgcccccaaggccgcccccagcgccgaggccgccggcggcttcgccctgcacctgcccaccctgggcctgggcgcccccgccccccccgccgtggaggcccccgccgtgggcatccaggtgccccaggtggagctgcccgccctgcccagcctgcccaccctgcccaccctgccctgcctggagaccagagagggcgccgtgagcgtggtggtgcccaccctggacgtggccgcccccaccgtgggcgtggacctggccctgcccggcgccgaggtggaggccagaggcgaggcccccgaggtggccctgaagatgcccagactgagcttccccagattcggcgccagagccaaggaggtggccgaggccaaggtggccaaggtgagccccgaggccagagtgaagggccccagactgagaatgcccaccttcggcctgagcctgctggagcccagacccgccgcccccgaggtggtggagagcaagctgaagctgcccaccatcaagatgcccagcctgggcatcggcgtgagcggccccgaggtgaaggtgcccaagggccccgaggtgaagctgcccaaggcccccgaggtgaagctgcccaaggtgcccgaggccgccctgcccgaggtgagactgcccgaggtggagctgcccaaggtgagcgagatgaagctgcccaaggtgcccgagatggccgtgcccgaggtgagactgcccgaggtggagctgcccaaggtgagcgagatgaagctgcccaaggtgcccgagatggccgtgcccgaggtgagactgcccgaggtgcagctgctgaaggtgagcgagatgaagctgcccaaggtgcccgagatggccgtgcccgaggtgagactgcccgaggtgcagctgcccaaggtgagcgagatgaagctgcccgaggtgagcgaggtggccgtgcccgaggtgagactgcccgaggtgcagctgcccaaggtgcccgagatgaaggtgcccgagatgaagctgcccaaggtgcccgagatgaagctgcccgagatgaagctgcccgaggtgcagctgcccaaggtgcccgagatggccgtgcccgacgtgcacctgcccgaggtgcagctgcccaaggtgcccgagatgaagctgcccgagatgaagctgcccgaggtgaagctgcccaaggtgcccgagatggccgtgcccgacgtgcacctgcccgaggtgcagctgcccaaggtgcccgagatgaagctgcccaagatgcccgagatggccgtgcccgaggtgagactgcccgaggtgcagctgcccaaggtgagcgagatgaagctgcccaaggtgcccgagatggccgtgcccgacgtgcacctgcccgaggtgcagctgcccaaggtgtgcgagatgaaggtgcccgacatgaagctgcccgagatcaagctgcccaaggtgcccgagatggccgtgcccgacgtgcacctgcccgaggtgcagctgcccaaggtgagcgagatcagactgcccgagatgcaggtgcccaaggtgcccgacgtgcacctgcccaaggcccccgaggtgaagctgcccagagcccccgaggtgcagctgaaggccaccaaggccgagcaggccgagggcatggagttcggcttcaagatgcccaagatgaccatgcccaagctgggcagagccgagagccccagcagaggcaagcccggcgaggccggcgccgaggtgagcggcaagctggtgaccctgccctgcctgcagcccgaggtggacggcgaggcccacgtgggcgtgcccagcctgaccctgcccagcgtggagctggacctgcccggcgccctgggcctgcagggccaggtgcccgccgccaagatgggcaagggcgagagagtggagggccccgaggtggccgccggcgtgagagaggtgggcttcagagtgcccagcgtggagatcgtgaccccccagctgcccgccgtggagatcgaggagggcagactggagatgatcgagaccaaggtgaagcccagcagcaagttcagcctgcccaagttcggcctgagcggccccaaggtggccaaggccgaggccgagggcgccggcagagccaccaagctgaaggtgagcaagttcgccatcagcctgcccaaggccagagtgggcgccgaggccgaggccaagggcgccggcgaggccggcctgctgcccgccctggacctgagcatcccccagctgagcctggacgcccacctgcccagcggcaaggtggaggtggccggcgccgacctgaagttcaagggccccagattcgccctgcccaagttcggcgtgagaggcagagacaccgaggccgccgagctggtgcccggcgtggccgagctggagggcaagggctggggctgggacggcagagtgaagatgcccaagctgaaggtgagcaccgccggccaggtggtgaccgagggccacgacgccggcctgagaatgccccccctgggcatcagcctgccccaggtggagctgaccggcttcggcgaggccggcacccccggccagcaggcccagagcaccgtgcccagcgccgagggcaccgccggctacagagtgcaggtgccccaggtgaccctgagcctgcccggcgcccaggtggccggcggcgagctgctggtgggcgagggcgtgttcaagatgcccaccgtgaccgtgccccagctggagctggacgtgggcctgagcagagaggcccaggccggcgaggccgccaccggcgagggcggcctgagactgaagctgcccaccctgggcgccagagccagagtgggcggcgagggcgccgaggagcagccccccggcgccgagagaaccttctgcctgagcctgcccgacgtggagctgagccccagcggcggcaaccacgccgagtaccaggtggccgagggcgagggcgaggccggccacaagctgaaggtgagactgcccagattcggcctggtgagagccaaggagggcgccgaggagggcgagaaggccaagagccccaagctgagactgcccagagtgggcttcagccagagcgagatggtgaccggcgagggcagccccagccccgaggaggaggaggaggaggaggaggagggcagcggcgagggcgccagcggcagaagaggcagagtgagagtgagactgcccagagtgggcctggccgcccccagcaaggccagcagaggccaggagggcgacgccgcccccaagagccccgtgagagagaagagccccaagttcagattccccagagtgagcctgagccccaaggccagaagcggcagcggcgaccaggaggagggcggcctgagagtgagactgcccagcgtgggcttcagcgagaccggcgcccccggccccgccagaatggagggcgcccaggccgccgccgtgtag

SEQ ID NO: 319888 - protein, 2154 aa, Artificial Sequence
  derived and/or modified sequence
MAQVPGEVDNMEGLPAPNNNPAARWESPDRGWEREQPAASTAAASLFECSRIKALADEREAVQKKTFTKWVNSHLARVGCHIGDLYVDLRDGFVLTRLLEVLSGEQLPRPTRGRMRIHSLENVDKALQFLKEQRVHLENVGSHDIVDGNHRLTLGLVWTIILRFQIQVIKIETEDNRETRSAKDALLLWCQMKTAGYPEVNIQNFTTSWRDGLAFNALIHRHRPDLVDFSKLTKSNANYNLQRAFRTAEQHLGLARLLDPEDVNMEAPDEKSIITYVVSFYHYFSKMKALAVEGKRIGKVLDQVLEVGKIIERYEELAAELLAWIHRTVGLISNQKFANSLSGVQQQLQAFTAYCTLEKPVKFQEKGNLEVLLFSIQSKLRACNRRLFVPREGCGIWDIDKAWGELEKAEHEREAALRAELIRQEKLELLAQRFDHKVAMRESWLNENQRLVSQDNFGYELPAVEAAMKKHEAIEADIAAYEERVQGVAELAQALAAEGYYDIRRVAAQRDSVLRQWALLTGLVGARRTRLEQNLALQKVFQEMVYMVDWMEEMQAQLLSRECGQHLVEADDLLQKHGLLEGDIAAQSERVEALNAAALRFSQLQGYQPCDPQVICNRVNHVHGCLAELQEQAARRRAELEASRSLWALLQELEEAESWARDKERLLEAAGGGGAAGAAGAAGTAGGAHDLSSTARLLAQHKILQGELGGRRALLQQALRCGEELVAAGGAVGPGADTVHLVGLAERAASARRRWQRLEEAAARRERRLQEARALHQFGADLDGLLDWLRDAYRLAAAGDFGHDEASSRRLARQHRALTGEVEAHRGPVSGLRRQLATLGGASGAGPLVVALQVRVVEAEQLFAEVTEVAALRRQWLRDALAVYRMFGEVHACELWIGEKEQWLLSMRVPDSLDDVEVVQHRFESLDQEMNSLMGRVLDVNHTVQELVEGGHPSSDEVRSCQDHLNSRWNRIVELVEQRKEEMSAVLLVENHVLEVAEVRAQVREKRRAVESAPRAGGALQWRLSGLEAALQALEPRQAALLEEAALLAERFPAQAARLHQGAEELGAEWGALASAAQACGEAVAAAGRLQRFLHDLDAFLDWLVRAQEAAGGSEGPLPNSLEEADALLARHAALKEEVDQREEDYARIVAASEALLAADGAELGPGLALDEWLPHLELGWHKLLGLWEARREALVQAHIYQLFLRDLRQALVVLRNQEMALSGAELPGTVESVEEALKQHRDFLTTMELSQQKMQVAVQAAEGLLRQGNIYGEQAQEAVTRLLEKNQENQLRAQQWMQKLHDQLELQHFLRDCHELDGWIHEKMLMARDGTREDNHKLHKRWLRHQAFMAELAQNKEWLEKIEREGQQLMQEKPELAASVRKKLGEIRQCWAELESTTQAKARQLFEASKADQLVQSFAELDKKLLHMESQLQDVDPGGDLATVNSQLKKLQSMESQVEEWYREVGELQAQTAALPLEPASKELVGERQNAVGERLVRLLEPLQERRRLLLASKELHQVAHDLDDELAWVQERLPLAMQTERGNGLQAVQQHIKKNQGLRREIQAHGPRLEEVLERAGALASLRSPEAEAVRRGLEQLQSAWAGLREAAERRQQVLDAAFQVEQYYFDVAEVEAWLGEQELLMMSEDKGKDEQSTLQLLKKHLQLEQGVENYEESIAQLSRQCRALLEMGHPDSEQISRRQSQVDRLYVALKELGEERRVALEQQYWLYQLSRQVSELEHWIAEKEVVAGSPELGQDFEHVSVLQEKFSEFASETGMAGRERLAAVNQMVDELIECGHTAAATMAEWKDGLNEAWAELLELMGTRAQLLAASRELHKFFSDARELQGQIEEKRRRLPRLTTPPEPRPSASSMQRTLRAFEHDLQLLVSQVRQLQEGAAQLRTVYAGEHAEAIASREQEVLQGWKELLSACEDARLHVSSTADALRFHSQVRDLLSWMDGIASQIGAADKPRDVSSVEVLMNYHQGLKTELEARVPELTTCQELGRSLLLNKSAMADEIQAQLDKLGTRKEEVSEKWDRHWEWLQQMLEVHQFAQEAVVADAWLTAQEPLLQSRELGSSVDEVEQLIRRHEAFRKAAAAWEERFSSLRRLTTPRREDHLNPGVQDQPWQHTEKPSLPKPKANKEKTARRDGTCL

SEQ ID NO: 319889 - DNA, 4312 bp, Artificial Sequence
  derived and/or modified sequence
tgaaatcccggcaagctcggcggcgctttagctccgcctctctcctcctttgctcacgaaccccgccccagcccgccccgccccgcgccggggccggagccgcagcccgagcggcggggtgaccatggaggaagaagatgagtctcgagggaagacagaggagtcgggggaggatcggggcgatggtccgccagacagagaccccacgctttctccttctgcctttatcctgcgagccatccagcaggctgtgggaagctccctgcagggggacctgcccaatgataaagatggctctcggtgtcatggccttcgatggcggcgctgccggagtccacggtcagagccccgttcccaggaatcagggggcactgacacggctactgtgttggacatggccacggacagcttcctcgcagggctggtgagtgtcctggatcccccggatacctgggttcccagccgcctggacctgcggcctggcgaaagtgaggacatgctggagctggtggctgaggtccgaatcggggacagagatcccatccctctgcctgtgcccagcctgctgccccgtctcagggcctggaggacgggcaaaacggtttctccacagtcgaactcctctaggcccacctgtgcccgtcacctcaccttgggcacgggagacgggggccctgccccaccccctgccccctcctctgcatcctcctccccttccccttctccctcatcttcctccccttcccctcccccacccccaccgccccctgcacccccagccccacctgccccccgattcgatatctatgaccccttccaccccaccgacgaggcctactctccaccgcctgctccggagcaaaagtacgacccttttgagcccaccggctccaaccccagctcatcagcggggaccccctcacctgaggaggaagaggaggaggaagaggaagaagaagaggaagaggaagacgaggaggaggaggaaggcctgtcccagagcatcagccgcatctcggagaccctggcgggcatctacgatgacaacagcctgagccaggacttcccaggtgacgagagcccccgcccggacgcgcagcccacacagccgactcccgcccctggaacgccgccccaggtggactccacccgggctgatggagccatgcgccggcgggtcttcgtggtggggaccgaggcagaggcttgtcgggaaggcaaggtctcggtggaggtggtgaccgctggtggagccgccctcccgccgcccctgctgccgcccggcgactcggagatcgaggaaggggagatcgtccagccggaggaggagcccaggctggcgctgtccctcttccgccccggcggccgggccgcccggcctacaccggccgcctcggccacccccacggcccagccccttcctcagcctcccgctccgcgggcccccgagggggacgacttcttgtccctgcatgcggagtcggacggcgagggcgccctgcaggtggacctaggggagccggctcccgcgccgcccgccgccgactcgcgctggggcggcctggacctgcgccgcaagatcctgacccaacggcgggagcgctaccgccagcgctcgccctccccggcgcccgcgcccgccccggccgccgctgctggtccgcccacgcgcaagaagtccaggcgggaacgcaagcgcagcggcgaggccaaggaggccgcctcgtcctcgtcgggcacccagccagcgccgcccgccccggcctcgccctgggactccaagaagcaccgctcgcgggaccgcaagcccggctcccacgcctcgtcgtccgcccgccgccgctcccgctcccgctcccgctcccgctccacccgccgccgctcgcgcagcaccgaccgccgccgcgggggcagccgcaggtcgcggtcccgggagaagcggcgacggcggcggcgctccgcctccccgcccccggccacttcctcatcgtcgtcctcgaggcgcgagcggcaccgcgggaaacaccgggacggtggcggcagcaagaagaagaagaagcggtcgcggtcccggggtgagaagcggtctggggatggcagcgagaaggccccggcgcccgccccgccgccctctggctccacctcgtgtggtgaccgcgacagccgccgccggggggccgtgccaccctccatccaggacctcacggaccacgacctcttcgccatcaagcggaccatcacggtgggccggcttgacaagtccgacccccgaggaccctctcctgctccggcctcctcacctaagcgggaggtcctgtacgactccgagggactgagcggcgaggagcggggcggcaagagcagccagaaggatcggcgccgctcgggggccgcctcctcctcctcctcttcccgggagaaggggtctcgtcggaaggcgctggacgggggtgaccgggatcgggacagggacagagatagggacagggacaggtcatccaagaaggcccggccccccaaggagtcggcgccttcctcagggcccccgccaaagccaccagtcagcagcggctcaggctcttcatcctcgtcgtcctcctgttcttcccggaaggtgaagctgcagtccaaggtggcggtgctgatccgcgagggtgtcagcagcaccaccccggccaaggatgccgcgtcagccggcctgggctccattggcgtcaaattcagccgtgaccgcgagagtcgctcccccttcctcaaacctgacgagcgggcccccactgagatggccaaagcagctccgggcagcaccaagcccaaaaagaccaaggtcaaggccaaggcaggggccaagaaaaccaaggggaccaagggaaagaccaagccatccaagaccaggaaaaaggtccgcagtggaggtggcagcgggggcagtggtggccaggtgtcgctgaagaagtccaaggcggatagctgcagccaggcggcaggcaccaagggggcggaggagacttcctggtccggggaggagcgggcagccaaggttcctagcaccccgccccccaaggcagccccaccaccccctgccctcactccggactcgcagaccgtggacagcagctgcaagacacctgaggtctccttcctgcccgaggaggccactgaggaggctggggtccgaggtggggcggaggaggaggaggaggaagaagaagaggaggaggaagaggaagaggaggaggagcagcagcctgctaccaccacggccaccagcactgctgcagccgccccaagcactgcccccagcgcggggtccacagccggtgactcgggggcggaggacgggccagcttcccgtgtctcccagctgcccacgttgcccccgcccatgccctggaatctgccagctggtgtggactgcaccaccagcggcgtcctggccttgactgcacttctcttcaagatggaagaagccaacctggcgagccgagcgaaggcccaggagctgatccaggccaccaaccagatcctcagccacagaaagccaccctcaagtctggggatgaccccagctcctgtgcccacctctttgggtctgccccctggcccctccagctacctgcttcctggcagcctccctctggggggctgcggttcgaccccccccacccccaccgggctggctgccacgtctgacaagagagagggcagcagcagctctgagggccgtggggacacagataagtatctgaagaagctgcacacgcaggagcgggcggtggaggaggtgaagctggccatcaagccatactatcagaagaaggacatcaccaaggaggagtacaaggacatcctgaggaaggccgtccacaagatctgccacagcaaaagtggggaaatcaacccagtgaaggtgagcaacctggtgcgggcctacgtccagcgctaccgctacttccgcaagcacggtcgcaagccaggggaccccccagggcccccacggccgcccaaggagccagggcccccagacaagggtggcccgggcctgcccctgccccctctctgagagccctggccagctcttcgcccctcacctctttgaaactctggacgtatttatggctccacctccccacctccctcccccgtcagtgggatgactgggggagggttgctgcagggaagaggagagccccctgccctgccctgccccgtgtccacctcccttgcccccaagcctgtccccagtgcccctcccttctgtttgtgcccctctccccaatttcattaaagatttcatgaaacattacccctg

SEQ ID NO: 319890 - DNA, 684 bp, Artificial Sequence
  derived and/or modified sequence
ggtgaccatggaggaagaagatgagtctcgagggaagacagaggagtcgggggaggatcggggcgatggtccgccagacagagaccccacgctttctccttctgcctttatcctgcgagccatccagcaggctgtgggaagctccctgcagggggacctgcccaatgataaagatggctctcggtgtcatggccttcgatggcggcgctgccggagtccacggtcagagccccgttcccaggaatcagggggcactgacacggctactgtgttggacatggccacggacagcttcctcgcagggctggtgagtgtcctggatcccccggatacctgggttcccagccgcctggacctgcggcctggcgaaagtgaggacatgctggagctggtggctgaggtccgaatcggggacagagatcccatccctctgcctgtgcccagcctgctgccccgtctcagggcctggaggacgggcaaaacggtttctccacagtcgaactcctctaggcccacctgtgcccgtcacctcaccttgggcacgggagacgggccctgccccaccccctgccccctcctctgcatcctcctccccttccccttctccctcatcttcctccccttcccctcccccacccccaccgccccctctccccaatttcattaaagatttcatgaaacatt

SEQ ID NO: 319891 - protein, 454 aa, Artificial Sequence
  derived and/or modified sequence
MPRCPAGAMDEGPVDLRTRPKAAGLPGAALPLRKRPLRAPSPEPAAPRGAAGLVVPLDPLRGGCDLPAVPGPPHGLARPEALYYPGALLPLYPTRAMGSPFPLVNLPTPLYPMMCPMEHPLSADIAMATRADEDGDTPLHIAVVQGNLPAVHRLVNLFQQGGRELDIYNNLRQTPLHLAVITTLPSVVRLLVTAGASPMALDRHGQTAAHLACEHRSPTCLRALLDSAAPGTLDLEARNYDGLTALHVAVNTECQETVQLLLERGADIDAVDIKSGRSPLIHAVENNSLSMVQLLLQHGANVNAQMYSGSSALHSASGRGLLPLVRTLVRSGADSSLKNCHNDTPLMVARSRRVIDILRGKATRPASTSQPDPSPDRSANTSPESSSRLSSNGLLSASPSSSPSQSPPRDPPGFPMAPPNFFLPSPSPPAFLPFAGVLRGPGRPVPPSPAPGGS

SEQ ID NO: 319892 - DNA, 1365 bp, Artificial Sequence
  derived and/or modified sequence
atgcctcgttgtccagccggagctatggacgaggggccggtggatcttagaactagacctaaagccgccggcttgccgggtgccgcactgccactaagaaaaagaccacttcgcgcgccctctccagaacctgccgcccctcggggcgctgctggattggtggtacctctggatcccttaaggggcggctgtgatttgcctgcagttcctggccccccacatggccttgcccgccccgaggccctgtactaccctggagctttgctccctctgtatccaaccagggccatgggctccccctttccattagtcaacctgccaacccccctttatcctatgatgtgtcccatggagcatcccctgagcgccgacatagcgatggcaacgcgggcagatgaagacggcgacactcctctgcacattgcagtggtgcaaggaaatttgcccgcggttcaccgcctagttaaccttttccaacagggcggacgcgagctggacatctataataatctaaggcagaccccgctgcatcttgccgtgattacgacccttcccagtgttgtgagactgttggtcacagcaggtgccagccccatggccctggacagacatggccagacagccgcccacttggcatgcgagcacagaagtcctacttgtctccgggccctgcttgattccgctgcacccggcaccttggatctggaggcgcgcaattatgatgggctgacagccctacatgtggcagtcaatactgaatgccaagagacagtacaactcctccttgagcggggtgccgacatcgatgccgtggacattaaaagcgggcgatcaccattaattcatgccgtcgagaataattctctgagtatggtacagctcctcctccaacacggggcgaatgtgaatgctcagatgtactctggatcttccgcccttcactccgcatccggcagaggcctcctcccgctggttaggactctggtaaggtccggtgccgactcctctctcaagaactgtcataacgacacaccgctgatggtcgcccgctctagacgggtgattgatattttacggggtaaggccactagaccggctagtacatcccagcccgacccttcgcccgacagaagcgccaacacttcacccgaatcatctagtcggctttcgtccaacggcttactgtctgcatcgcccagcagttctccatcacagtcgcctcctcgggaccctcccggcttccccatggcaccgcctaatttttttctcccctctccgtctccgcccgcatttctgccatttgctggggtcttgaggggcccgggtcggcccgtgccaccatcccccgcacccggcggctcctag

SEQ ID NO: 319893 - DNA, 1365 bp, Artificial Sequence
  derived and/or modified sequence
atgccccgctgcccagctggggccatggatgagggccctgtggacctgcggacccggcccaaggctgctggcctgcccggggccgccctgcccctgaggaagaggcccctgcgggcccccagccctgagcctgctgcccccagaggagctgctggcctggtggtgcccctggaccccctgcggggcggctgtgacctgcctgctgtgcccggccccccccacggcctggcccggcctgaggccctgtactacccaggggccctgctgcccctgtaccccacccgggccatgggcagccccttccccctggtgaacctgcccacccccctgtaccccatgatgtgccccatggagcaccccctgtctgctgacatcgccatggccaccagggcagatgaagatggagacacccccctgcacatcgctgtggtgcagggcaacctgcctgctgtgcaccggctggtgaacctcttccagcagggcggccgggagctggacatctacaacaacctgcggcagacccccctgcacctggccgtcatcaccaccctgcccagcgtggtgcggctgctggtgacagctggggccagccccatggccctggacagacatggccagacagctgcccacctggcctgtgagcacaggagccccacctgcctgcgggccctgctggacagcgctgcccctggcaccctggacctggaggccaggaactatgatggcctgacagccctgcacgtggccgtgaacacagagtgccaggagaccgtgcagctgctgctggagagaggagctgacattgatgctgtggacatcaagagcggccgcagccccctcatccatgctgtggagaacaacagcctgtccatggtgcagctgctgctgcagcacggggccaacgtgaatgcccagatgtacagcggcagcagcgccctgcacagcgccagcggccggggcctgctgcccctggtgaggaccctggtgcgctctggagctgacagcagcctgaagaactgccacaatgacacccccctgatggtggcccggagccggcgggtgattgacatcctgcggggcaaggccaccaggcctgccagcaccagccagcctgaccccagcccagacagaagtgccaacaccagccctgagagcagcagccggctgagcagcaatggcctgctgagcgccagccccagcagcagccccagccagagccccccccgggaccccccaggcttccccatggccccacccaacttcttcctgcccagccccagccccccagccttcctgccctttgctggggtgctgcggggccctggccggcctgtgccccccagccctgcccctgggggcagctag

SEQ ID NO: 319894 - DNA, 1365 bp, Artificial Sequence
  derived and/or modified sequence
atgccccggtgccccgccggcgccatggacgagggccccgtggacttgcgcacacggcctaaggcagccggactgcccggtgccgctctgccactcagaaagaggcccctaagggcccctagccccgagcctgctgccccgcgaggtgcagcaggcctggtcgtaccactcgatcctctgcgcggaggctgtgacctgccagctgtgcctggacctccccatggactagctagacctgaggctttgtactaccctggcgccttgcttcccttgtaccctacacgtgcgatgggcagcccctttccacttgtcaatctgcctaccccactttaccccatgatgtgccccatggaacaccccttgtctgccgacatcgcaatggcaacccgagcagacgaagacggagacacgcctcttcatatcgccgtggttcagggcaatctgccagccgtgcacaggctggtgaatcttttccaacaggggggccgagaactggatatctacaataacctgagacagactcccctgcaccttgccgtgattaccacgctgccttccgtggtccgattactggtgaccgctggagcctcaccaatggcgctagacagacacggccagaccgccgcacacctggcctgtgagcacaggtcccccacctgcctgcgtgccctgctggacagcgccgctccagggaccctggatctcgaggctcgcaattatgatggcctgacggccctgcacgttgccgtgaatacagagtgccaagagacagttcagcttctgcttgaacgcggcgcggacatagacgccgtagacattaagagcggccggtcccccctcatccatgctgtcgagaacaattcgctttctatggtccagctcctgctgcagcatggcgcaaatgttaatgctcagatgtattcagggtcaagcgcgctccactctgcaagcggccggggtctgctacctctggtccgaactctggtgcgcagcggcgccgactcatccctgaagaactgtcataatgacacccccttgatggtggcccggtctcgacgcgtcatcgacatcctccgcgggaaggcaactagacccgcgtctaccagccagcctgatccatctcccgacagaagcgcgaacactagcccagaatcctccagcagactgtcatccaacgggttgctctctgcatcaccctccagctccccctctcagtctcctccgcgcgacccaccaggttttcctatggcaccccctaacttcttcctcccttctccctctcctccggcttttctaccctttgccggagtgctgagaggaccaggccgcccggtacctccatctccagcacctggcgggagttag

SEQ ID NO: 319895 - DNA, 1365 bp, Artificial Sequence
  derived and/or modified sequence
atgcctaggtgccctgccggagccatggacgaaggacccgtcgacctccgcaccaggccaaaagcggcaggactaccgggagccgcactgcccctccgcaagcgacctctgcgggctccctcaccagagccagctgcgccaaggggagcggcaggcctagtagtgccattagaccctctcaggggcggatgcgacttacctgcagttccaggccctccccacgggcttgcgcgacctgaagcgttgtactaccctggcgctttgttacccctttaccctactagggctatgggctccccgttcccactggtcaacctccctactccactgtaccccatgatgtgtcccatggagcaccctctttcggccgacatcgctatggccacacgggcagatgaagacggagatacacctctccatatagccgttgtccagggtaatctgcccgctgtgcatcgccttgtcaacctcttccaacaggggggtagagagctggacatctataataacctgaggcaaacacccctgcacctggccgtgattacaactcttccttcagttgtcagactcctcgtgactgcaggcgcaagtcccatggctctagataggcatgggcagaccgcagcccatctggcgtgtgagcatagatctcctacgtgtctgagagccctgctggacagtgcagcacccggtacccttgatttggaggcgaggaactacgatggtttgaccgcactgcacgtagccgtcaatactgaatgtcaggagaccgtgcagctgctactagaacgaggggctgacatcgacgcggttgacattaagagcggtaggagccctctaattcacgccgtggagaacaactcgctgtcaatggtccagctgctgctacagcacggagctaacgtgaatgcccaaatgtactcaggttcttctgcgttgcacagcgctagtggacgcggtctgctaccactcgtacgcactctggtgagatcaggcgctgatagctccctcaagaactgccacaatgacacccctctgatggtggcccgttcacgccgagtcatcgatatccttcgcggtaaggccacacggcctgcctcaacctcgcagccagaccccagccccgatcggagcgccaacacctccccggagtcttcctcccggctcagcagtaatggattgctttccgcctccccgtcatcttccccttcacaaagtcctccaagagacccccctgggttcccaatggcccctccaaacttctttctgccatcccctagcccccctgcttttttgccgtttgctggggtgcttcgcggtcccggtagacctgttcctccaagccctgcgcctggtggttcatag

SEQ ID NO: 319896 - DNA, 1365 bp, Artificial Sequence
  derived and/or modified sequence
atgcctcgctgcccagctggcgccatggacgaaggtccggttgatctgcgcaccagaccaaaggcagcggggctgccaggagctgctttgcccctcaggaaacgcccactgcgtgccccatcacctgagcctgctgccccccggggagctgcgggcctagtggtaccactcgaccccctaagaggcggctgcgatctgcccgctgtacccgggccgccgcatggattggcaagacccgaagctctctattaccccggagcactgttacccctgtacccaacccgggccatggggtcccccttccccctggtcaatctcccaactccactttaccctatgatgtgccccatggagcatccgctcagtgccgatattgccatggctacacgggcagacgaagacggagacaccccactgcatattgccgttgtgcaggggaatctgccagctgtacacagattggtgaatttgttccagcagggagggcgcgaactcgacatttacaataatttaagacaaactccccttcaccttgctgtaattaccaccttgccctcagtggtgagattactcgtgacagcaggtgccagcccaatggccctcgatcgacatggccagacagctgcccacctggcctgcgagcaccgctctcctacctgcctgcgtgcacttctggatagtgccgcccccggtacactggacctagaagcccggaactacgacgggcttaccgctcttcacgtggcagtgaatactgagtgccaagaaacagtgcagctcttgcttgaacggggcgcggatattgacgcagtggacatcaaaagtggaagaagcccgctgatccacgcagtcgagaataactctctgagcatggtgcaactgttactgcaacacggtgcaaatgtgaacgcccaaatgtactcagggtcaagtgctctgcatagcgcgagtggtagggggctgctcccccttgtgagaacccttgtaaggagtggggctgacagttctctgaaaaactgccataacgacacacccctcatggttgcacgcagcagacgcgtcatcgacatcctaagagggaaagctactcggcctgccagcacaagccagccggacccatcccccgaccggtcagcgaacacttccccagaatccagcagtagactttcttccaacggccttctctcagcaagccccagcagtagtcctagtcagagtccgccccgggaccctccaggatttcccatggcaccaccaaacttttttttgccctcccccagtcctcccgcatttctgcctttcgccggggttctccgcgggccaggaagaccagtaccgccttctcccgcacccggcggatcttag

SEQ ID NO: 319897 - DNA, 1365 bp, Artificial Sequence
  derived and/or modified sequence
atgccaagatgtcccgctggcgccatggacgagggtccagtggatctgcgcacacggcccaaggcagccggactcccaggggccgcactgcccctgagaaagagacccctaagagcgcctagccctgagcccgctgcaccacgaggagctgccggtcttgtcgtgccacttgatccactcagagggggatgcgacttacctgctgttcccggccctccccatggcttagcccgccccgaggccttgtattaccctggcgctcttcttccactctaccccactcgagccatgggctctcccttcccattagtgaatctacctacgcctctgtatccaatgatgtgcccaatggagcatccccttagcgcggatattgcaatggcgacaagagccgacgaagacggagacactcccctccacattgccgtggtccaaggcaatctccctgctgtgcacagacttgtcaacctatttcagcagggtggacgcgagctagacatttataacaacttgagacaaacacctctacaccttgccgtgattaccaccctccctagcgtcgtgagactcctggtaaccgccggagcctctccaatggctttggatcggcacggccaaaccgccgcccacctggcatgcgaacaccgctctccaacctgtctgcgcgctctgctggattcagccgcacctggtaccttggacttagaagcaagaaactatgatggtctgaccgccctccatgtcgccgttaacaccgaatgtcaagagacggtccagttactgttggagcggggagcagatatcgatgccgttgacattaaaagcgggcggtctcctttaattcacgcagtcgaaaataatagcttgagtatggtgcaactattattacagcacggagcaaacgttaacgcacagatgtattccggttcttcagccctgcattccgcatccggccgtggccttctgcctttagtgcgtacgctcgttcgatcaggggccgactcctcactgaaaaattgccataatgacaccccactcatggtcgctcgttcccgtcgagtcatcgacattctgcgtggaaaagctacccggcccgcaagcacctcgcaaccagatccttcccccgatcgctctgccaatacttccccagaatcctcttccaggctttccagtaatggccttctaagcgccagtcctagttcctccccctcacagtccccaccgcgcgatccacccggattccctatggccccgcccaacttctttttaccgagcccatcacccccagccttcctaccattcgccggcgtgctgcgtggccccggtcgcccagttccaccctctcctgctccaggcggttcctag

SEQ ID NO: 319898 - DNA, 2038 bp, Artificial Sequence
  derived and/or modified sequence
cgggcggggcgcagggcaggctgcacctcagagcggcgggagcagcggcgggtccaggaaacccctggggcgtacgggtggccccgggggggccgggggcggggaggcgggcggccggcaccgccccggccgacaaaagtcccttcagttcagccggctgcaggggaagtcccggcgcccggcgaaaccaccctcccgtgcagccgagcccagccgctctccggccgccgtccccggcggccccatgccccgatgccccgcgggggccatggacgaggggcccgtggacctgcgcacccggcccaaggccgccggactcccgggcgccgcgctgccgctccgcaagcgcccgctgcgcgcgccctccccggagcccgccgctccccgcggcgctgcgggccttgtcgtccccctggaccctctgcgcggcggctgcgacctgccggcggtccccgggcccccccacggcctggcccggccggaggcgctttactaccccggagccttactgcctttgtaccccactcgggccatgggctccccgtttcctctggtgaacctgcctacacccctataccccatgatgtgccccatggaacaccccctttctgctgacatcgccatggccacccgtgcagatgaggacggagacacgcctctccatattgctgtggtgcagggtaacctgccagctgtgcaccggctggtcaacctcttccagcaggggggccgggagctcgacatctacaacaacctacggcagacaccgctccacctggctgtgatcaccacattaccgtctgtggtccggctcctggtgacagctggtgccagccccatggcgctggaccgccatggccagacggccgctcacctggcgtgcgagcaccgcagcccgacctgcctgcgagccctgctggacagcgcagctccgggcacgttggacctggaggcccgcaattatgacgggctcaccgccctgcacgtggcagtgaacaccgagtgccaagaaaccgtgcagctcttgctagagcgcggtgccgacatcgacgcagtggacattaagagcggccgctccccgctcatccacgccgtggaaaacaacagccttagcatggtgcagctgctgctgcagcacggcgccaacgtgaacgcgcaaatgtactccggcagctccgccctgcactcagcgtccggccgcgggctcctcccgctggtgcgcacgctggtccgcagcggcgctgacagcagcctcaagaactgccacaacgacacgccgctcatggtggcgcgcagccgcagggtcatcgacatcctgagggggaaggccacccggcctgcttccacctcccagccagacccctcccctgaccggagcgccaacacctcccccgagagcagcagccgcctcagctccaatggtcttctctccgcatcaccatcctcctcaccctcccagtctccccccagggacccccctggattccccatggctcctcccaatttcttccttccttccccatctccacccgccttcctgccctttgctggggtcctccgaggccctggccggccggtgcccccctccccagctccaggaggcagctgagggggatgggggggcagatcttggactcatgaggaggggcccccctgccctgtggggtcaacccttctggaaactgtgaagatctcactctgccccccccccccatcttcgggaccaggatttgcacagaagcacatgcacctacccatacaccccctcttctgagcacagatgttcccccatctcgctccctcccaggactctgaccccagcattctcaggcaccagtccctgtccggaatgccacccacatcttccatttccatgtcccctcccagagctggtggacccagggaacagccactcccctccactctctaccagataactgaggaggggagaggtgggccgtaacgggcacggatcacgatgtaaattattaagcattttggttggatttcttttgtaataaactatttttgtaccata

SEQ ID NO: 319899 - DNA, 1365 bp, Artificial Sequence
  derived and/or modified sequence
atgcccagatgccccgccggcgccatggacgagggccccgtggacctgagaaccagacccaaggccgccggcctgcccggcgccgccctgcccctgagaaagagacccctgagagcccccagccccgagcccgccgcccccagaggcgccgccggcctggtggtgcccctggaccccctgagaggcggctgcgacctgcccgccgtgcccggccccccccacggcctggccagacccgaggccctgtactaccccggcgccctgctgcccctgtaccccaccagagccatgggcagccccttccccctggtgaacctgcccacccccctgtaccccatgatgtgccccatggagcaccccctgagcgccgacatcgccatggccaccagagccgacgaggacggcgacacccccctgcacatcgccgtggtgcagggcaacctgcccgccgtgcacagactggtgaacctgttccagcagggcggcagagagctggacatctacaacaacctgagacagacccccctgcacctggccgtgatcaccaccctgcccagcgtggtgagactgctggtgaccgccggcgccagccccatggccctggacagacacggccagaccgccgcccacctggcctgcgagcacagaagccccacctgcctgagagccctgctggacagcgccgcccccggcaccctggacctggaggccagaaactacgacggcctgaccgccctgcacgtggccgtgaacaccgagtgccaggagaccgtgcagctgctgctggagagaggcgccgacatcgacgccgtggacatcaagagcggcagaagccccctgatccacgccgtggagaacaacagcctgagcatggtgcagctgctgctgcagcacggcgccaacgtgaacgcccagatgtacagcggcagcagcgccctgcacagcgccagcggcagaggcctgctgcccctggtgagaaccctggtgagaagcggcgccgacagcagcctgaagaactgccacaacgacacccccctgatggtggccagaagcagaagagtgatcgacatcctgagaggcaaggccaccagacccgccagcaccagccagcccgaccccagccccgacagaagcgccaacaccagccccgagagcagcagcagactgagcagcaacggcctgctgagcgccagccccagcagcagccccagccagagcccccccagagacccccccggcttccccatggccccccccaacttcttcctgcccagccccagcccccccgccttcctgcccttcgccggcgtgctgagaggccccggcagacccgtgccccccagccccgcccccggcggcagctag

SEQ ID NO: 319900 - protein, 356 aa, Artificial Sequence
  derived and/or modified sequence
MEEGRERNRSWPPAECQSLPRVRLFTPTKEETAQRGEVFGQGHPARALLPLYPTRAMGSPFPLVNLPTPLYPMMCPMEHPLSADIAMATRADEDGDTPLHIAVVQGNLPAVHRLVNLFQQGGRELDIYNNLRQTPLHLAVITTLPSVVRLLVTAGASPMALDRHGQTAAHLACEHRSPTCLRALLDSAAPGTLDLEARNYDGLTALHVAVNTECQETVQLLLERGADIDAVDIKSGRSPLIHAVENNSLSMVQLLLQHGANVNAQMYSGSSALHSASGRGLLPLVRTLVRSGADSSLKNCHNDTPLMVARSRRVSRGSCGHAPCTRVSAGWLQASVPERRGVRVSVPLRGGEWVSL

SEQ ID NO: 319901 - DNA, 1071 bp, Artificial Sequence
  derived and/or modified sequence
atggaagaggggagggagcggaaccgcagttggcctcctgccgagtgccagagcctgcccagggtgcgccttttcaccccaacaaaagaggagactgctcaacggggagaggtgtttggacaaggccatccggctagagccctactcccactataccccacccgggccatgggttcacctttcccactagtgaacctgccaacacctctttacccaatgatgtgtccaatggagcaccctctctccgctgatatcgccatggctacccgggcagatgaggacggtgatactcctttacacatcgccgtggtccagggaaatctgccagccgtccacagactggtaaatctgttccaacaggggggaagagagctggacatttacaataatctgaggcaaactcccttacacctcgcagtaattaccaccctgccctctgttgtgcgattgttggtgaccgccggcgcctccccaatggctctcgatagacacgggcagacagcggcgcaccttgcgtgtgaacacaggtccccaacatgtctgcgggcactgctggacagtgccgccccggggactctggatttggaagcccgaaattatgatgggctgaccgccctgcacgtggccgtcaatacagagtgccaggagacagtgcaacttttgcttgagagaggcgccgacatcgatgccgtggacataaagtctgggcgaagccccctaatccatgccgtagagaataatagcttgagtatggtgcaactgctgctgcaacatggcgccaatgtgaatgctcagatgtactctgggtcttcagcgctccatagcgcttccggcaggggcttgctcccactagtgcgtaccctggtgagaagcggggcagactcaagcttgaaaaactgtcataacgacacacccctgatggtggccaggtctcgcagagtgtctcgcggaagctgtggtcacgcgccctgtaccagagtgtccgcgggttggctgcaggctagtgtgcctgagcggagaggtgtgagggtgtctgtcccactccgtgggggcgagtgggtctctctgtag

SEQ ID NO: 319902 - DNA, 1071 bp, Artificial Sequence
  derived and/or modified sequence
atggaggagggccgggagaggaacagatcctggcccccagctgagtgccagagcctgccccgggtgcggctcttcacccccaccaaggaggagacagcccagagaggagaggtgtttggccagggccacccagcccgggccctgctgcccctgtaccccacccgggccatgggcagccccttccccctggtgaacctgcccacccccctgtaccccatgatgtgccccatggagcaccccctgtctgctgacatcgccatggccaccagggcagatgaagatggagacacccccctgcacatcgctgtggtgcagggcaacctgcctgctgtgcaccggctggtgaacctcttccagcagggcggccgggagctggacatctacaacaacctgcggcagacccccctgcacctggccgtcatcaccaccctgcccagcgtggtgcggctgctggtgacagctggggccagccccatggccctggacagacatggccagacagctgcccacctggcctgtgagcacaggagccccacctgcctgcgggccctgctggacagcgctgcccctggcaccctggacctggaggccaggaactatgatggcctgacagccctgcacgtggccgtgaacacagagtgccaggagaccgtgcagctgctgctggagagaggagctgacattgatgctgtggacatcaagagcggccgcagccccctcatccatgctgtggagaacaacagcctgtccatggtgcagctgctgctgcagcacggggccaacgtgaatgcccagatgtacagcggcagcagcgccctgcacagcgccagcggccggggcctgctgcccctggtgaggaccctggtgcgctctggagctgacagcagcctgaagaactgccacaatgacacccccctgatggtggcccggagccggcgggtgtcccggggcagctgtggccacgccccctgcaccagggtgtctgctggctggctgcaggcctctgtgcctgagaggagaggagtgcgggtgtctgtgcccctgcggggcggggagtgggtgtccctgtag

SEQ ID NO: 319903 - DNA, 1071 bp, Artificial Sequence
  derived and/or modified sequence
atggaggagggccgggagcggaaccggagctggccccccgccgagtgccaaagtctcccgcgggtgcggctgttcaccccgacaaaggaggaaactgcgcaaaggggcgaggtgtttggacaagggcaccccgccagggctctccttccactatacccaaccagagcaatgggcagcccctttcccttggtaaacctgccaactcccctttaccctatgatgtgtcccatggagcacccacttagtgctgacatcgcaatggcaactcgcgctgatgaggacggtgataccccacttcatattgccgtggtccagggtaatcttcctgcagtacacagattggtgaacctcttccagcaggggggccgggaattggacatttataacaacctacgccagactccgctgcatctagctgtcatcacgaccctgccaagcgttgtgcgtctgcttgtgacagcaggggccagtcctatggcccttgacagacacgggcagactgctgcacacctagcttgtgagcataggtccccgacatgcctcagggccctgctcgactccgccgcgcccggcactctcgaccttgaagcgcggaactacgatggcttgacagccttacatgttgctgttaacacggaatgccaggagactgtccaactgctacttgagaggggggctgatattgacgccgtggatatcaagagcggccgatctccgctgatccatgccgtggagaacaactctcttagtatggtgcagctgctgctccagcatggcgcaaacgtgaacgcccagatgtacagtggcagctcagcgttgcattccgcaagcggtagagggctgctcccactcgtgagaaccttggtgcgatctggcgcggactccagcttaaagaactgccacaatgacacccctctaatggtggcacggtcccggcgcgtctcacgcgggagttgtggtcatgctccctgtacccgcgtctccgcaggttggctccaggcctccgtgcctgagcggaggggcgtgcgagttagtgtaccgttacgcggcggcgagtgggtatcattatag

SEQ ID NO: 319904 - DNA, 1071 bp, Artificial Sequence
  derived and/or modified sequence
atggaggaaggaagggaaaggaaccgatcctggccgccagccgaatgccagagcctgccgcgagtgagattgtttacaccaaccaaggaggagaccgcccaaaggggtgaagtgttcggccaggggcatcccgctagagctttgctcccgctctatcccaccagggccatggggtcaccattccccctggtgaacctcccaacacccctgtatcctatgatgtgtccaatggagcacccattatccgctgatatagccatggctactcgggcagatgaagacggggacacccccctgcacatcgctgtggtccaagggaacctacctgccgtgcaccgactggtgaatcttttccagcagggaggtcgtgaactggacatctacaacaatcttaggcaaaccccactgcacctggcagtgatcaccacgttaccctccgtggtgcgcttacttgtgacagccggagcttctccaatggcacttgacagacacggtcagacagctgcccacctggcttgcgagcacaggtcacctacatgtttgagggcactgctcgattcagctgccccaggcaccctggatctggaagcccgtaactatgacggcctgaccgctctccacgtggccgtgaacacggagtgccaggagacagtgcagctcctgcttgagagaggtgccgacattgacgccgttgatatcaagagcggacgtagtcctctgattcatgccgtggagaacaacagtttatccatggtccagttactcctgcagcatggcgctaacgtcaacgcacagatgtacagtggaagctccgcactgcattcagcaagtggaagagggctgctaccactggttagaactttggtacgcagcggcgctgacagtagcttgaaaaactgtcacaacgatacccctttaatggttgcgaggtctcggagagtgagcaggggctcttgcggccacgccccatgtaccagagtctctgctggatggctccaggcctctgtccccgaaagaaggggtgtaagggtgtccgtccctctacggggaggcgagtgggtttcactttag

SEQ ID NO: 319905 - DNA, 1714 bp, Artificial Sequence
  derived and/or modified sequence
aaactgctccccgctcctgcagcaccggcctcggtcgcgctgactctggcctggtgtccgtgtctcttgctatctctctttctctcaagatctctgcgcctgtctccatgtctctttctctctgtgcacctaggattttccgagcacccaccccggtgccccgcgggccccggctgggggcagggcccccaacgagtgcagagacacaatcagtggagcgctccccaccctcaccccacccccagcccctttagacccacagctgatgaggcacgtggagtggcagagatggaagaggggagggagaggaatcgttcctggccgcctgccgagtgccagtccctgccccgggtgcgtctcttcactcccactaaggaggaaacggctcagagaggggaagtgtttggccaaggtcacccagcgagagccttactgcctttgtaccccactcgggccatgggctccccgtttcctctggtgaacctgcctacacccctataccccatgatgtgccccatggaacaccccctttctgctgacatcgccatggccacccgtgcagatgaggacggagacacgcctctccatattgctgtggtgcagggtaacctgccagctgtgcaccggctggtcaacctcttccagcaggggggccgggagctcgacatctacaacaacctacggcagacaccgctccacctggctgtgatcaccacattaccgtctgtggtccggctcctggtgacagctggtgccagccccatggcgctggaccgccatggccagacggccgctcacctggcgtgcgagcaccgcagcccgacctgcctgcgagccctgctggacagcgcagctccgggcacgttggacctggaggcccgcaattatgacgggctcaccgccctgcacgtggcagtgaacaccgagtgccaagaaaccgtgcagctcttgctagagcgcggtgccgacatcgacgcagtggacattaagagcggccgctccccgctcatccacgccgtggaaaacaacagccttagcatggtgcagctgctgctgcagcacggcgccaacgtgaacgcgcaaatgtactccggcagctccgccctgcactcagcgtccggccgcgggctcctcccgctggtgcgcacgctggtccgcagcggcgctgacagcagcctcaagaactgccacaacgacacgccgctcatggtggcgcgcagccgcagggtgagccggggcagctgtggacatgccccttgcacacgtgtgtccgcgggctggttgcaggcgagtgtgccagagcgcagaggagtgagggtgtctgtgccgttgcgtggaggggagtgggtgagcctctgaaagcgcgggtgtgagttccagaaatgaggagagactggcaccaagaaaaaaagtgccttgcccatcttttcatactgagaagtggagaggccaccacctggatccagtgagctaggagggatgggagagaggactgtgaggcatgggtggctctatggtcacgcccatcttcctacaggtcatcgacatcctgagggggaaggccacccggcctgcttccacctcccagccagacccctcccctgaccggagcgccaacacctcccccgagagcagcagccgcctcagctccaatggtcttctctccgcatcaccatcctcctcaccctcccagtctccccccagggacccccct

SEQ ID NO: 319906 - DNA, 1071 bp, Artificial Sequence
  derived and/or modified sequence
atggaggagggcagagagagaaacagaagctggccccccgccgagtgccagagcctgcccagagtgagactgttcacccccaccaaggaggagaccgcccagagaggcgaggtgttcggccagggccaccccgccagagccctgctgcccctgtaccccaccagagccatgggcagccccttccccctggtgaacctgcccacccccctgtaccccatgatgtgccccatggagcaccccctgagcgccgacatcgccatggccaccagagccgacgaggacggcgacacccccctgcacatcgccgtggtgcagggcaacctgcccgccgtgcacagactggtgaacctgttccagcagggcggcagagagctggacatctacaacaacctgagacagacccccctgcacctggccgtgatcaccaccctgcccagcgtggtgagactgctggtgaccgccggcgccagccccatggccctggacagacacggccagaccgccgcccacctggcctgcgagcacagaagccccacctgcctgagagccctgctggacagcgccgcccccggcaccctggacctggaggccagaaactacgacggcctgaccgccctgcacgtggccgtgaacaccgagtgccaggagaccgtgcagctgctgctggagagaggcgccgacatcgacgccgtggacatcaagagcggcagaagccccctgatccacgccgtggagaacaacagcctgagcatggtgcagctgctgctgcagcacggcgccaacgtgaacgcccagatgtacagcggcagcagcgccctgcacagcgccagcggcagaggcctgctgcccctggtgagaaccctggtgagaagcggcgccgacagcagcctgaagaactgccacaacgacacccccctgatggtggccagaagcagaagagtgagcagaggcagctgcggccacgccccctgcaccagagtgagcgccggctggctgcaggccagcgtgcccgagagaagaggcgtgagagtgagcgtgcccctgagaggcggcgagtgggtgagcctgtag

SEQ ID NO: 319907 - protein, 676 aa, Artificial Sequence
  derived and/or modified sequence
MKSGPEIVKAGLRSFFESASEDIEKMVENLRLGKVSQARTQVKGVGQNLTYTTVALLPVLTTLFQHIAQHQFGDDVILDDVQVSCYRTLCSIYSLGTTKNTYVEKLRPALGECLARLAAAMPVAFLEPQLNEYNACSVYTTKSPRERAILGLPNSVEEMCPDIPVLERLMADIGGLAESGARYTEMPHVIEITLPMLCSYLPRWWERGPEAPPSALPAGAPPPCTAVTSDHLNSLLGNILRIIVNNLGIDEASWMKRLAVFAQPIVSRARPELLQSHFIPTIGRLRKRAGKVVSEEEQLRLEAKAEAQEGELLVRDEFSVLCRDLYALYPLLIRYVDNNRAQWLTEPNPSAEELFRMVGEIFIYWSKSHNFKREEQNFVVQNEINNMSFLTADNKSKMAKAGDIQSGGSDQERTKKKRRGDRYSVQTSLIVATLKKMLPIGLNMCAPTDQDLITLAKTRYALKDTDEEVREFLHNNLHLQGKVEGSPSLRWQMALYRGVPGREEDADDPEKIVRRVQEVSAVLYYLDQTEHPYKSKKAVWHKLLSKQRRRAVVACFRMTPLYNLPTHRACNMFLESYKAAWILTEDHSFEDRMIDDLSKAGEQEEEEEEVEEKKPDPLHQLVLHFSRTALTEKSKLDEDYLYMAYADIMAKSCHLEEGGENGEAEEEVEVSFEEKQ

SEQ ID NO: 319908 - DNA, 679 bp, Artificial Sequence
  derived and/or modified sequence
tttgtctgtattgtgccggacagggcttgctgtgagaagtgtggctatgcaaatacatactcacaaaagaatatttacatatgatgttatatttaagtgtgtaaacaaatatacctctaagtgtggcttaggggacattttcaagtactctgaatattaatgcagactttctggaagttaaagaaatgggacgtcggtcatcagatactgaagaagaaagcagaagcaagagaaaaaagaaacaccgtagacggtcctcctcgagcagttcttcagatagtagaacatacagccgaaagaaaggaggaaggaaatcaagatcaaagtcaagatcttggtccagagatcttcagcctcgttcacattcttatgatagaagacgcaggcatcgatcaagcagtagctcttcttatggctccagaaggaaacgaagtcgaagtcgttcaaggggtcgagggaaatcctatagagttcagaggtctaggtcaaaaagcagaacaagaaggtccaggtcaagacctcgtctccgttctcatagtcgtagcagtgaaaggtccagtcacagaagaacgcgtagtcggtctcgggatagagaacgacgtaagggcagagataaagagaaaagagaaaaggagaaggataaagggaaggacaaggaattacataacatcaaacgtgg

SEQ ID NO: 319909 - protein, 351 aa, Artificial Sequence
  derived and/or modified sequence
MGHLSAPLHRVRVPWQGLLLTASLLTFWNPPTTAQLTTESMPFNVAEGKEVLLLVHNLPQQLFGYSWYKGERVDGNRQIVGYAIGTQQATPGPANSGRETIYPNASLLIQNVTQNDTGFYTLQVIKSDLVNEEATGQFHVYPELPKPSISSNNSNPVEDKDAVAFTCEPETQDTTYLWWINNQSLPVSPRLQLSNGNRTLTLLSVTRNDTGPYECEIQNPVSANRSDPVTLNVTYGPDTPTISPSDTYYRPGANLSLSCYAASNPPAQYSWLINGTFQQSTQELFIPNITVNNSGSYTCHANNSVTGCNRTTVKTIIVTESPVLGEDEAVPGQHHPQHKPCQEGGCWDVLV

SEQ ID NO: 319910 - DNA, 1500 bp, Artificial Sequence
  derived and/or modified sequence
aagagcggaggtagagggaacgacgcatgcttgagaaatggcgggaaacagaggaggctcgaggcttgctcacacgcacacagccaactgcttctggaccgccttgctcacacgcacacagccaactgcttctggaccgcctgaaaggcaacctcgcccgccgcggtggtgtggggcgggcatcccttgagactgtgctctggaggcctggagaaacagctttctatcctcagcactggggagagcaggcctcaatccctgcctttgcctgccgcccctcttccttccctctcaaagcatacccagcagccccggcgctgagaaacgcgttactctcttatcagctgtgggagagacaagacagactggcctctgggcggaggggccgccattgcctgccctctggaccagggcctcacagataccctcagcttcaggattagggctgcgttggtttttccccccacatcaggggacttcaacaagtaacctccagttccatagataaaacttgtattccccccttctccatggcaggggttttgagcctagagaaggaagatcggagcttcctggggctcctgtgaagcaggcagggggcagcactgggccccgggaagaggcggagaaggcgagggagtgcctgcggtgagcccagagccttgggcccgttatcctctgatgctgctcccccaactttcctgccgtcagtccctgaccttgcctgagaccttggcggctcccgcacctctctcccggctcctccttgctgagaacacaacccgcaaggcccttccgcctggctggactgagtcccctatggaggcagcctggcagggagcaggtatcttcctggcagaagaggacagacctggtaaactgagagactgttgatgccccaatgttctgcctagcctgcctggaaactccagaaggccacaacaactggattctcttttctgatttttgctgcagcttctgctttgtaatcatacggacagttgtgcttgtcagagttaacggtgaagtccacaaaacaaatttccacatcggcagtcaaacctgtgggtcattggagtggtcctgagctggagaagcaaaagaagagttagcgatccatggaaatgcaaagctgacttcagggtcctgtgtcattccttgtgacactgagtagagtgagggtcctgttgccattggacagctgcagcctgggactgaccgggaggctctgattgtttatccaccacagaccaggatctcccctctgggctgcagatgcctaagaagaaaggaactgaaccaactctggtattggggtccacagatgccaaataaggcccctggagtagaggagaggttaagactgtggctgaagacaaatctcctgtaactgatcttccagttacggtctgtgtgaccttgatatagtgactgtatttattgccatgtggctcagtttcccctcagtgaaatagtataaatggttaatggttttggctt

SEQ ID NO: 319911 - DNA, 1056 bp, Artificial Sequence
  derived and/or modified sequence
atgggtcatctgtcggcacctctccacagggttcgtgtgccttggcagggcctgctcctcacggcatcactactgacattctggaatccacccactacagctcaactgaccacagagtccatgcctttcaatgtggcggaaggcaaggaggtactcctcttagtccacaatcttccacagcaattatttgggtacagctggtacaagggggaaagagtggatggaaatcggcagatagtgggatatgccatcggaactcagcaggctacgcctggtccagcgaattccggtcgtgaaacgatataccccaacgcttctctcctgatccagaacgtcactcagaacgataccggattctataccttgcaggttatcaagtctgatttggtaaacgaggaggctacaggccagtttcacgtgtaccccgaattgccaaaaccatccataagtagcaataattccaaccctgtcgaggacaaggacgccgtggcctttacttgcgaacccgaaactcaggacaccacctatttatggtggatcaataatcagagtctgcccgtcagcccgcggctgcagttgtcaaatggtaatcggaccctcactctgctgtctgtgaccagaaatgacaccggaccttatgaatgcgaaatccagaacccagtatccgcgaacagaagcgatcctgtcactcttaacgtcacctacggtcccgacacccccacaattagcccttcagatacatactatcgaccaggcgctaacctttccctgagttgttacgcagcttctaacccgccagcccagtactcctggttaattaacggcacatttcagcagtctactcaggaactctttatcccaaatatcaccgtgaataatagtggctcctatacttgccacgccaacaattctgtgacgggctgtaacaggacaacagtaaagacgatcatcgtcaccgagtcacctgttttgggagaggatgaggccgtgcccggacagcatcatccacagcacaagccatgccaggaaggcgggtgctgggacgtgctcgtttag

SEQ ID NO: 319912 - DNA, 759 bp, Artificial Sequence
  derived and/or modified sequence
atgggacacctgagcgcaccattacacagagtaagggtaccctggcagggtttgctgcttaccgcctctctcctcaccttctggaatccgcccaccacagcccagctgacaaccgaatcgatgcctttcaatgtcgccgaaggcaaggaagtgttgctcctggtgcacaacttgccacagcagttgtttggatactcctggtacaagggagagagagtggatgggaaccgacagatcgttggctatgcaattggaacacagcaggccacccccggtccagcaaactcagggcgtgaaacaatctatccgaacgcatcactcctgattcagaatgtcacgcaaaatgatacaggtttttatacactccaggtaatcaagtcagacctggtgaatgaggaagcgaccgggcagtttcacgtgtaccacaacgcactgccccaggagaacgggctgtctcccggcgctatagcaggcattgtgattggtgtcgtcgctttggtggccttgattgccgtggctctggcttgtttcctgcacttcggcaagactgggagggcatctgaccaacgggaccttacagaacacaagccaagcgtttctaatcacacccaggatcactccaatgaccctccaaacaaaatgaatgaggtgacttattccaccttaaattttgaggcgcaacagcccacccagccaactagtgcgagcccctctcttactgctaccgagatcatctattccgaggtcaaaaagcagtag

SEQ ID NO: 319913 - DNA, 966 bp, Artificial Sequence
  derived and/or modified sequence
atgggccacctgagcgccccactgcaccgcgtaagagttccctggcaggggttgttactgaccgcgtcactcctgaccttctggaacccacccacaaccgctcagctgacgaccgagagcatgccattcaacgtagccgaggggaaggaggtccttctactcgtacacaaccttcctcagcagctgtttgggtactcttggtacaaaggcgaaagagttgacgggaacaggcagattgtgggctatgcgattggaactcaacaagccaccccagggccagccaactctggacgggagaccatctatcctaacgcgtccttattgatccagaatgtcactcagaacgacaccggattttacacgctgcaggtcataaaaagtgatctggtaaacgaggaggcaactggacagtttcatgtgtaccccgagcttcccaaaccctcgatttctagcaataattcgaacccagtggaagacaaggatgccgtggcgttcacgtgtgagcctgagacacaggataccacatacctgtggtggataaacaatcagagcctgcccgtgagtcctaggctacaattgtccaacggtaaccgaaccctaacgctgctaagcgtgacgcggaatgatacaggcccctatgaatgcgagatccagaacccagtgtccgctaatcggtccgaccctgtgacgctgaacgtgacatatggaccagacaccccaactatatccccatcagacacttactatcgtcctggagccaacctcagcctgtcttgctatgctgcctccaaccccccagctcaatacagttggttgatcaacggcacattccagcagtctacccaggagctcttcatcccaaatatcaccgtgaacaatagcggtagctacacatgccacgcaaacaactcagtgacaggttgtaaccggaccaccgtcaaaacaattatcgttactgggaagtag

SEQ ID NO: 319914 - DNA, 1056 bp, Artificial Sequence
  derived and/or modified sequence
atgggccacctgagcgcccccctgcaccgggtgcgggtgccctggcagggcctgctgctgacagccagcctgctgaccttctggaacccccccaccacagcccagctgaccacagagagcatgcccttcaacgtggccgagggcaaggaggtgctgctgctggtgcacaacctgccccagcagctgtttggctacagctggtacaagggggagcgggtggatggcaaccggcagatcgtgggctacgccatcggcacccagcaggccaccccaggccctgccaacagcggccgggagaccatctacccaaatgccagcctgctgatccagaatgtgacccagaatgacaccggcttctacaccctgcaggtgatcaagagtgacctggtgaatgaggaggccaccggccagttccacgtgtacccagagctgcccaagcccagcatcagcagcaacaacagcaaccctgtggaggacaaggatgctgtggccttcacctgtgagcctgagacccaggacaccacctacctgtggtggatcaacaaccagagcctgcctgtgagcccccggctgcagctgagcaatggaaacagaaccctgaccctgctgtctgtgaccagaaatgacaccggcccctatgaatgtgagatccagaaccctgtgtctgccaacagaagtgaccctgtgaccctgaatgtgacctacggccctgacacccccaccatcagccccagcgacacctactacagacctggggccaacctgagcctgagctgctatgctgccagcaaccccccagcccagtacagctggctgatcaatggcaccttccagcagagcacccaggagctgttcatccccaacatcaccgtgaacaacagcggcagctacacctgccacgccaacaacagcgtgacaggctgcaacagaaccaccgtgaagaccatcatcgtgacagagagccctgtgctgggggaggatgaagctgtgcccggccagcaccacccccagcacaagccctgccaggagggcggctgctgggatgtgctggtgtag

SEQ ID NO: 319915 - DNA, 759 bp, Artificial Sequence
  derived and/or modified sequence
atgggccacctgagcgcccccctgcaccgggtgcgggtgccctggcagggcctgctgctgacagccagcctgctgaccttctggaacccccccaccacagcccagctgaccacagagagcatgcccttcaacgtggccgagggcaaggaggtgctgctgctggtgcacaacctgccccagcagctgtttggctacagctggtacaagggggagcgggtggatggcaaccggcagatcgtgggctacgccatcggcacccagcaggccaccccaggccctgccaacagcggccgggagaccatctacccaaatgccagcctgctgatccagaatgtgacccagaatgacaccggcttctacaccctgcaggtgatcaagagtgacctggtgaatgaggaggccaccggccagttccacgtgtaccacaatgccctgccccaggagaatggcctgagccctggggccatcgccggcatcgtgattggagtggtggccctggtggccctgattgctgtggccctggcctgcttcctgcactttgggaagacaggccgggccagtgaccagagggacctgacagagcacaagcccagcgtgagcaaccacacccaggaccacagcaatgacccccccaacaagatgaatgaggtgacctacagcaccctgaactttgaggcccagcagcccacccagcccaccagcgccagccccagcctgacagccacagagatcatctacagcgaggtgaagaagcagtag

SEQ ID NO: 319916 - DNA, 966 bp, Artificial Sequence
  derived and/or modified sequence
atgggccacctgagcgcccccctgcaccgggtgcgggtgccctggcagggcctgctgctgacagccagcctgctgaccttctggaacccccccaccacagcccagctgaccacagagagcatgcccttcaacgtggccgagggcaaggaggtgctgctgctggtgcacaacctgccccagcagctgtttggctacagctggtacaagggggagcgggtggatggcaaccggcagatcgtgggctacgccatcggcacccagcaggccaccccaggccctgccaacagcggccgggagaccatctacccaaatgccagcctgctgatccagaatgtgacccagaatgacaccggcttctacaccctgcaggtgatcaagagtgacctggtgaatgaggaggccaccggccagttccacgtgtacccagagctgcccaagcccagcatcagcagcaacaacagcaaccctgtggaggacaaggatgctgtggccttcacctgtgagcctgagacccaggacaccacctacctgtggtggatcaacaaccagagcctgcctgtgagcccccggctgcagctgagcaatggaaacagaaccctgaccctgctgtctgtgaccagaaatgacaccggcccctatgaatgtgagatccagaaccctgtgtctgccaacagaagtgaccctgtgaccctgaatgtgacctacggccctgacacccccaccatcagccccagcgacacctactacagacctggggccaacctgagcctgagctgctatgctgccagcaaccccccagcccagtacagctggctgatcaatggcaccttccagcagagcacccaggagctgttcatccccaacatcaccgtgaacaacagcggcagctacacctgccacgccaacaacagcgtgacaggctgcaacagaaccaccgtgaagaccatcatcgtgacaggcaagtag

SEQ ID NO: 319917 - DNA, 1056 bp, Artificial Sequence
  derived and/or modified sequence
atgggccacctgagcgcccccctgcaccgggtgcgggtgccctggcagggactgttgctgaccgcatcactcttgactttttggaatccaccaaccactgcccagctgaccactgagtcgatgcctttcaatgtcgctgaggggaaggaggtccttctgctggtgcacaacttacctcagcaacttttcggctacagctggtataagggagagagggtcgatggcaaccgccagatcgtaggatacgctatcgggacacaacaggccacaccgggtcccgctaactctggacgcgaaactatttacccaaacgcttctctcctcatccagaatgtaactcaaaacgacaccgggttttataccctccaggtaattaagtcggatctcgtaaacgaggaggctaccggacagttccatgtttacccagaactcccaaaaccctccatttcttcaaacaactctaatcccgttgaggataaagacgccgtggcatttacttgtgagccggaaactcaagacactacgtacctgtggtggatcaacaaccaatccctcccagtctcgccaaggttacagctttctaatggaaataggacactcaccctgctgtccgttacaagaaatgataccgggccttatgaatgtgagatacagaaccccgtcagcgccaacaggtcagacccagtgacgttgaacgtcacctatggaccagatacaccaaccattagccccagtgatacttactacaggcccggtgcaaacctgtctttgagttgttacgctgccagcaatccacccgctcagtacagctggttaatcaatggaaccttccagcagtccacccaggagttatttatccctaacattacagtaaataattctgggtcatacacctgccacgccaataatagtgtgaccggatgcaaccggacaacagtcaagaccattattgtcacggagagccctgtgctgggcgaagatgaggccgtcccgggtcagcaccacccccagcacaagccatgtcaggaaggcgggtgttgggacgtgctagtgtag

SEQ ID NO: 319918 - DNA, 759 bp, Artificial Sequence
  derived and/or modified sequence
atgggccacctgagcgcccccctgcaccgggtgcgggtgccctggcagggattgcttctgacggccagtcttctgacattctggaaccctcccactacagcacaactgaccacagagtctatgcctttcaacgtcgctgaaggaaaagaagtgctgttactcgtccataacctgccacagcagctgtttgggtactcttggtacaagggggagagagttgacggcaatagacagattgtgggttatgctatcggcacgcagcaggcgacacccggacccgctaactcaggccgcgagacaatttaccctaacgccagcctgctcatccagaatgtcacccaaaatgataccggcttctacaccctccaggtaattaagtctgacttagtgaacgaggaagcaaccggacaattccatgtctaccataacgccttgcctcaagagaacggcttaagccctggcgctatagccggaatcgtgattggggtggttgcactggtggcccttatagccgtggcactggcttgctttcttcactttgggaagacggggagagcaagcgaccaaagagatctgacagagcataagccatccgtctcaaatcacacacaggaccactccaacgacccccctaacaagatgaatgaagttacatacagcaccctcaacttcgaggcacagcagccaacccagccaacgtcagcttcaccatccttgacagcaactgaaatcatatacagcgaggttaagaaacaatag

SEQ ID NO: 319919 - DNA, 966 bp, Artificial Sequence
  derived and/or modified sequence
atgggccacctgagcgcccccctgcaccgggtgcgggtgccctggcaaggcttgctccttacagccagcctcctcaccttctggaacccccctacgaccgcccagctcacaaccgaatccatgccgttcaatgtcgcagaaggcaaggaagtattgctcctggtgcacaacttgccccaacaattgtttggatactcatggtacaagggcgagcgggtggacgggaatcggcagatcgttggatatgccatcggaacacagcaagccacgccaggcccagctaattctggaagagagaccatttaccctaacgcctccctcttgatacagaacgtgacccaaaacgacactggattttataccttgcaggttattaagtctgacctggtcaatgaagaggctacgggacagttccacgtttacccggagttgcctaaaccatccatcagctctaataattccaatcccgttgaggacaaggatgccgtagcattcacttgcgaaccagagacacaggataccacatacctctggtggatcaacaaccagagtctgccagtttcaccgcgtttgcagctgagcaacggaaataggacgctaacacttttgagcgtaactaggaatgatacaggtccctatgagtgcgagatccagaatccagtatccgctaatcgcagcgatccggttacattgaatgtgacctatggaccagataccccaacgatctcaccctcagacacatactaccgccccggggccaatctctcactctcttgttatgccgcttccaatcccccggcgcaatatagctggcttattaacggcacgtttcagcaaagtacgcaggagctgtttattcccaacatcacggtgaataactccggcagttacacttgtcatgcaaataactccgtgaccgggtgtaaccgcacaaccgtgaaaacaatcattgtgaccggcaaatag

SEQ ID NO: 319920 - DNA, 1056 bp, Artificial Sequence
  derived and/or modified sequence
atgggccacttgtctgcgccactgcacagggttagggtcccttggcagggtctcctactcaccgctagccttttaaccttttggaacccacctactaccgcgcagctgacgacagagtctatgccatttaatgtcgctgagggcaaggaggtgctcctactcgtacataatctgccccagcagcttttcggctactcctggtataagggggaaagagttgatggcaatcggcagatcgtcggttatgctattggtacccagcaggcaacccctgggcctgccaatagtggtcgcgaaaccatttaccctaatgcaagcctgctaatccagaatgtgacccagaacgataccggattctacactttacaggtcatcaagagtgatctggtgaacgaagaagctacaggccaattccacgtctaccctgagctgcccaaaccaagtatctcctctaataacagcaacccggtggaggacaaggacgcagtggccttcacatgtgaacctgaaacacaagacaccacatacctgtggtggataaataaccagagcttgcccgtgagcccgcgacttcagctgagcaacggcaacaggactctaacacttctgagcgtcactcgcaatgatacagggccttatgagtgcgaaattcagaatcccgtgtccgcaaacagatctgatcccgtgacgctcaacgtcacgtacgggcctgacactccaacgataagcccaagcgacacatattaccggcctggcgctaacttgtcactgtcctgttatgcggcttcgaatcctcccgctcagtactcgtggttgataaatgggaccttccaacaatctacccaggagctcttcatccccaacatcactgtgaataactctggctcatacacttgccatgcaaataatagcgtaactggctgtaatcgcactaccgttaaaaccattatcgtcaccgagagtccagtgctaggcgaggatgaggccgttcccggacagcaccacccccaacacaagccttgccaagagggagggtgctgggatgttttggtttag

SEQ ID NO: 319921 - DNA, 759 bp, Artificial Sequence
  derived and/or modified sequence
atggggcacctctctgctccactccatagagtgcgcgtgccatggcagggcctgcttttaactgcatccctgctgaccttttggaacccacccacaacagcccaactgacaactgagagtatgcctttcaacgtcgccgagggaaaagaggtgttactattagtgcacaatttgcctcagcagctattcggctacagctggtataagggggagagggtggatggaaatcggcagatcgtaggctacgccatcggtactcagcaggccactcctgggcctgcgaattcaggtagggaaactatctaccctaacgcctcactcctcatccaaaacgtgacacaaaatgacacaggcttttacactctgcaggtaattaaaagcgatctcgtcaacgaggaagccaccggacagttccacgtgtatcacaacgcactccctcaggaaaatggcttgagcccgggtgccatcgcaggaatagtgatcggagtggttgccctggtggcactcatagcagtcgctttagcctgtttccttcatttcgggaagaccgggagagcctctgaccaacgagatctgacagagcacaagccatcagtgtctaatcacacgcaggaccacagcaatgatccacccaacaagatgaatgaagttacctactccacccttaacttcgaagcccaacagccaacgcaaccaacttcagcctcacctagtttgacagccaccgagatcatctattctgaggttaagaagcaatag

SEQ ID NO: 319922 - DNA, 966 bp, Artificial Sequence
  derived and/or modified sequence
atggggcatctgtccgctcctcttcacagagtccgggtgccttggcaaggtcttctgcttacagcttccctgctgaccttttggaatcctcccaccacagctcaactaactacagagtctatgcctttcaatgtggcggaaggcaaagaagtccttctgctcgttcataacctaccccagcagctgttcggatattcttggtacaaaggagaaagagtggatggtaacaggcagatagtaggttacgctattggaactcagcaggccacccctggacccgcaaatagcggaagagaaacaatttacccaaatgcgagtcttctgatccaaaacgtgacccaaaatgatactggtttttatacgctgcaagttattaaaagtgatcttgtgaatgaggaagccaccgggcaatttcatgtctaccccgaattgccaaagccttccatctccagtaataactcaaatcctgtggaggataaggatgccgttgcatttacatgtgaacccgagactcaggacaccacctacctgtggtggataaacaaccagagtctgcccgtgagcccacgtctccagctctccaacggaaatcgaacgctgacattattgagcgtgacccggaacgacactggcccttacgagtgtgagattcagaaccctgtaagcgccaatcgatccgatccagtgaccctgaacgtaacctatggacccgacactcctaccatttccccttccgacacctactacagacctggagcgaatctctcgctcagttgttacgctgccagtaaccctcctgctcagtatagctggctgatcaacgggacttttcagcagtcgactcaagagctctttattcctaacatcactgttaacaattccggcagctatacctgccacgccaacaacagtgtgactgggtgtaacagaactaccgtaaaaacaattatagttaccggcaaatag

SEQ ID NO: 319923 - DNA, 1619 bp, Artificial Sequence
  derived and/or modified sequence
gagcagccgtgctcgaagcgttcctggagcccaagctctcctccacaggtgaagacagggccagcaggagacaccatggggcacctctcagccccacttcacagagtgcgtgtaccctggcaggggcttctgctcacagcctcacttctaaccttctggaacccgcccaccactgcccagctcactactgaatccatgccattcaatgttgcagaggggaaggaggttcttctccttgtccacaatctgccccagcaactttttggctacagctggtacaaaggggaaagagtggatggcaaccgtcaaattgtaggatatgcaataggaactcaacaagctaccccagggcccgcaaacagcggtcgagagacaatataccccaatgcatccctgctgatccagaacgtcacccagaatgacacaggattctacaccctacaagtcataaagtcagatcttgtgaatgaagaagcaactggacagttccatgtatacccggagctgcccaagccctccatctccagcaacaactccaaccctgtggaggacaaggatgctgtggccttcacctgtgaacctgagactcaggacacaacctacctgtggtggataaacaatcagagcctcccggtcagtcccaggctgcagctgtccaatggcaacaggaccctcactctactcagtgtcacaaggaatgacacaggaccctatgagtgtgaaatacagaacccagtgagtgcgaaccgcagtgacccagtcaccttgaatgtcacctatggcccggacacccccaccatttccccttcagacacctattaccgtccaggggcaaacctcagcctctcctgctatgcagcctctaacccacctgcacagtactcctggcttatcaatggaacattccagcaaagcacacaagagctctttatccctaacatcactgtgaataatagtggatcctatacctgccacgccaataactcagtcactggctgcaacaggaccacagtcaagacgatcatagtcactgagtctcccgtcctcggagaggatgaagctgtcccagggcaacaccaccctcagcataaaccctgtcaagagggaggatgctgggacgtattggtgtgaggtcttcaacccaatcagtaagaaccaaagcgaccccatcatgctgaacgtaaactgtaagtgactcctcaccccttcctatatgtccctctaggattactctgtcaatggtgtgcaaaatggataaaactcacaggaggcagaatatcaatgaagagaccattatagcaaacagaattgcaaagtggttaagagctcagctcaggccgggcacagtggctcacgcctgtaatcccagcagtttgggaggccaaggcgggcggatcacgagggcaggagatcgagaccatcctggctaatatggtgaaaccccgtgtctactaaaaatacaaaaaaaaattagccgggcatggtggcgggcgcctgtagtcccagctactcgggaggctgaggcgggagaatggcgtgaacctgggaggcggagctttcagtgagccgagatggtgccactgcactccagtctaggcaacagagcaagactctgtctc

SEQ ID NO: 319924 - DNA, 2675 bp, Artificial Sequence
  derived and/or modified sequence
aggctcagcacagagagtggaaaacagcagaggtgacagagcagccgtgctcgaagcgttcctggagcccaagctctcctccacaggtgaagacagggccagcaggagacaccatggggcacctctcagccccacttcacagagtgcgtgtaccctggcaggggcttctgctcacagcctcacttctaaccttctggaacccgcccaccactgcccagctcactactgaatccatgccattcaatgttgcagaggggaaggaggttcttctccttgtccacaatctgccccagcaactttttggctacagctggtacaaaggggaaagagtggatggcaaccgtcaaattgtaggatatgcaataggaactcaacaagctaccccagggcccgcaaacagcggtcgagagacaatataccccaatgcatccctgctgatccagaacgtcacccagaatgacacaggattctacaccctacaagtcataaagtcagatcttgtgaatgaagaagcaactggacagttccatgtataccataatgctctaccacaagaaaatggcctctcacctggggccattgctggcattgtgattggagtagtggccctggttgctctgatagcagtagccctggcatgttttctgcatttcgggaagaccggcagggcaagcgaccagcgtgatctcacagagcacaaaccctcagtctccaaccacactcaggaccactccaatgacccacctaacaagatgaatgaagttacttattctaccctgaactttgaagcccagcaacccacacaaccaacttcagcctccccatccctaacagccacagaaataatttattcagaagtaaaaaagcagtaatgaaacctgtcctgctcactgcagtgctgatgtatttcaagtctctcaccctcatcactaggagattcctttcccctgtaggggtagaggggtggggacagaaacaactttctcctactcttccttcctaataggcatctccaggctgcctggtcactgcccctctctcagtgtcaatagatgaaagtacattgggagtctgtaggaaacccaaccttcttgtcattgaaatttggcaaagctgactttgggaaagagggaccagaacttcccctcccttccccttttcccaacctggacttgttttaaacttgcctgttcagagcactcattccttcccacccccagtcctgtcctatcactctaattcggatttgccatagccttgaggttatgtccttttccattaagtacatgtgccaggaaacaagagagagagaaagtaaaggcagtaatgccttctcctatttctccaaagccttgtgtgaactcaccaaacacaagaaaatcaaatatataaccaatagtgaaatgccacacctttgtccactgtcagggttgtctacctgtaggatcagggtctaagcaccttggtgcttagctagaataccacctaatccttctggcaagcctgtcttcagagaacccactagaagcaactaggaaaatcacttgccaaaatccaaggcaattcctgatggaaaatgcaaaagcacatatatgttttaatatctttatgggctctgttcaaggcagtgctgagagggaggggttatagcttcaggagggaaccagcttctgataaacacaatctgctaggaacttgggaaaggaatcagagagctgcccttcagcgattatttaaattattgttaaagaatacacaatttggggtattgggatttttctccttttctctgagacattccaccattttaatttttgtaactgcttatttatgtgaaaagggttatttttacttagcttagctatgtcagccaatccgattgccttaggtgaaagaaaccaccgaaatccctcaggtcccttggtcaggagcctctcaagattttttttgtcagaggctccaaatagaaaataagaaaaggttttcttcattcatggctagagctagatttaactcagtttctaggcacctcagaccaatcatcaactaccattctattccatgtttgcacctgtgcattttctgtttgcccccattcactttgtcaggaaaccttggcctctgctaaggtgtatttggtccttgagaagtgggagcaccctacagggacactatcactcatgctggtggcattgtttacagctagaaagctgcactggtgctaatgccccttggggaaatggggctgtgaggaggaggattataacttaggcctagcctcttttaacagcctctgaaatttatcttttcttctatggggtctataaatgtatcttataataaaaaggaaggacaggaggaagacaggcaaatgtacttctcacccagtcttctacacagatggaatctctttggggctaagagaaaggttttattctatattgcttacctgatctcatgttaggcctaagaggctttctccaggaggattagcttggagttctctatactcaggtacctctttcagggttttctaaccctgacacggactgtgcatactttccctcatccatgctgtgctgtgttatttaatttttcctggctaagatcatgtctgaattatgtatgaaaattattctatgtttttataataaaaataatatatcagacatcga

SEQ ID NO: 319925 - DNA, 1778 bp, Artificial Sequence
  derived and/or modified sequence
ggaaaacagcagaggtgacagagcagccgtgctcgaagcgttcctggagcccaagctctcctccacaggtgaagacagggccagcaggagacaccatggggcacctctcagccccacttcacagagtgcgtgtaccctggcaggggcttctgctcacagcctcacttctaaccttctggaacccgcccaccactgcccagctcactactgaatccatgccattcaatgttgcagaggggaaggaggttcttctccttgtccacaatctgccccagcaactttttggctacagctggtacaaaggggaaagagtggatggcaaccgtcaaattgtaggatatgcaataggaactcaacaagctaccccagggcccgcaaacagcggtcgagagacaatataccccaatgcatccctgctgatccagaacgtcacccagaatgacacaggattctacaccctacaagtcataaagtcagatcttgtgaatgaagaagcaactggacagttccatgtatacccggagctgcccaagccctccatctccagcaacaactccaaccctgtggaggacaaggatgctgtggccttcacctgtgaacctgagactcaggacacaacctacctgtggtggataaacaatcagagcctcccggtcagtcccaggctgcagctgtccaatggcaacaggaccctcactctactcagtgtcacaaggaatgacacaggaccctatgagtgtgaaatacagaacccagtgagtgcgaaccgcagtgacccagtcaccttgaatgtcacctatggcccggacacccccaccatttccccttcagacacctattaccgtccaggggcaaacctcagcctctcctgctatgcagcctctaacccacctgcacagtactcctggcttatcaatggaacattccagcaaagcacacaagagctctttatccctaacatcactgtgaataatagtggatcctatacctgccacgccaataactcagtcactggctgcaacaggaccacagtcaagacgatcatagtcactggtaagtaattcctggagcatcaacactaagatctggggtacaagctttctggttttcaaataggagcagagaagaaattttcttttgcagcctgtatccaacaggcacaaacaagtccaaattctcccctgaaccctctcaattcatctgtgcagactctcttccctttgtttttctgatttctcacagctgaccttaggtccagcctggaatgtggggagggggttctctcagccccagaaagccccgtgtagcaggaggggcttcacagagggggaagcagaaagggtcctcaaggtcaatttgcttctgtcactaacatgtccctttctgtaacttcttggccttcttttacctattccatgagatataaggaatatgtgaggttttaaaacagactcacaatagttttccctaaatgagagaaggaaatgcccttcatcagggatgagcagctcagactctgctccctgctctactcccggcttgcccggtgattggctctgccctgatcccatgtggggtaggacgcaggtgtgtgcagaaggtgtccaggtggcctgtcatgaatccagctaaatcaagatggcagtcaatggctgggcgctgtggttcatgcctgtgatcccagtactttggaaggccgaggtgagaggatcacctgaggtcaggagttcgagaccagcctgaccaacatggcaaaactccatctctactaaaaatac

SEQ ID NO: 319926 - DNA, 1056 bp, Artificial Sequence
  derived and/or modified sequence
atgggccacctgagcgcccccctgcacagagtgagagtgccctggcagggcctgctgctgaccgccagcctgctgaccttctggaacccccccaccaccgcccagctgaccaccgagagcatgcccttcaacgtggccgagggcaaggaggtgctgctgctggtgcacaacctgccccagcagctgttcggctacagctggtacaagggcgagagagtggacggcaacagacagatcgtgggctacgccatcggcacccagcaggccacccccggccccgccaacagcggcagagagaccatctaccccaacgccagcctgctgatccagaacgtgacccagaacgacaccggcttctacaccctgcaggtgatcaagagcgacctggtgaacgaggaggccaccggccagttccacgtgtaccccgagctgcccaagcccagcatcagcagcaacaacagcaaccccgtggaggacaaggacgccgtggccttcacctgcgagcccgagacccaggacaccacctacctgtggtggatcaacaaccagagcctgcccgtgagccccagactgcagctgagcaacggcaacagaaccctgaccctgctgagcgtgaccagaaacgacaccggcccctacgagtgcgagatccagaaccccgtgagcgccaacagaagcgaccccgtgaccctgaacgtgacctacggccccgacacccccaccatcagccccagcgacacctactacagacccggcgccaacctgagcctgagctgctacgccgccagcaacccccccgcccagtacagctggctgatcaacggcaccttccagcagagcacccaggagctgttcatccccaacatcaccgtgaacaacagcggcagctacacctgccacgccaacaacagcgtgaccggctgcaacagaaccaccgtgaagaccatcatcgtgaccgagagccccgtgctgggcgaggacgaggccgtgcccggccagcaccacccccagcacaagccctgccaggagggcggctgctgggacgtgctggtgtag

SEQ ID NO: 319927 - DNA, 759 bp, Artificial Sequence
  derived and/or modified sequence
atgggccacctgagcgcccccctgcacagagtgagagtgccctggcagggcctgctgctgaccgccagcctgctgaccttctggaacccccccaccaccgcccagctgaccaccgagagcatgcccttcaacgtggccgagggcaaggaggtgctgctgctggtgcacaacctgccccagcagctgttcggctacagctggtacaagggcgagagagtggacggcaacagacagatcgtgggctacgccatcggcacccagcaggccacccccggccccgccaacagcggcagagagaccatctaccccaacgccagcctgctgatccagaacgtgacccagaacgacaccggcttctacaccctgcaggtgatcaagagcgacctggtgaacgaggaggccaccggccagttccacgtgtaccacaacgccctgccccaggagaacggcctgagccccggcgccatcgccggcatcgtgatcggcgtggtggccctggtggccctgatcgccgtggccctggcctgcttcctgcacttcggcaagaccggcagagccagcgaccagagagacctgaccgagcacaagcccagcgtgagcaaccacacccaggaccacagcaacgacccccccaacaagatgaacgaggtgacctacagcaccctgaacttcgaggcccagcagcccacccagcccaccagcgccagccccagcctgaccgccaccgagatcatctacagcgaggtgaagaagcagtag

SEQ ID NO: 319928 - DNA, 966 bp, Artificial Sequence
  derived and/or modified sequence
atgggccacctgagcgcccccctgcacagagtgagagtgccctggcagggcctgctgctgaccgccagcctgctgaccttctggaacccccccaccaccgcccagctgaccaccgagagcatgcccttcaacgtggccgagggcaaggaggtgctgctgctggtgcacaacctgccccagcagctgttcggctacagctggtacaagggcgagagagtggacggcaacagacagatcgtgggctacgccatcggcacccagcaggccacccccggccccgccaacagcggcagagagaccatctaccccaacgccagcctgctgatccagaacgtgacccagaacgacaccggcttctacaccctgcaggtgatcaagagcgacctggtgaacgaggaggccaccggccagttccacgtgtaccccgagctgcccaagcccagcatcagcagcaacaacagcaaccccgtggaggacaaggacgccgtggccttcacctgcgagcccgagacccaggacaccacctacctgtggtggatcaacaaccagagcctgcccgtgagccccagactgcagctgagcaacggcaacagaaccctgaccctgctgagcgtgaccagaaacgacaccggcccctacgagtgcgagatccagaaccccgtgagcgccaacagaagcgaccccgtgaccctgaacgtgacctacggccccgacacccccaccatcagccccagcgacacctactacagacccggcgccaacctgagcctgagctgctacgccgccagcaacccccccgcccagtacagctggctgatcaacggcaccttccagcagagcacccaggagctgttcatccccaacatcaccgtgaacaacagcggcagctacacctgccacgccaacaacagcgtgaccggctgcaacagaaccaccgtgaagaccatcatcgtgaccggcaagtag

SEQ ID NO: 319929 - DNA, 975 bp, Artificial Sequence
  derived and/or modified sequence
aagaacagcgtgctggtgaagcccaagaagggccacagcggcaagaagcccctgaagtgcaacgactgcggcaagaccttcagcagaagcttcagcctgaagctgcaccagaacatccacaccggcgagaagcccttcgagtgcagcaactgcagaaaggccttcagacagatcagcagcatcctgctgcaccagagaatccacagcggcaagaagagccacgagtgcaacaagtgcggcgagagcttcaaccagagaaccaccctgatcctgcacatgagaatccacgacggcaagaaccccttcaagtgcagaaagtgcggcaagctgttcaacagaatcagccccctgatgctgcaccagagaatccacaccagcgagaagccctacaagtgcgaggagtgcggcaagatgttcagcggcaccgccaacctgaagatccaccagaacatccacagcgaggagaagcccttcaagtgcaacaagtgcagcaaggtgttcggcagacagagcttcctgatcgagcaccagagaatccacaccggcgagaagccctaccagtgcgaggagtgcggcaaggccttcagccacagaatcagcctgaccagacacaagagaatccacaccgaggacagaccctacgagtgcgaccagtgcggcaaggccttcagccagagcgcccacctggcccagcacgagagaatccacaccggcgagaagccctacacctgcaagacctgcggcaaggccttcagccagagaaccagcctgatcctgcacgagagaagccacaccggcgagaagccctacgagtgcaacgagtgcggcaaggccttcagcagcggcagcgacctgatcagacaccagagaagccacagcagcgagaagccctacgagtgcagcaagtgcggcaaggcctacagcagaagcagcagcctgatcagacaccagaacacccacagcgaggagaagtag

SEQ ID NO: 319930 - DNA, 1179 bp, Artificial Sequence
  derived and/or modified sequence
atgagaatccacgacggcaaggagatcctggactgcggcaaggccctgagccagtgccagagcttcaacatccaccagaagatccacgtggtgggcaacgtgtgccagtgcagaaagtgcggcaaggccttcaaccagatgagcagcctgctgctgcacaagaagatccacaacggcaagaagacccacaagtacaacaagtgcggcagaggcttcaagaagaagagcgtgttcgtggtgcacaagagaatccacgccggcgagaagatccccgagaacgccaaggccctgagccagagcctgcagcagagaagccaccacctggagaaccccttcaagtgcagaaagtgcggcaagctgttcaacagaatcagccccctgatgctgcaccagagaatccacaccagcgagaagccctacaagtgcgacaagtgcgacaagttcttcagaagactgagcaccctgatcctgcacctgagaatccacaacggcgagaagctgtacagatgcaacaagtgcgagaaggtgtgcaacagacacagcagcctgatccagcaccagaaggtgcacaccaagaagaagaagctgttcgagtgcaaggagtgcggcaagatgttcagcggcaccgccaacctgaagatccaccagaacatccacagcgaggagaagcccttcaagtgcaacaagtgcagcaaggtgttcggcagacagagcttcctgatcgagcaccagagaatccacaccggcgagaagccctaccagtgcgaggagtgcggcaaggccttcagccacagaatcagcctgaccagacacaagagaatccacaccgaggacagaccctacgagtgcgaccagtgcggcaaggccttcagccagagcgcccacctggcccagcacgagagaatccacaccggcgagaagccctacacctgcaagacctgcggcaaggccttcagccagagaaccagcctgatcctgcacgagagaagccacaccggcgagaagccctacgagtgcaacgagtgcggcaaggccttcagcagcggcagcgacctgatcagacaccagagaagccacagcagcgagaagccctacgagtgcagcaagtgcggcaaggcctacagcagaagcagcagcctgatcagacaccagaacacccacagcgaggagaaggcctag

SEQ ID NO: 319931 - DNA, 975 bp, Artificial Sequence
  derived and/or modified sequence
aagaatagcgtgctggtgaagcctaaaaagggacactctggcaagaaaccactcaagtgtaatgactgcggtaagacattttccaggagcttttccttaaagctgcatcagaacatccacactggcgagaagccgtttgaatgctcgaactgtagaaaggccttccgacagattagctctatattgcttcaccagcgtatacactctggaaaaaaaagccatgagtgcaataaatgtggtgagagtttcaatcagcgcaccactctcattttgcatatgagaattcatgacggaaagaatccttttaagtgcagaaaatgcggcaaactgttcaataggatatcccctctcatgctccaccaaaggattcacacgtctgagaaaccatacaagtgtgaggaatgcggcaagatgttttcaggcactgcaaatctcaagattcaccagaatatccacagcgaggagaagccttttaagtgcaataagtgtagcaaggtgttcggaagacagagtttcctaatcgagcatcagagaatacatacaggcgaaaaaccataccagtgtgaagagtgtgggaaagcgtttagccatcgtatcagccttacccgacataaacggattcacactgaggacagaccctatgaatgcgatcagtgtggtaaggccttcagccagtctgcccatctcgcacaacatgagcgaatccacaccggagaaaaaccctatacctgcaagacctgcggcaaagcctttagtcagagaacaagtctgattctgcacgaacgttctcacaccggcgaaaagccctatgaatgtaacgaatgcggcaaggcttttagctccggctcagacctgatcaggcaccagagatcacacagcagtgaaaagccatacgagtgcagtaaatgtggcaaagcctactctagaagctcctcactcatccgccaccagaatactcacagcgaggagaagtag

SEQ ID NO: 319932 - DNA, 1179 bp, Artificial Sequence
  derived and/or modified sequence
atgcgcatacacgatggaaaagaaattcttgattgtggtaaagcactctcccagtgccagagcttcaatattcatcagaagatccacgtggttggcaacgtttgccagtgccggaagtgtgggaaagctttcaaccagatgtcatcgctcctcctgcacaagaagattcacaacggaaagaagacgcacaagtataataagtgcggccgggggttcaagaaaaagtcagttttcgtagtccacaagcggattcacgccggcgagaagatccctgagaatgctaaagcactgtcacagtcactccagcagagatctcatcatctggagaaccctttcaagtgtcgaaagtgtgggaagttgtttaatagaatttcgcctctgatgttgcaccagcgcattcatacatctgagaagccgtacaagtgcgataagtgtgataagttttttcggaggctttctaccttgatacttcacctgagaatccataacggagagaaactttataggtgtaataagtgcgagaaggtgtgcaatagacattcgtccttgatccagcatcagaaggtacacaccaagaagaagaagcttttcgaatgtaaagaatgtgggaaaatgttcagtggtacagccaatttgaaaattcatcagaacatacactccgaagaaaagccgtttaagtgtaacaagtgcagtaaggtatttggacgccagtcttttctaatcgaacatcaacgcatccatactggcgagaagccctaccaatgcgaagagtgcgggaaagccttctcccaccggattagtctcacacgccataagagaatccatactgaagacagaccctacgagtgcgaccagtgcggcaaggctttctctcagtctgcacatctggcacaacatgagcgtatccatacaggggagaaaccttacacttgcaaaacatgtggcaaggcattctcccagaggaccagtcttattcttcatgagcgcagtcatacaggggaaaagccctatgaatgtaacgaatgcgggaaagccttttcaagcggtagcgacttgattcgtcaccagaggagtcactcaagtgaaaagccctacgagtgtagtaaatgtgggaaggcttattctagaagcagctccttaattcggcaccagaacacgcatagtgaagagaaagcctag

SEQ ID NO: 319933 - DNA, 975 bp, Artificial Sequence
  derived and/or modified sequence
aagaacagcgtgctggtgaagcccaagaagggccacagcggcaagaagcccctgaagtgcaatgactgtgggaagaccttcagccgctccttcagcctgaagctgcaccagaacatccacactggagagaagccctttgaatgtagcaactgcaggaaggccttccggcagatcagcagcatcctgctgcaccagaggatccacagcggcaagaagagccatgagtgcaacaagtgtggggagagcttcaaccagaggaccaccctcatcctgcacatgagaattcatgatggcaagaaccccttcaagtgcaggaaatgtgggaagctgttcaaccgcatcagccccctgatgctgcaccagaggatccacaccagcgagaagccctacaagtgtgaggagtgtgggaagatgttcagcggcacagccaacctgaagatccaccagaacatccacagcgaggagaagcccttcaagtgcaacaagtgcagcaaggtgtttggccggcagagcttcctgattgagcaccagaggatccacactggagagaagccctaccagtgtgaggagtgtgggaaggccttcagccaccgcatcagcctgaccaggcacaagaggatccacacagaggaccggccctatgaatgtgaccagtgtgggaaggccttcagccagagcgcccacctggcccagcacgagcgcatccacactggagagaagccctacacctgcaagacctgtgggaaggccttcagccagaggaccagcctcatcctgcacgagaggagccacactggagagaagccctatgaatgtaatgaatgtgggaaggccttcagcagcggcagtgacctgatccgccaccagaggagccacagcagcgagaagccctatgaatgttccaaatgtgggaaggcctacagccgcagcagcagcctcatccgccaccagaacacccacagcgaggagaagtag

SEQ ID NO: 319934 - DNA, 1179 bp, Artificial Sequence
  derived and/or modified sequence
atgagaattcatgatggcaaggagatcctggactgtgggaaggccctgagccagtgccagagcttcaacatccaccagaagatccacgtggtgggcaatgtgtgccagtgcaggaaatgtgggaaggccttcaaccagatgagcagcctgctgctgcacaagaagatccacaacgggaagaagacccacaagtacaacaagtgtggccggggcttcaagaagaagtctgtgtttgtggtgcacaagagaattcatgctggggagaagatcccagaaaatgccaaggccctgagccagagcctgcagcagaggagccaccacctggagaaccccttcaagtgcaggaaatgtgggaagctgttcaaccgcatcagccccctgatgctgcaccagaggatccacaccagcgagaagccctacaagtgtgacaagtgtgacaagttcttccggcggctgagcaccctcatcctgcacctgcgcatccacaatggagagaagctgtaccgctgcaacaagtgtgagaaggtgtgcaacagacacagcagcctcatccagcaccagaaggtgcacaccaagaagaagaagctgtttgagtgcaaggaatgtgggaagatgttttctggaacagccaacctgaagatccaccagaacatccacagcgaggagaagcccttcaagtgcaacaagtgcagcaaggtgtttggccggcagagcttcctgattgagcaccagaggatccacactggagagaagccctaccagtgtgaagaatgtgggaaggccttcagccaccgcatcagcctgaccaggcacaagaggatccacacagaagatcggccctatgaatgtgaccagtgtgggaaggccttcagccagagcgcccacctggcccagcacgagcgcatccacactggagagaagccctacacctgcaagacctgtgggaaggccttcagccagaggaccagcctcatcctgcacgagaggagccacactggagagaagccctatgagtgcaatgaatgtgggaaggccttcagcagcggcagtgacctgatccgccaccagaggagccacagcagcgagaagccctatgagtgcagcaaatgtgggaaggcctacagccgcagcagcagcctcatccgccaccagaacacccacagcgaggagaaggcctag

SEQ ID NO: 319935 - DNA, 975 bp, Artificial Sequence
  derived and/or modified sequence
aagaacagcgtgctggtgaagcccaagaagggccacagcggcaagaagccgctcaagtgtaatgattgtgggaagactttcagccggtcattctcactgaaattgcatcagaacattcacacaggggagaagccattcgaatgtagtaactgtagaaaagcttttagacagatcagcagcatccttctgcatcaacgaatccacagtggaaagaagtctcatgaatgtaacaagtgcggcgaatccttcaaccagcggaccacactgatcctccacatgaggattcacgatggaaagaaccctttcaagtgcaggaagtgtggcaaactattcaataggattagcccgcttatgcttcatcagcggatccacacaagcgagaaaccctacaaatgcgaagagtgcggtaaaatgttctctgggaccgccaacctgaaaatacatcagaacatccacagcgaagagaaaccatttaagtgtaacaaatgcagcaaagtgtttggcagacagagcttcctgatcgagcaccagcggatccacaccggagagaaaccttaccagtgtgaggaatgcggcaaggcattctcacaccgtatctctctgacaaggcacaagcgcattcacacggaggaccgaccgtatgagtgcgaccagtgcgggaaggcgttttcccagtcagcccatctggcgcagcatgagcgaatccatacaggtgaaaaaccttacacctgtaagacctgcggcaaggctttctcacagcgcacatctctgattctgcacgagcgttctcacaccggcgagaaaccctacgagtgcaatgagtgcggcaaagcgttttcctcaggaagtgatttaattcgacatcagcgctcacactcctctgagaaaccctacgagtgctccaagtgcggtaaggcatacagtaggagcagctcccttatccgacaccaaaacacccattcagaagaaaagtag

SEQ ID NO: 319936 - DNA, 1179 bp, Artificial Sequence
  derived and/or modified sequence
atgcggatccacgacggcaaggagatcctggactgcggcaaggccctctcgcagtgccagtccttcaacattcaccagaagatacacgtggttggaaatgtctgtcagtgccggaagtgcggtaaggctttcaaccaaatgagctctttgctattgcacaaaaagatccataacgggaaaaagactcacaaatacaacaaatgcggaaggggcttcaagaagaaaagcgtgtttgtggtacataagaggattcatgctggcgagaaaattcctgaaaacgctaaagctctttcgcagtctctgcagcaacggagtcaccatcttgagaaccctttcaaatgtaggaaatgtggcaaactgtttaaccggatttccccactgatgctacatcaacgaattcacacatctgagaagccttacaagtgcgacaaatgtgacaaattttttagacgactgagtactctgattctgcacctgaggatccataatggtgagaaactgtataggtgtaacaaatgcgagaaagtgtgcaaccgtcacagctccctaatacagcaccagaaagtgcacaccaagaagaagaaactcttcgagtgcaaggagtgtggtaaaatgttttctggcacggctaacttgaagatccaccaaaatatccactcagaggagaagccctttaagtgcaataaatgcagcaaagtgttcggtcggcagtcattcctaatagaacaccaacgaatacacacaggggagaaaccttaccagtgcgaggagtgtggcaaggcatttagccaccgaatcagcctgacccgacataagcgcatacacaccgaagaccggccgtacgagtgtgatcagtgtggtaaagctttctcgcagtctgcccacctcgcccaacatgaacgcatacatacaggggagaagccctacacctgtaagacatgcggaaaagcattcagccaaagaacaagcttgatcctgcacgaaaggtcgcacacgggggagaagccttacgaatgtaacgagtgcggaaaagctttttcatccggcagcgacttaattaggcaccaaagaagccattcatccgagaaaccttatgaatgctccaagtgcggcaaggcctactcaaggagctccagcctgattagacaccagaacacccacagcgaggagaaggcctag

SEQ ID NO: 319937 - DNA, 975 bp, Artificial Sequence
  derived and/or modified sequence
aaaaattctgtgttagtcaagccaaagaagggtcacagtggaaagaaacccttgaagtgcaacgattgcgggaagaccttctccaggtcattctccctcaaattgcaccagaacatccatactggtgagaaacctttcgagtgttcaaattgcaggaaggcttttcggcagatttcctcaatactattgcatcagaggattcactcaggcaaaaagtcacacgagtgcaacaaatgtggagagtccttcaaccagagaactacattgattctgcacatgcggatccatgatgggaagaaccccttcaagtgtagaaagtgcggcaagctgtttaataggattagtccactgatgctgcatcagaggattcatacctccgagaagccttacaagtgcgaggagtgtggcaaaatgttcagtggcactgccaatctgaagatccatcagaacatacactcagaagagaagcctttcaagtgcaacaagtgtagcaaggtcttcggccgtcaatcttttttaatagagcatcagcgcatccacacgggcgagaagccgtaccagtgcgaggagtgtggtaaggcgttcagtcacaggatatccttgaccagacacaaacgtatccatactgaggaccgaccttacgagtgcgaccagtgtggtaaggcgttttcccagtccgcccacctagcacaacacgagcgaatacacacaggggagaagccctatacctgtaagacatgcggaaaggccttttcgcaaaggacgtccctgatcctgcatgagaggagtcatactggagaaaagccgtacgaatgtaacgaatgtgggaaggcgttcagctccggctctgatctaattcggcatcagagatcacatagcagtgagaagccatatgagtgctcaaagtgtggtaaggcctattccaggtcatcatcactgatcaggcatcagaatactcattccgaggaaaagtag

SEQ ID NO: 319938 - DNA, 1179 bp, Artificial Sequence
  derived and/or modified sequence
atgcggattcatgatggcaaagagattctggattgcggcaaggccctgtcccagtgtcagtctttcaatatacaccagaagatccacgttgtgggtaacgtgtgccagtgtagaaagtgtggaaaggctttcaatcaaatgtcttctctgctgctgcacaaaaaaattcacaatggcaagaaaactcacaagtataacaaatgcggaagaggcttcaaaaaaaaaagtgtgttcgtcgtgcataagcgaatccatgccggtgagaaaattccggagaatgccaaagccctttctcagtctctgcaacagagatcccaccacttggaaaatccttttaaatgtaggaaatgtggtaagctcttcaacagaatctctcctcttatgctgcatcaacgcattcataccagtgagaagccgtacaaatgcgataaatgcgacaaattctttagacggctgagcacactgattctccacctcagaatccataacggggaaaagctgtaccggtgcaacaagtgtgagaaggtttgcaatagacactcttcattgatccagcatcaaaaggtgcatacaaagaagaagaagctctttgagtgtaaggagtgcggcaaaatgttcagtggcactgctaatctgaaaatccatcagaatatccacagtgaagaaaagccgtttaaatgtaataaatgctctaaggtgttcggtagacagagcttcctgatagaacaccagagaatacatactggggagaaaccctaccaatgtgaggagtgcggtaaggcattctcccatcgcataagtctgacaaggcataaaaggatacatactgaggatcggccatacgagtgcgaccaatgtggtaaagctttttcacaatccgcccacctggcccagcacgagaggatccacactggggaaaagccctatacatgcaagacttgtggaaaggctttttcccagcggactagcttgattctccacgaaaggtcccacacaggcgagaaaccctacgaatgcaacgaatgcggaaaggcattcagcagcgggagtgaccttattaggcatcagaggtcgcactcttctgagaagccatatgaatgcagcaagtgcggcaaagcatatagccgaagctcctcacttattcgccatcaaaatacacatagtgaggagaaagcatag

SEQ ID NO: 319939 - DNA, 972 bp, Artificial Sequence
  derived and/or modified sequence
aaaaattcagtcctagtaaaacctaagaaagggcattcagggaagaaacctttaaaatgtaatgactgtggtaaaacctttagtcgaagcttctctcttaaacttcatcagaacattcatacaggagagaagccttttgaatgcagtaattgtagaaaagctttcagacagatctcatccatcctacttcatcagagaattcacagtggaaagaaaagccatgaatgcaataaatgtggggaaagcttcaatcaaagaacaacccttattctacatatgagaattcatgatggaaagaatccttttaaatgcagaaaatgtgggaaattatttaataggatttcacccctgatgcttcaccagagaattcacacttcagagaaaccgtacaaatgtgaggaatgtgggaagatgttttctggaactgcaaaccttaaaatacatcagaatattcattctgaagagaaacctttcaaatgcaataaatgtagtaaagttttcggccgccaatcatttcttattgaacatcaaagaattcatactggagaaaaaccctaccagtgtgaggaatgtggaaaagccttcagccaccgaatatctctcacacgacataagagaattcatactgaagatagaccctatgaatgtgatcagtgtgggaaggccttcagccagagtgcacacctcgcccaacatgaaagaattcacactggagagaagccatatacatgcaaaacatgtggtaaggcctttagtcagcgcacatctcttattctacatgaaagaagtcatactggagagaaaccctatgaatgtaatgaatgtgggaaggcatttagcagtggctcagaccttattcgacatcagagaagtcattcttcagagaaaccctatgaatgtagtaaatgtgggaaggcatatagtcggagttcatccctgattcgacatcagaatacacattctgaagaaaaa

SEQ ID NO: 319940 - DNA, 3768 bp, Artificial Sequence
  derived and/or modified sequence
gcggtcccggggtcccggaggggagtgcgcaggcgctgagtccctgctcggctgtctcggtggtcgccgccggggtctgagcccgggaagaccgagccctgccttaccagctctctgcccatctctcagtgtggaccctaaagggggaggaaaggatgccttctgcacgggggaaatccaaatccaaggcacctataacatttggggacttagccatctacttctcccaggaggagtgggaatggctgagccccattcagaaggatttgtatgaagatgtcatgttggagaattaccggaacctggtctcgcttggtctttcctttcggagaccaaatgtgatcaccttattggagaaagggaaagcaccctggatggtagagccagtaagaagacgccgggctcctggctggactacaatgatggcatgatctcggctcactgcaacctccgcctcctgggttcaagcaattctcgtgcctcagcctcccgagcggctgggattacagactcggggtctaaatgtgagaccaagaagttacctccaaatcaatgcaacaaatctgggcaaagcatctgccagaaactagtttctgcacaacaaaaagctcctacacgaaagagtggctgcaacaaaaattcagtcctagtaaaacctaagaaagggcattcagggaagaaacctttaaaatgtaatgactgtggtaaaacctttagtcgaagcttctctcttaaacttcatcagaacattcatacaggagagaagccttttgaatgcagtaattgtagaaaagctttcagacagatctcatccatcctacttcatcagagaattcacagtggaaagaaaagccatgaatgcaataaatgtggggaaagcttcaatcaaagaacaacccttattctacatatgagaattcatgatggaaaggaaattcttgactgtgggaaggccttgagtcaatgtcagtctttcaatatacatcagaaaattcatgttgttgggaatgtctgccagtgcagaaagtgcggaaaagccttcaatcagatgtcatcccttttacttcataagaaaattcacaatggaaagaaaacacataaatataataaatgtgggagaggcttcaaaaagaaatcagtctttgttgtacataaaagaattcatgctggagagaaaatccctgaaaatgcgaaggccttaagtcagagtctacagcaaagaagtcaccatttagagaatccttttaaatgcagaaaatgtgggaaattatttaataggatttcacccctgatgcttcaccagagaattcacacttcagagaaaccgtacaaatgtgataaatgtgacaagttcttcaggcggctttcaacccttattctgcatctaagaattcataatggagaaaaactatacagatgcaataaatgtgagaaggtctgcaatcggcattcatcccttattcaacatcagaaagttcatacaaagaaaaagaaactatttgagtgtaaggaatgtgggaagatgttttctggaactgcaaaccttaaaatacatcagaatattcattctgaagagaaacctttcaaatgcaataaatgtagtaaagttttcggccgccaatcatttcttattgaacatcaaagaattcatactggagaaaaaccctaccagtgtgaggaatgtggaaaagccttcagccaccgaatatctctcacacgacataagagaattcatactgaagatagaccctatgaatgtgatcagtgtgggaaggccttcagccagagtgcacacctcgcccaacatgaaagaattcacactggagagaagccatatacatgcaaaacatgtggtaaggcctttagtcagcgcacatctcttattctacatgaaagaagtcatactggagagaaaccctatgaatgtaatgaatgtgggaaggcatttagcagtggctcagaccttattcgacatcagagaagtcattcttcagagaaaccctatgaatgtagtaaatgtgggaaggcatatagtcggagttcatccctgattcgacatcagaatacacattctgaagaaaaagcctaaggttgttttaaatctataaaatcaacgaatgaggctatcaaacatatggcaaatatgtatttgtctataatgtaaattttgtgtatatgggaccatttgatgatatgtcccactttgaaagccaaagagcaaaagtcattggtgattttgacctcaggatttgaaattaactgaaggaaactcagaagtttggtcagtcattgtgaatgaagatcatttttcatttgataagaattactggctgggcgcagtggcttacacctgtaaccccagcactttgggaggctgagacaggcggatcacgaggtcaagagtttgagaccacggtgaaaccctgtctctactaaaaaatacaaaaaaaaaaaaaattaccgatattttacttccagcatagttttaaagataatttattggtcacatacaacaaaatagaattgtgaagtccattatagggctctgagcctgatttaaggtcacagaaaaaagaatttgagtctgtttctcagatctagaattatcaaatataaggaacttctcggcaaaacagggtgccactttcagctgacaaacttgtgggtgagaataaagaaaagtgagtctttaggtagataaagttgtcactcataatggtgtgtaacagtagaaaccttactttaccatctccacggatatgaggatatatgatcttcatggtgtgaacgtctaacttggctgagacaagctatcagtaaaagaaccaagatatagtgaagaatgaggatttcagagccaggagaaatcagtattgttttatttggaaataaatcatctatatttatatgagtaaacattggtattttcatgtaacaatactggtatgcaataagtggtgtaatatgagttgttatggactgaatgtttatgtccctcccaaaactaattatgttaaaatcctcaccatcaatgtgatgttacttggaaatgaggcatttgggaggcaattaggattagatgaggtcatgagggtggagccctcgtgatgggattagtgcctttataagaagagacatcaggctgagcccggtggctcatgcctgtaatcccagcactttgggaggccaaggcgagtggatcatgaggtcaggagattgagacaatcctggctaacacggtgaaaccccgtctccactgaaaaaaaatacaaaaaattagccaggcacagtggcatgtgcctgtagtcccagctactcgggaggctgaaggagaagaatcgcttgaacccaggaggcggaggttgcagtgagccaggatcacgccactgtactccaccctgggcgacagagcgagactacgtctcaaaaagacatcagaaagcctgcttgctctctgcaccatgtgaggatgcaggaagaagccagctgtctacagaacaggaagagaaccctacgagaacctaaccatgctggcgacctgttctcagacttccagacttcagaactgtgagaagtaaattgttgtttaagccacccagtctatgatgttttgttatggcagccccagctaatatatggagtggaaagcctagatttatctactgggttcttttcctgtcagcagttcaacatgtgtagtagctttcagtctctgctgtttgtgccaaatatataagaaataaaatcagataacttttttgtaattgg

SEQ ID NO: 319941 - protein, 424 aa, Artificial Sequence
  derived and/or modified sequence
MTLRPGTMRLACMFSSILLFGAAGLLLFISLQDPTELAPQQVPGIKFNIRPRQPHHDLPPGGSQDGDLKEPTERVTRDLSSGAPRGRNLPAPDQPQPPLQRGTRLRLRQRRRRLLIKKMPAAATIPANSSDAPFIRPGPGTLDGRWVSLHRSQQERKRVMQEACAKYRASSSRRAVTPRHVSRIFVEDRHRVLYCEVPKAGCSNWKRVLMVLAGLASSTADIQHNTVHYGSALKRLDTFDRQGILHRLSTYTKMLFVREPFERLVSAFRDKFEHPNSYYHPVFGKAILARYRANASREALRTGSGVRFPEFVQYLLDVHRPVGMDIHWDHVSRLCSPCLIDYDFVGKFESMEDDANFFLSLIRAPRNLTFPRFKDRHSQEARTTARIAHQYFAQLSALQRQRTYDFYYMDYLMFNYSKPFADLY

SEQ ID NO: 319942 - DNA, 1275 bp, Artificial Sequence
  derived and/or modified sequence
atgacgcttcgccctgggacaatgcgactggcctgcatgttttctagcattctgctctttggagctgcggggctcctcttatttatttctctccaggatccaaccgaactggccccacagcaggtgcctggtattaaattcaatatcagacctcggcagcctcaccatgacctcccccccggcggatcgcaggacggggacctgaaggagcccactgagagagtaacccgtgaccttagttccggggccccacgcggccgaaaccttccagccccagatcaaccacaacctccgctgcagagaggaacccggctgcggctgagacagcgtcgcaggagacttctgattaagaagatgccagcggctgccacaatccctgctaatagctccgatgccccttttatccgtcctggacccggcacgctggatggacggtgggtgtccctccatcgctcccagcaggaaagaaagcgcgtgatgcaggaagcatgtgcaaagtaccgggccagcagcagtaggcgagcagtgaccccaagacacgtgtctcggatttttgtcgaagatcgccaccgggtgctctattgcgaggtgcccaaagcagggtgtagcaactggaagagagtgctgatggtcctcgccggccttgcgtcatctacggcagatattcaacacaatacggtgcactacgggtctgctcttaagagactggacacttttgaccgccagggcatattgcacaggctatctacttacaccaagatgctctttgttagagaaccattcgaacggttagttagtgccttcagagataagtttgaacatcctaacagttactaccaccccgtctttggcaaggccatcctggctcgttatagggctaatgcgtcacgcgaggcactgaggactggatccggggtgagattcccagagttcgtgcagtacttactagatgtccacaggcctgtgggcatggacatccactgggatcatgtcagtcgattatgttctccctgcctgattgattatgatttcgtcggcaaatttgaatcgatggaggacgatgcaaacttttttctgtcgcttatccgtgctccccgaaatctgacatttccgaggttcaaagacaggcactctcaagaagctcgcacaaccgcgagaattgcccaccaatacttcgcccaactgtccgcccttcagcgacagagaacatacgacttctactatatggactatttgatgtttaattactcgaagccatttgccgacctgtactag

SEQ ID NO: 319943 - DNA, 1275 bp, Artificial Sequence
  derived and/or modified sequence
atgaccttgaggccaggaacaatgagacttgcttgcatgtttagctctattctactgtttggagccgctggcctgttgctgttcatcagtctgcaggatcccactgagctggctcctcagcaggttccgggaataaaatttaatatccgtccccgccagccccaccatgatttaccgcccggtggaagtcaggacggagacctgaaagagccaaccgagcgggtgaccagagatctctcatcaggagctcccagaggccgaaatttgcccgcccccgaccagccacagcctccgctacagagaggaactcgtcttcgcctgcgacagagaaggcggcggctgctaatcaaaaaaatgcctgctgctgcaaccatccctgccaactcgtccgacgccccttttatcagacccggtcctgggacactcgacggcaggtgggtttcactgcaccgctcccaacaagagaggaaacgagtcatgcaggaggcgtgtgccaagtatagagccagcagctctcgacgtgcagtgaccccccggcatgtgagtaggatcttcgtggaagacagacaccgggtactgtactgcgaagttcccaaagctgggtgctcaaactggaagcgtgtacttatggtgctcgccgggctggccagtagtaccgcagatatccagcataatacagtccattatggtagcgccttgaaacggctggacacattcgatagacagggtatcctgcacaggctctctacatacaccaaaatgctctttgttagggaaccatttgaaagattagtttctgcgttccgggacaaattcgaacacccaaattcctactaccatccagtgtttggtaaagccatccttgcacgctatcgcgccaacgcaagtagagaggctcttaggacaggctcaggggtacgatttcccgagtttgttcagtacctgttagacgtgcatcggccagtcggcatggacatacactgggatcatgtcagtcggctgtgtagtccatgcctgattgattatgattttgtggggaagttcgagagtatggaggacgatgccaacttcttcctaagcctcatcagagctccacgtaaccttaccttccctaggttcaaggataggcactcacaggaggcgagaaccaccgcccggatagcccatcagtactttgcgcagctcagtgccctacagcgacagcggacctacgatttttattatatggactacctgatgtttaattacagcaaacccttcgccgatctttactag

SEQ ID NO: 319944 - DNA, 1275 bp, Artificial Sequence
  derived and/or modified sequence
atgaccctgcggccaggtaccatgaggctcgcctgtatgttcagttcaatacttctcttcggcgctgcgggactactgctgttcatatctctgcaggaccccactgaactggccccacaacaggtgcccggaattaagtttaatattaggcctcgccaaccccatcatgatctacctcctgggggttcccaggacggcgacctgaaagaaccaacagagcgcgtgactcgcgacctgtcttctggagcccctcgaggccggaacttgcccgcgcccgaccagccacagccgcctttacagcgaggtacgcggctccggctccgtcagaggaggcgcaggttgttgattaaaaaaatgcccgcagctgctaccattcctgcaaacagctcagacgctcccttcatcaggccgggaccgggaaccctcgatggccgttgggtatccttacaccggagccagcaggagcgcaagagagtaatgcaggaggcttgtgccaagtatcgcgccagctcctctagaagggcagtgaccccccgccacgtgtccaggatcttcgtagaagacagacacagggtcttatactgtgaagtgcctaaagcggggtgtagcaattggaagcgcgtcctcatggtgttggcgggcctggcaagttcaaccgctgacatacagcacaacaccgtccactatgggagtgctctaaaacgtctcgacactttcgaccgccagggaatcttacatagactgtccacctacacgaaaatgttatttgttagggaaccatttgaacggttagtgtctgccttcagggacaagttcgagcacccaaactcctattatcatccagttttcggtaaggcgatactggcaagataccgagcaaatgcctcccgggaggcactaagaactggaagtggggtaaggtttcctgagttcgtgcagtacctgctagatgtgcaccgtccagttgggatggatattcactgggaccacgtctctagactctgtagtccgtgcctgatcgattacgactttgtgggcaagtttgagagtatggaggatgatgctaatttctttttgagcctgatccgcgcacctcgcaaccttacatttccaagattcaaagacagacacagccaggaagcaaggactacggccagaatagcacatcagtactttgcgcagctctcagctctccaaagacaacggacctacgacttttattacatggactaccttatgttcaactactctaagccattcgccgacctctattag

SEQ ID NO: 319945 - DNA, 1275 bp, Artificial Sequence
  derived and/or modified sequence
atgaccctgcggcccggcaccatgaggctggcctgcatgttcagcagcatcctgctgtttggagctgctggcctgctgctcttcatcagcctgcaggaccccacagagctggccccccagcaggtgcccggcatcaagttcaacatccggccccggcagccccaccacgacctgcccccaggcggcagccaggatggagacctgaaggagcccacagagcgggtgacccgggacctgagcagcggggccccccggggcaggaacctgcctgccccagaccagccccagccccccctgcagaggggcacccggctgcggctgcggcagaggagaagaaggctgctgatcaagaagatgcctgctgctgccaccatcccagccaacagcagtgatgcccccttcatccggcccggccctggcaccctggatggccgctgggtgtccctgcacaggagccagcaggagaggaagagggtgatgcaggaggcctgtgccaagtaccgggccagcagcagcagaagagctgtgacccccaggcatgtgagccgcatctttgtggaggacagacaccgggtgctgtactgtgaggtgcccaaggccggctgcagcaactggaagagggtgctgatggtgctggccggcctggccagcagcacagctgacatccagcacaacacagtgcactacggcagcgccctgaagaggctggacacctttgaccggcagggcatcctgcaccggctgagcacctacaccaagatgctgtttgtgcgggagccctttgagcggctggtgtctgccttccgggacaagtttgagcaccccaacagctactaccaccctgtgtttgggaaggccatcctggcccgctaccgggccaatgccagccgggaggccctgaggacaggcagcggcgtgcgcttccctgagtttgtgcagtacctgctggatgtgcacaggcctgtgggcatggacatccactgggaccacgtgtcccggctgtgcagcccctgcctgattgattatgactttgtgggcaagtttgagagcatggaggatgatgccaacttcttcctgagcctcatccgggcccccaggaacctgaccttcccccgcttcaaggacagacacagccaggaggcccggaccacagccagaattgcccaccagtactttgcccagctgagcgccctgcagaggcagaggacctatgacttctactacatggactacctgatgttcaactacagcaagccctttgctgacctgtactag

SEQ ID NO: 319946 - DNA, 1275 bp, Artificial Sequence
  derived and/or modified sequence
atgaccctgcggcccggcaccatgcggctggcctgcatgttcagctctattctcctgttcggcgcagccgggcttctgcttttcatatctctgcaggacccaaccgaattggctcctcagcaggtcccgggtattaagtttaatatccggcccaggcagccccaccatgacctgccccctggcggtagtcaggacggcgatctgaaagaaccaaccgagcgcgtcacacgggacctgtcttccggagctccccgcggcagaaacctcccagcccccgatcagcctcagcccccactgcagagaggtacccgcttgcgcttgcgccagaggcgacggaggctactgatcaagaagatgcccgccgctgccaccatccctgctaacagcagcgacgctccattcatcaggcctggtccagggaccttggacggtcgatgggtgtcgctgcaccgctcacagcaggagcggaagcgggtaatgcaggaagcctgcgctaagtaccgggcttccagcagcagaagggctgttactcctcgccatgtaagccggatcttcgtcgaggaccggcatcgggttctgtactgcgaagtcccaaaagcaggttgctccaactggaagagagtgctcatggtccttgcggggttggcatccagtacggccgacatacagcataataccgtccactacggatctgctcttaaacgactggacaccttcgataggcagggcatcctccacaggctgtctacttacaccaagatgctgtttgtccgggagccctttgaacggttagtgtccgcattccgggataagtttgagcatcccaatagctattatcatccagtgttcgggaaggccattctggccaggtatagggctaacgcctcacgcgaagcccttcggaccggaagcggtgtgagattcccagaattcgtccagtatctgctcgatgtacaccggcctgtgggaatggatatccattgggaccacgtttcgagactgtgttccccctgccttatcgattatgacttcgtggggaagtttgaatctatggaggacgacgccaacttcttcctgtctctgattcgggctcccagaaatctaacctttccaagattcaaagatcgccactcccaggaggcgaggacaaccgcaagaatcgcacatcagtactttgcccaattatcagcactgcaacgccaaaggacatatgacttttattatatggattaccttatgttcaattactccaaaccctttgcggatctctactag

SEQ ID NO: 319947 - DNA, 1275 bp, Artificial Sequence
  derived and/or modified sequence
atgaccctgcggcccggcaccatgcggctggcctgcatgttcagctcaatactgctgttcggcgccgcaggactcttgctgtttatatccctgcaagatcccaccgagctagcacctcagcaagtcccgggcatcaagtttaatatacgcccacggcagccccaccatgatctgccacctgggggttcacaggacggagacctaaaagaacctactgagagggttacccgggatctttcttccggagccccgcgcggtcgaaacctccccgctccagaccaaccccaaccgcccctgcagcgggggacgcgcctgcgcctaagacagcgacgccgccgtctgctgatcaaaaagatgccggccgctgcaaccattcctgcaaactccagcgacgctcccttcattcggccaggaccaggcactttggacgggagatgggtcagtctgcatagaagccagcaggagcgaaagcgcgtcatgcaggaagcatgcgcaaagtaccgcgcctctagcagccgaagagctgtgactccccggcacgtgagccgaatctttgttgaagatcggcatagagtactgtactgcgaagtccccaaggccggatgttccaactggaaaagagtcctgatggtcttggccggcttagcatcttccacagccgacatccagcataatactgtccattatggcagcgcactgaagaggctggacaccttcgatcgccaaggaattctgcacagacttagcacctacacgaagatgctgttcgtgcgcgaaccgttcgaacggttagttagcgctttccgggacaaattcgagcatccgaactcatactatcacccagttttcggaaaagctatactggccagataccgcgctaacgccagtagagaggcccttcgaacagggtctggagttcgcttcccagagttcgtccaatacctgttagatgttcaccgtcctgtgggaatggacattcattgggatcatgtatcgaggttgtgctccccatgccttatcgactatgacttcgtaggcaagttcgaatctatggaggacgacgctaatttcttcctttccctgatccgggccccgagaaatcttaccttccctagatttaaggataggcacagccaggaagcgaggaccactgctaggatcgcacaccagtactttgcccagctctctgccctgcagaggcagagaacatatgacttttactatatggattatctgatgtttaactacagcaagcctttcgctgatctgtattag

SEQ ID NO: 319948 - DNA, 1275 bp, Artificial Sequence
  derived and/or modified sequence
atgaccctgcggcccggcaccatgcggctggcctgcatgttcagctcaatcctcctattcggtgctgccggactgctcctgtttattagtcttcaggacccaacggagcttgcaccccagcaggtccctggcatcaaatttaatattcgtccccgtcagcctcatcacgacctccccccaggcggttctcaggacggcgatttaaaggagcctacagaacgcgttacaagagacttgtcttccggcgccccccgcggaagaaaccttcccgcgcccgatcagccccagcccccgctgcaacgcgggaccaggttgcgcttgagacagaggcgaaggcggcttctgatcaaaaaaatgcctgcggcagccaccatccccgcaaactcatctgacgcacccttcatcaggccgggccctggaactctggacggacgctgggtgtccctgcaccgatcccagcaggagagaaagagagttatgcaggaggcctgcgccaagtatcgcgctagtagcagccgtcgggcagtgaccccgaggcacgtatcccggatatttgtggaagataggcacagggtgctttattgcgaagtgcctaaggcagggtgcagtaactggaagagggtactgatggtgttagctggccttgcgtcgtctacagccgacatccagcataacactgtccactatgggagcgctcttaaacgcttagatacatttgaccgccaggggatcctacatcgactgagtacttacacaaagatgctcttcgttcgggagcccttcgaaagattagtttctgcattccgtgacaagttcgagcaccctaacagttattatcatccagtgttcggaaaagcaatattagcccgctaccgtgccaacgccagtcgagaggctctcaggaccgggagcggggtcagattcccagagttcgtacagtacctcctcgacgtccatcgaccagttggcatggatatccactgggaccatgtgagtaggctctgcagcccgtgtctcatagattacgactttgtgggaaagttcgagtccatggaagatgacgccaacttctttctttctctcatcagggctccaaggaacctgacgtttccacgatttaaagaccgccacagtcaggaggccagaactaccgcccgcattgcacaccaatatttcgcccagctgtctgcccttcaacgacagagaacatacgacttctactacatggattaccttatgttcaattactcgaaaccctttgccgacctgtactag

SEQ ID NO: 319949 - DNA, 1275 bp, Artificial Sequence
  derived and/or modified sequence
atgacgctacgtcctggaaccatgcggttggcctgtatgtttagctccatattgctcttcggggctgctggcctactcttgttcattagtctacaggacccgacagaactagcgcctcaacaagtccctgggatcaaattcaacattcggcctaggcaaccacaccacgatcttccgcctggcggatcacaggatggagacctgaaggaacccactgaacgcgtaactagggacctctcaagcggggctccaagggggaggaatcttccagctcctgaccagcctcaaccccctcttcagaggggcactaggctgaggctgcgacagcggcgacgtcgtctcctaattaagaagatgcccgctgcagctaccattccagctaactcctccgacgcacccttcattaggccgggacctgggacacttgatggaaggtgggtgagcctgcaccgcagtcaacaagagagaaaaagagtgatgcaggaggcgtgcgccaaatatcgggcttccagtagtcgccgagcagtgaccccgcgtcatgtgagccgaattttcgtcgaggacagacatcgggtcttatattgcgaggtgccaaaagcaggttgcagcaattggaagagagtcctcatggttcttgcaggactggccagtagcacagccgatattcagcacaacacggtacattacgggtccgccctcaagaggctggacacctttgataggcagggtattttacatcgtttgagtacgtacacgaagatgctctttgtccgagaacctttcgaacggttggtgagtgcgtttcgagacaagttcgaacacccgaacagctactaccatcccgttttcggaaaggctattctggccagatatagagccaacgccagcagggaagctctgcgcaccggcagtggagtgcgtttcccagagttcgtgcagtatcttctggacgttcacaggcccgtcggcatggacattcactgggatcatgtcagtagattgtgtagtccgtgtttgattgactatgactttgtagggaagtttgagagtatggaagatgatgctaacttttttctctcactgattcgcgcacccagaaacctcacattccctaggtttaaggataggcattcacaggaagcgagaaccacagctaggattgcgcaccagtattttgctcagctgtctgctctgcagcgtcagcggacgtatgatttctattacatggactacctcatgttcaactactctaagccctttgcagatctgtactag

SEQ ID NO: 319950 - DNA, 1275 bp, Artificial Sequence
  derived and/or modified sequence
atgacactgcgtcccggaacaatgaggctggcttgcatgttcagcagtatcttgctgttcggggcagctgggctactgctgttcatctcgctgcaagatcctactgaactggccccacaacaagtgccagggattaaatttaatattagaccgagacagccccaccatgatctgccgccaggtggatctcaggacggagacctgaaggagcctaccgagagggtgacacgggaccttagtagcggcgctcccaggggacgaaatctccccgctcccgaccagccacaacctcccttacagcgcggtactcgactcagattgcgccagcgccgacggaggctgcttatcaaaaagatgcccgctgccgctactataccggcaaactcatctgatgccccttttattaggcccggtcccggaacactggacggtcgatgggtgtccctccaccggagccaacaagaacggaagcgcgtgatgcaggaagcctgcgcaaagtatagagcctcatcatcacgccgtgccgttaccccaagacatgtctcacgtatttttgtggaggatcgccatcgggtcctttattgcgaggtacctaaggctggttgttccaattggaagcgcgtcctaatggtccttgccggtctcgcatcaagcactgccgacattcaacacaacaccgtgcattatgggagtgcccttaaacgtctcgacaccttcgataggcagggcatccttcatagactttccacttatacaaaaatgctgttcgtgcgagagccttttgaacgattggtgagtgcttttcgggataaattcgagcatcccaacagttactaccatcccgtgttcggcaaagccatcttggccaggtatcgcgcaaatgcctcgagggaggccttacgaaccgggtccggcgtgcggttcccagagtttgtgcagtatctgttggatgtccataggccagtaggaatggacatacactgggatcacgtttctcgcctgtgctctccctgcctcatcgactacgactttgtgggaaaattcgagagcatggaagatgatgctaacttctttctctctctgattagagcgcctagaaatctcacttttcctcggtttaaggaccggcactctcaggaggccagaaccaccgctcggatcgcccaccagtactttgcccagctttccgcactgcaacggcagcgtacctatgatttctattatatggactacttgatgttcaattattctaaaccttttgccgatttatattag

SEQ ID NO: 319951 - DNA, 1275 bp, Artificial Sequence
  derived and/or modified sequence
atgacactcagacctggaacaatgcgtctggcttgtatgttcagtagtatcttactgtttggtgccgcaggcctccttctgtttatttctctccaggaccccaccgagctggcaccccagcaggtccccggaatcaaattcaacatccggccacgacaaccgcaccacgatctaccgccagggggtagtcaggatggggacctcaaggaacctactgagcgagtcactcgtgacctgtcctcgggagccccaagaggacggaatctgccagctcctgatcagccacaaccgcctctgcagcgtggtacacgactcaggctcagacaacgacgcaggcgtctcctgatcaagaaaatgcctgccgctgccacgatccctgctaactcctcagatgccccattcatacgccctggcccaggcacactggatgggagatgggtctcactccacaggtctcagcaggagcgcaaacgcgttatgcaagaggcctgtgcgaagtaccgcgcatctagcagtaggcgggctgtgaccccaaggcacgtcagcaggatctttgtggaggaccgacaccgggttctatattgcgaggtcccaaaggccggatgctctaattggaagagagtgctgatggtcctcgccggtttagcatcttcaaccgcagatattcagcacaacacagttcattacgggtcggccctcaaaagactggacaccttcgatcgccaaggcattctccacagactgagcacatataccaaaatgctctttgtcagggagccctttgagaggctggtcagtgccttccgtgacaagtttgagcaccccaacagttactatcacccagtctttggtaaagccattctggcgaggtacagggccaacgccagtagggaggcccttcgcacaggctctggggtccggttcccagaattcgtccagtacttactcgatgtgcatagacccgttggcatggacatacactgggatcatgtctcgcggttgtgttccccgtgtcttatcgactacgacttcgttggaaagttcgagtcaatggaagacgacgcaaactttttcctatcattaatcagagctccacggaacttgacttttccaaggttcaaagaccggcactctcaggaagcacggacgaccgcaaggatcgcccaccagtacttcgctcagttatccgccctgcagaggcagcgcacctatgacttttactatatggattacctgatgtttaattactccaaaccatttgccgacctgtattag

SEQ ID NO: 319952 - DNA, 2478 bp, Artificial Sequence
  derived and/or modified sequence
gggactcgtcccagagtttgctgccgccgccgccgctgccattagagcggttttaattagctgcaggatttttaatgagctgaaatcaagaagagccccatctcagaagtaagcgagagccgcgcgcagggaagaactagtctgacaaaacagaaggaggtggtgctctcgggggactgggctgtaggctcccaccgatcgatcggcgacgagcagatgagttcccgaggccaggaggctgaggagggaagccagggctcagagaccagcgcccggtgcagagtccccgctgctgccaccgcggcagaaggcacggtgccggattcaaggtgacggcagtgcctggctccattctcctcaagttgccatagcagcctctctcccaacaagcagcttctccgggagccctcagccgggagggacgtcattgttctctcctgcccgtgtggtgcaaggagacccaccggacagagaactttcccgagcccggggtccgctgaccacgtgggtgcacccatgctgcctggagccaggcacagggacaggtccccacggccacagggaatcctctgggcagctgaggggagcgtccaggcccagaagcagctgcagccaagcgtgtccttggagccgtccatgcgtctgtccgcctgctgccggtcgccactggagatctcggcctgatggacgcctggtgtggacgatgagggaagaacgtgccccccacacccaagaggtgacccctgagccagccccggatgaccctgcgacctggaacaatgcggctggcctgcatgttctcttccatcctgctgttcggagctgcaggcctcctcctcttcatcagcctgcaggaccctacggagctcgccccccagcaggtgccaggaataaagttcaacatcaggccaaggcagccccaccacgacctcccaccaggcggctcccaggatggtgacttgaaggaacccacagagagggtcactcgggacttatccagtggggccccgaggggccgcaacctgccagcgcctgaccagcctcaacccccgctgcagaggggaacccgtctgcggctccgccagcgccgtcgccgtctgctcatcaagaaaatgccagctgcggcgaccatcccggccaacagctcggacgcgcccttcatccggccgggacccgggacgctggatggccgctgggtcagcctgcaccggagccagcaggagcgcaagcgggtgatgcaggaggcctgcgccaagtaccgggcgagcagcagccgccgggccgtcacgccccgccacgtgtcccgtatcttcgtggaggaccgccaccgcgtgctctactgcgaggtgcccaaggccggctgctccaattggaagcgggtgctcatggtgctggccggcctggcctcgtccactgccgacatccagcacaacaccgtccactatggcagcgctctcaagcgcctggacaccttcgaccgccagggtatcttgcaccgtctcagcacctacaccaagatgctctttgtccgcgagcccttcgagaggctggtgtccgccttccgcgacaagtttgagcaccccaacagctactatcacccggtcttcggcaaggccatcctggcccggtaccgcgccaatgcctctcgggaggccctgcggaccggctctggggtgcgttttcccgagttcgtccagtacctgctggacgtgcaccggcccgtggggatggacattcactgggaccatgtcagccggctctgcagcccctgcctcatcgactacgatttcgtaggcaagttcgagagcatggaggacgatgccaacttcttcctgagcctcatccgcgcgccgcggaacctgaccttcccccggttcaaggaccggcactcgcaggaggcgcggaccacagcgaggatcgcccaccagtacttcgcccaactctcggccctgcaaaggcagcgcacctacgacttctactacatggattacctgatgttcaactattccaagccctttgcagatctgtactgaggggcgccgcagctggccggggccgccctgccccggtcactcacctgtgctcccgggcatcctcctgtccctggctcctcatcctgggagcaacagggctctgaggacgtgaggagccatcgctgtgggaggcagcaggccccgggtggggggcagaggcgcccagccttggatggggaccccagcccctggcctgtacctgtttcctcattccttggctgagggagaggctgagaactgggcagacacccctggagctcagccgacagttttgatgagcagggaagtctgaggcccagaggacggggggcccagcggtaagggatgtcccgcactcccttagccattgccttggaccaaaccacgtggtttgcagcttttctacgagccaggggggaggttcccttggattaaggttccaaataaagcacatggtttccagagc

SEQ ID NO: 319953 - DNA, 2225 bp, Artificial Sequence
  derived and/or modified sequence
ttcgctgggagccttcccggcgcgcaagccggatccggcagtgctgcggggaggagagaggacgaggcggcggcggcagcaggaggtgggggaccgatcgcgccgggggccgaagaggaacgccgccccgcgccctctcgctccccgcacgctccggctgccggccccacgctgctcgcccacagatcgcactgggttccgcttggagcgggcggaggcaccgggcccgagctgggtcggaggtcctctccgccgcctgcgcgccccaagcagaggatccgccgcggagaaccgctcccggactggaggcgcccgcggcctcgggtgcgtccgctgcgccaggtttaaaggtcaacaagaatatcttaccttaatttgacaagtacgcaagaaataatgcaagactcgtttatgttcagatctcggcctgatggacgcctggtgtggacgatgagggaagaacgtgccccccacacccaagaggtgacccctgagccagccccggatgaccctgcgacctggaacaatgcggctggcctgcatgttctcttccatcctgctgttcggagctgcaggcctcctcctcttcatcagcctgcaggaccctacggagctcgccccccagcaggtgccaggaataaagttcaacatcaggccaaggcagccccaccacgacctcccaccaggcggctcccaggatggtgacttgaaggaacccacagagagggtcactcgggacttatccagtggggccccgaggggccgcaacctgccagcgcctgaccagcctcaacccccgctgcagaggggaacccgtctgcggctccgccagcgccgtcgccgtctgctcatcaagaaaatgccagctgcggcgaccatcccggccaacagctcggacgcgcccttcatccggccgggacccgggacgctggatggccgctgggtcagcctgcaccggagccagcaggagcgcaagcgggtgatgcaggaggcctgcgccaagtaccgggcgagcagcagccgccgggccgtcacgccccgccacgtgtcccgtatcttcgtggaggaccgccaccgcgtgctctactgcgaggtgcccaaggccggctgctccaattggaagcgggtgctcatggtgctggccggcctggcctcgtccactgccgacatccagcacaacaccgtccactatggcagcgctctcaagcgcctggacaccttcgaccgccagggtatcttgcaccgtctcagcacctacaccaagatgctctttgtccgcgagcccttcgagaggctggtgtccgccttccgcgacaagtttgagcaccccaacagctactatcacccggtcttcggcaaggccatcctggcccggtaccgcgccaatgcctctcgggaggccctgcggaccggctctggggtgcgttttcccgagttcgtccagtacctgctggacgtgcaccggcccgtggggatggacattcactgggaccatgtcagccggctctgcagcccctgcctcatcgactacgatttcgtaggcaagttcgagagcatggaggacgatgccaacttcttcctgagcctcatccgcgcgccgcggaacctgaccttcccccggttcaaggaccggcactcgcaggaggcgcggaccacagcgaggatcgcccaccagtacttcgcccaactctcggccctgcaaaggcagcgcacctacgacttctactacatggattacctgatgttcaactattccaagccctttgcagatctgtactgaggggcgccgcagctggccggggccgccctgccccggtcactcacctgtgctcccgggcatcctcctgtccctggctcctcatcctgggagcaacagggctctgaggacgtgaggagccatcgctgtgggaggcagcaggccccgggtggggggcagaggcgcccagccttggatggggaccccagcccctggcctgtacctgtttcctcattccttggctgagggagaggctgagaactgggcagacacccctggagctcagccgacagttttgatgagcagggaagtctgaggcccagaggacggggggcccagcggtaagggatgtcccgcactcccttagccattgccttggaccaaaccacgtggtttgcagcttttctacgagccaggggggaggttcccttggattaaggttccaaataaagcacatggtttccagagc

SEQ ID NO: 319954 - DNA, 2136 bp, Artificial Sequence
  derived and/or modified sequence
cttcccggcgcgcaagccggatccggcagtgctgcggggaggagagaggacgaggcggcggcggcagcaggaggtgggggaccgatcgcgccgggggccgaagaggaacgccgccccgcgccctctcgctccccgcacgctccggctgccggccccacgctgctcgcccacagatcgcactgggttccgcttggagcgggcggaggcaccgggcccgagctgggtcggaggtcctctccgccgcctgcgcgccccaagcagaggatccgccgcggagaaccgctcccggactggaggcgcccgcggcctcgggtgcgtccgctgcgccagatctcggcctgatggacgcctggtgtggacgatgagggaagaacgtgccccccacacccaagaggtgacccctgagccagccccggatgaccctgcgacctggaacaatgcggctggcctgcatgttctcttccatcctgctgttcggagctgcaggcctcctcctcttcatcagcctgcaggaccctacggagctcgccccccagcaggtgccaggaataaagttcaacatcaggccaaggcagccccaccacgacctcccaccaggcggctcccaggatggtgacttgaaggaacccacagagagggtcactcgggacttatccagtggggccccgaggggccgcaacctgccagcgcctgaccagcctcaacccccgctgcagaggggaacccgtctgcggctccgccagcgccgtcgccgtctgctcatcaagaaaatgccagctgcggcgaccatcccggccaacagctcggacgcgcccttcatccggccgggacccgggacgctggatggccgctgggtcagcctgcaccggagccagcaggagcgcaagcgggtgatgcaggaggcctgcgccaagtaccgggcgagcagcagccgccgggccgtcacgccccgccacgtgtcccgtatcttcgtggaggaccgccaccgcgtgctctactgcgaggtgcccaaggccggctgctccaattggaagcgggtgctcatggtgctggccggcctggcctcgtccactgccgacatccagcacaacaccgtccactatggcagcgctctcaagcgcctggacaccttcgaccgccagggtatcttgcaccgtctcagcacctacaccaagatgctctttgtccgcgagcccttcgagaggctggtgtccgccttccgcgacaagtttgagcaccccaacagctactatcacccggtcttcggcaaggccatcctggcccggtaccgcgccaatgcctctcgggaggccctgcggaccggctctggggtgcgttttcccgagttcgtccagtacctgctggacgtgcaccggcccgtggggatggacattcactgggaccatgtcagccggctctgcagcccctgcctcatcgactacgatttcgtaggcaagttcgagagcatggaggacgatgccaacttcttcctgagcctcatccgcgcgccgcggaacctgaccttcccccggttcaaggaccggcactcgcaggaggcgcggaccacagcgaggatcgcccaccagtacttcgcccaactctcggccctgcaaaggcagcgcacctacgacttctactacatggattacctgatgttcaactattccaagccctttgcagatctgtactgaggggcgccgcagctggccggggccgccctgccccggtcactcacctgtgctcccgggcatcctcctgtccctggctcctcatcctgggagcaacagggctctgaggacgtgaggagccatcgctgtgggaggcagcaggccccgggtggggggcagaggcgcccagccttggatggggaccccagcccctggcctgtacctgtttcctcattccttggctgagggagaggctgagaactgggcagacacccctggagctcagccgacagttttgatgagcagggaagtctgaggcccagaggacggggggcccagcggtaagggatgtcccgcactcccttagccattgccttggaccaaaccacgtggtttgcagcttttctacgagccaggggggaggttcccttggattaaggttccaaataaagcacatggtttccagagc

SEQ ID NO: 319955 - DNA, 1275 bp, Artificial Sequence
  derived and/or modified sequence
atgaccctgagacccggcaccatgagactggcctgcatgttcagcagcatcctgctgttcggcgccgccggcctgctgctgttcatcagcctgcaggaccccaccgagctggccccccagcaggtgcccggcatcaagttcaacatcagacccagacagccccaccacgacctgccccccggcggcagccaggacggcgacctgaaggagcccaccgagagagtgaccagagacctgagcagcggcgcccccagaggcagaaacctgcccgcccccgaccagccccagccccccctgcagagaggcaccagactgagactgagacagagaagaagaagactgctgatcaagaagatgcccgccgccgccaccatccccgccaacagcagcgacgcccccttcatcagacccggccccggcaccctggacggcagatgggtgagcctgcacagaagccagcaggagagaaagagagtgatgcaggaggcctgcgccaagtacagagccagcagcagcagaagagccgtgacccccagacacgtgagcagaatcttcgtggaggacagacacagagtgctgtactgcgaggtgcccaaggccggctgcagcaactggaagagagtgctgatggtgctggccggcctggccagcagcaccgccgacatccagcacaacaccgtgcactacggcagcgccctgaagagactggacaccttcgacagacagggcatcctgcacagactgagcacctacaccaagatgctgttcgtgagagagcccttcgagagactggtgagcgccttcagagacaagttcgagcaccccaacagctactaccaccccgtgttcggcaaggccatcctggccagatacagagccaacgccagcagagaggccctgagaaccggcagcggcgtgagattccccgagttcgtgcagtacctgctggacgtgcacagacccgtgggcatggacatccactgggaccacgtgagcagactgtgcagcccctgcctgatcgactacgacttcgtgggcaagttcgagagcatggaggacgacgccaacttcttcctgagcctgatcagagcccccagaaacctgaccttccccagattcaaggacagacacagccaggaggccagaaccaccgccagaatcgcccaccagtacttcgcccagctgagcgccctgcagagacagagaacctacgacttctactacatggactacctgatgttcaactacagcaagcccttcgccgacctgtactag

SEQ ID NO: 319956 - protein, 198 aa, Artificial Sequence
  derived and/or modified sequence
MPEGAQGLSLSKPSPSLGCGRRGEVCDCGTVCETRTAAPAAPTMASPRGSGSSTSLSTVGSEGDPAPGPTPACSASRPEPLPGPPIRLHLSPVGIPGSARPSRLERVAREIVETERAYVRDLRSIVEDYLGPLLDGGVLGLSVEQVGTLFANIEDIYEFSSELLEDLENSSSAGGIAECFVQRSEDFDIYTLYCMNYP

SEQ ID NO: 319957 - DNA, 4074 bp, Artificial Sequence
  derived and/or modified sequence
atgcccgagggcgcccagggcctgagcctgagcaagcccagccccagcctgggctgcggcagaagaggcgaggtgtgcgactgcggcaccgtgtgcgagaccagaaccgcccccgccgcccccaccatggccagccccagaggcagcggcagcagcaccagcctgagcaccgtgggcagcgagggcgaccccgcccccggccccacccccgcctgcagcgccagcagacccgagcccctgcccggcccccccatcagactgcacctgagccccgtgggcatccccggcagcgccagacccagcagactggagagagtggccagagagatcgtggagaccgagagagcctacgtgagagacctgagaagcatcgtggaggactacctgggccccctgctggacggcggcgtgctgggcctgagcgtggagcaggtgggcaccctgttcgccaacatcgaggacatctacgagttcagcagcgagctgctggaggacctggagaacagcagcagcgccggcggcatcgccgagtgcttcgtgcagagaagcgaggacttcgacatctacaccctgtactgcatgaactaccccagcagcctggccctgctgagagagctgagcctgagcccccccgccgccctgtggctgcaggagagacaggcccagctgagacacagcctgcccctgcagagcttcctgctgaagcccgtgcagagaatcctgaagtaccacctgctgctgcaggagctgggcaagcactgggccgagggccccggcaccggcggcagagagatggtggaggaggccatcgtgagcatgaccgccgtggcctggtacatcaacgacatgaagagaaagcaggagcacgccgccagactgcaggaggtgcagagaagactgggcggctggaccggccccgagctgagcgccttcggcgagctggtgctggagggcgccttcagaggcggcggcggcggcggccccagactgagaggcggcgagagactgctgttcctgttcagcagaatgctgctggtggccaagagaagaggcctggagtacacctacaagggccacatcttctgctgcaacctgagcgtgagcgagagccccagagaccccctgggcttcaaggtgagcgacctgaccatccccaagcacagacacctgctgcaggccaagaaccaggaggagaagagactgtggatccactgcctgcagagactgttcttcgagaaccaccccgccagcatccccgccaaggccaagcaggtgctgctggagaacagcctgcactgcgcccccaagagcaagcccgtgctggagcccctgaccccccccctgggcagccccagacccagagacgccagaagcttcacccccggcagaagaaacaccgccaagcccggcttcaagcacgccggcagcgagggcgagctgtacccccccgagagccagccccccgtgagcggcagcgccccccccgaggacctggaggacgccggcccccccaccctggaccccagcggcaccagcatcaccgaggagatcctggagctgctgaaccagagaggcctgagagaccccggccccagcacccacgacatccccaagttccccggcgacagccaggtgcccggcgacagcgagaccctgaccttccaggccctgcccagcagagacagcagcgaggaggaggaggaggaggaggagggcctggagatggacgagagaggccccagccccctgcacgtgctggagggcctggagagcagcatcgccgccgagatgcccagcatcccctgcctgaccaagatccccgacgtgcccaacctgcccgagatccccagcagatgcgagatccccgagggcagcagactgcccagcctgagcgacatcagcgacgtgttcgagatgccctgcctgcccgccatccccagcgtgcccaacacccccagcctgagcagcacccccaccctgagctgcgacagctggctgcagggccccctgcaggagcccgccgaggcccccgccaccagaagagagctgttcagcggcagcaaccccggcaagctgggcgagccccccagcggcggcaaggccggccccgaggaggacgaggagggcgtgagcttcaccgacttccagccccaggacgtgacccagcaccagggcttccccgacgagctggccttcagaagctgcagcgagatcagaagcgcctggcaggccctggagcagggccagctggccagacccggcttccccgagcccctgctgatcctggaggacagcgacctgggcggcgacagcggcagcggcaaggccggcgcccccagcagcgagagaaccgccagcagagtgagagagctggccagactgtacagcgagagaatccagcagatgcagagagccgagaccagagccagcgccaacgcccccagaagaagacccagagtgctggcccagccccagcccagcccctgcctgccccaggagcaggccgagcccggcctgctgcccgccttcggccacgtgctggtgtgcgagctggccttccccctgacctgcgcccaggagagcgtgcccctgggccccgccgtgtgggtgcaggccgccatccccctgagcaagcagggcggcagccccgacggccagggcctgcacgtgagcaacctgcccaagcaggacctgcccggcatccacgtgagcgccgccaccctgctgcccgagcagggcggcagcagacacgtgcaggcccccgccgccacccccctgcccaagcaggagggccccctgcacctgcaggtgcccgccctgaccaccttcagcgaccagggccaccccgagatccaggtgcccgccaccacccccctgcccgagcacagaagccacatggtgatccccgcccccagcaccgccttctgccccgagcagggccactgcgccgacatccacgtgcccaccacccccgccctgcccaaggagatctgcagcgacttcaccgtgagcgtgaccacccccgtgcccaagcaggagggccacctggacagcgagagccccaccaacatccccctgaccaagcagggcggcagcagagacgtgcagggccccgaccccgtgtgcagccagcccatccagcccctgagctggcacggcagcagcctggacccccagggccccggcgacaccctgccccccctgccctgccacctgcccgacctgcagatccccggcaccagccccctgcccgcccacggcagccacctggaccacagaatccccgccaacgcccccctgagcctgagccaggagctgcccgacacccaggtgcccgccaccacccccctgcccctgccccaggtgctgaccgacatctgggtgcaggccctgcccaccagccccaagcagggcagcctgcccgacatccagggccccgccgccgccccccccctgcccgagcccagcctgaccgacacccaggtgcagaagctgacccccagcctggagcagaagagcctgatcgacgcccacgtgcccgccgccacccccctgcccgagagaggcggcagcctggacatccagggcctgagccccacccccgtgcagaccaccatggtgctgagcaagcccggcggcagcctggccagccacgtggccagactggagagcagcgacctgacccccccccacagccccccccccagcagcagacagctgctgggccccaacgccgccgccctgagcagatacctggccgccagctacatcagccagagcctggccagaagacagggccccggcggcggcgcccccgccgccagcagaggcagctggagcagcgcccccaccagcagagccagcagcccccccccccagccccagcccccccccccccccgccagaagactgagctacgccaccaccgtgaacatccacgtgggcggcggcggcagactgagacccgccaaggcccaggtgagactgaaccaccccgccctgctggccagcacccaggagagcatgggcctgcacagagcccagggcgcccccgacgcccccttccacatgtag

SEQ ID NO: 319958 - DNA, 597 bp, Artificial Sequence
  derived and/or modified sequence
atgcccgagggcgcccagggcctgagcctgagcaagcccagccccagcctgggctgcggcagaagaggcgaggtgtgcgactgcggcaccgtgtgcgagaccagaaccgccgcccccgccgcccccaccatggccagccccagaggcagcggcagcagcaccagcctgagcaccgtgggcagcgagggcgaccccgcccccggccccacccccgcctgcagcgccagcagacccgagcccctgcccggcccccccatcagactgcacctgagccccgtgggcatccccggcagcgccagacccagcagactggagagagtggccagagagatcgtggagaccgagagagcctacgtgagagacctgagaagcatcgtggaggactacctgggccccctgctggacggcggcgtgctgggcctgagcgtggagcaggtgggcaccctgttcgccaacatcgaggacatctacgagttcagcagcgagctgctggaggacctggagaacagcagcagcgccggcggcatcgccgagtgcttcgtgcagagaagcgaggacttcgacatctacaccctgtactgcatgaactacccctag

SEQ ID NO: 319959 - DNA, 4074 bp, Artificial Sequence
  derived and/or modified sequence
atgccagagggagctcaaggcctgagtctgtcgaagccatcaccttcattgggatgtggcagacggggggaagtttgtgattgtggtactgtttgcgaaacacgcactgccccagctgccccgactatggcgtcccctcgaggcagcgggagcagcacaagcttgtccaccgtagggtcagagggtgatcccgcaccaggtcctacacctgcttgtagtgcgtcgcgccccgagcccctgcccggacctcctattagactgcacctgtcacccgtgggtatacctgggtccgctaggccctcacgtcttgagagagtggccagggagattgtcgaaaccgaaagagcttatgtacgagatttgcgcagtatagtcgaagattacctgggacccctgctcgatggcggggtgctcgggttgtctgtcgagcaagtgggaactttattcgccaacatagaggatatttatgagttcagcagtgaactgctggaagaccttgaaaattcatcatccgccggcggcatcgccgagtgtttcgtacaaagatcagaggacttcgatatctatacactctactgtatgaattatcctagtagcctggccctgctgcgggagctgtccttatcaccccctgccgctctgtggctgcaggagcggcaagcccagctgcgtcatagtctgcccttgcaatctttcttgttgaaacctgttcagcgcatactaaaataccatttgctgttgcaggagcttgggaaacattgggccgaagggccaggaaccggaggaagagaaatggtcgaggaagctatcgtgtcaatgaccgcggtggcttggtacattaacgatatgaaacggaaacaagagcatgctgctcggctccaggaggtacagcggaggctgggtggatggaccggacctgagctttccgctttcggcgaattggtccttgagggagcttttcgcggaggtggaggaggcggacccaggctgcgcgggggagaacggctcctcttcctgttcagtcgaatgctgctcgtggcaaagaggagaggcttggaatatacttataaagggcacatcttctgctgcaacttgtctgtgtcagaatccccccgcgatcccctgggtttcaaagtgagcgatttaaccattccaaagcacagacatctgctgcaggccaaaaaccaggaagagaagagactctggatccattgcctgcagcgactcttctttgaaaatcatcctgcttctattcctgctaaagcgaaacaggttctgctggaaaattccctacactgcgcccccaagagtaagcccgtcctcgagccccttaccccacccctgggcagccctcgtccccgggatgcacgcagctttactcccggacggcgaaatactgcaaaaccgggctttaaacacgccggttctgaaggtgaactgtaccccccggagtcacagccacctgttagtgggagtgccccaccagaagatttagaagacgcagggccgcccactctagacccaagcggtacctctataacagaggagattctggagctgctcaatcagcgtggactaagggatccaggtccgtccactcacgatattcccaagtttcccggggatagccaagtccctggtgacagcgagacactgactttccaagccctcccatcgagagatagcagcgaagaggaggaagaagaggaagaggggttagagatggacgaacgggggccttccccactgcacgtgctggagggattagagtctagtatagccgctgaaatgcctagcattccgtgtctcacgaagataccagatgtgcccaatcttcctgagattcccagccggtgcgagatccccgagggcagccggttgccctctctgtccgacatctctgatgtgttcgaaatgccatgcctgccagcaatcccatcagtgccgaacaccccatctttatccagcacccccaccctgtcatgtgattcttggcttcaagggccactccaggagcctgctgaggcccccgctacgaggcgggaactgttttctgggtccaatccgggtaaactgggagaaccgccttccggagggaaggctggtcctgaggaagatgaggagggtgtttccttcactgactttcaaccccaagatgtgacccaacaccaaggctttccagacgaattagcctttaggtcttgctctgagatccgcagtgcgtggcaggctctggagcaaggacagctcgctagaccgggcttccccgagccactcctgatcttggaagactcggatctgggaggcgacagcggatccggcaaggctggggccccaagctcagagcgtaccgcaagccgggtcagagagttggctagattatacagcgaacggattcaacagatgcaaagagcggaaaccagggccagtgccaatgctcctaggcgccgcccccgcgtgttagcccagccccagccatcaccctgcttgcctcaggaacaggccgagcccggtctcctccctgcttttgggcatgtcctagtgtgcgagttagccttccctctgacttgtgctcaggaatcggtgcccctagggcctgctgtttgggttcaagcagcgataccactaagcaaacagggaggaagccctgatggccagggtttgcatgtaagcaacctccctaagcaggatttacccggtattcacgtgtcagccgctactctgctgccagaacaggggggttccagacacgttcaggcacctgctgcaactcctctccccaagcaggaggggcccctacaccttcaggtgccagccctgactacattttcagaccaagggcatcctgaaattcaagtacctgccactacacccctgccagagcaccgtagccacatggtgatcccagcgccatccacggctttttgccctgagcaagggcattgcgcggacattcacgtcccaacaacgcctgcactgccaaaggaaatctgcagcgatttcaccgtgagtgtgacaacgcccgtgcctaaacaggaaggccatctcgactcagaaagccccaccaacattcctctgactaagcagggcgggagccgagatgttcagggtccagatcccgtctgcagccaacctatccaacccctgagctggcacggaagcagtctggatccccagggaccaggcgatacgctgccacctctgccttgccatctgcctgatctgcaaatcccggggactagccctctccctgcccacgggtcacacttggaccaccggattccagccaacgcgccactctcactatcacaggaactccccgatacgcaggtgccagcaactacccccctgcctctgccccaggtgctgaccgacatttgggtccaggctctccctacctcgccaaagcagggatccctgcccgatatccagggcccggccgcagcgcccccgctgcctgagccatcacttactgacacacaggtgcagaagctgaccccttccttagagcaaaagtctctgattgatgctcacgtacctgccgcaaccccattaccagaaagaggtggatcactcgatatccagggcctctcgccaacaccagtgcaaactacaatggtactttctaaacctggtggcagcctcgccagtcacgtcgctcgtctagagagtagcgacctgactcctccccatagcccaccgccttcatcccgacagctgctgggtcctaatgctgccgctctgagcagatacttagccgccagctatatcagtcagtctctcgctcgtcggcaaggacctggcggtggagctccagcagccagtcgcggatcatggagctccgcgccgacctcacgggcaagttccccccccccacagcctcagccaccacccccgccagcgcgcaggttgtcctacgctactactgttaatattcatgtggggggcgggggtaggctgcgtcccgcgaaggcgcaggtgcggctgaatcatccggccttattagcgagcacacaggaatcaatggggctgcaccgggcacagggcgctcctgatgccccctttcatatgtag

SEQ ID NO: 319960 - DNA, 597 bp, Artificial Sequence
  derived and/or modified sequence
atgcccgaaggcgcacagggcttgtcacttagcaagcccagtccctccctggggtgcgggagacggggggaagtctgcgattgtggcactgtgtgcgaaacccgcaccgccgctccagccgcccctacaatggctagcccccgggggtctggaagcagcacctccctgtctaccgtgggttctgagggtgacccagcccctggacctacacctgcgtgctccgcttctcggccagaaccgttgcctggtccacccatccgcctccatctttctcctgtcggcattccaggcagtgctcggcctagcaggctggaacgcgtcgccagggaaattgtagaaactgaaagggcttacgtgcgcgacctgagatctatcgttgaggattatctcgggcccctgctcgacggaggcgtcctcggcctgtccgtggagcaggtcgggacgctgtttgccaatattgaggacatttatgagttctcctccgagcttctagaggacctagagaacagttcttctgctggtggaattgccgaatgttttgtccagagatccgaagacttcgatatttacaccctgtattgtatgaactacccatag

SEQ ID NO: 319961 - DNA, 4074 bp, Artificial Sequence
  derived and/or modified sequence
atgcctgagggcgcccagggcctgagcctgagcaagcccagccccagcctgggctgcggcagaagaggagaggtgtgtgactgtggcaccgtgtgtgagaccaggacagccccagctgcccccaccatggccagcccccggggcagcggcagcagcaccagcctgagcacagtgggcagcgagggggaccctgcccctggccccaccccagcctgcagcgccagcaggcctgagcccctgcccggcccccccatccggctgcacctgagccctgtgggcatccctggcagcgcccggcccagccggctggagcgggtggcccgggagatcgtggagacagagcgggcctacgtgcgggacctgcggagcatcgtggaggactacctgggccccctgctggatggcggcgtgctgggcctgtctgtggagcaggtgggcaccctgtttgccaacatcgaggacatctatgagttcagcagcgagctgctggaggacctggagaacagcagcagcgctgggggcattgctgaatgttttgtgcagaggtctgaggactttgacatctacaccctgtactgcatgaactaccccagcagcctggccctgctgcgggagctgagcctgagccccccagctgccctgtggctgcaggagcggcaggcccagctgcggcacagcctgcccctgcagagcttcctgctgaagcctgtgcagaggatcctgaagtaccacctgctgctgcaggagctgggcaagcactgggccgagggccctggcaccggcggccgggagatggtggaggaggccatcgtgtccatgacagctgtggcctggtacatcaatgacatgaagaggaagcaggagcacgccgcccggctgcaggaggtgcagaggcggctgggcggctggacaggccctgagctgagcgcctttggagagctggtgctggagggcgccttccggggcggcggcggcggcggcccccggctgcggggcggggagcggctgctcttcctgttcagcaggatgctgctggtggccaagagaagaggcctggagtacacctacaagggccacatcttctgctgcaacctgtctgtgtctgagagcccccgggaccccctgggcttcaaggtgtctgacctgaccatccccaagcaccgccacctgctgcaggccaagaaccaggaggagaagaggctgtggatccactgcctgcagaggctcttctttgagaaccacccagccagcatcccagccaaggccaagcaggtgctgctggagaacagcctgcactgtgcccccaagagcaagcctgtgctggagcccctgaccccacccctgggcagcccccggcccagagatgcccggagcttcaccccaggaagaagaaacacagccaagccaggcttcaagcacgccggcagcgagggggagctgtacccacctgagagccagccccctgtgtctggcagcgcccctcctgaggacctggaggatgctggcccccccaccctggaccccagcggcaccagcatcacagaggagatcctggagctgctgaaccagaggggcctgcgggaccccggccccagcacccatgacatccccaagtttcctggggacagccaggtgcctggggacagcgagaccctgaccttccaggccctgcccagccgggacagcagcgaggaggaggaggaggaggaggagggcctggagatggatgagcggggccccagccccctgcacgtgctggagggcctggagagcagcattgctgctgagatgcccagcatcccctgcctgaccaagatcccagatgtgcccaacctgcctgagatccccagccgctgtgagatccctgagggcagccggctgcccagcctgagtgacatcagtgatgtgtttgagatgccctgcctgcctgccatccccagcgtgcccaacacccccagcctgagcagcacccccaccctgagctgtgacagctggctgcagggccccctgcaggagcctgctgaggccccagccacccggcgggagctgttcagcggcagcaaccctgggaagctgggggagcccccatctgggggcaaggccggcccagaagaagatgaggagggcgtgtccttcacagacttccagccccaggatgtgacccagcaccagggcttcccagatgagctggccttccgcagctgcagcgagatccgcagcgcctggcaggccctggagcagggccagctggcccggcccggcttccctgagcccctgctgatcctggaggacagcgacctgggcggggacagcggcagcggcaaggccggggcccccagcagcgagaggacagccagccgggtgcgggagctggcccggctgtacagcgagcgcatccagcagatgcagagagctgagacccgggccagcgccaatgccccccggcggcggccccgggtgctggcccagccccagcccagcccctgcctgccccaggagcaggccgagcccggcctgctgcctgcctttggacatgtgctggtgtgtgagctggccttccccctgacctgtgcccaggagagcgtgcccctgggccctgctgtgtgggtgcaggccgccatccccctgagcaagcagggcggcagcccagatggccagggcctgcacgtgagcaacctgcccaagcaggacctgcccggcatccacgtgtctgctgccaccctgctgcctgagcagggcggcagcagacatgtgcaggccccagctgccacccccctgcccaagcaggagggccccctgcacctgcaggtgcctgccctgaccaccttcagtgaccagggccaccctgagatccaggtgcctgccaccacccccctgcctgagcacaggagccacatggtgatcccagcccccagcacagccttctgcccagagcagggccactgtgccgacatccacgtgcccaccaccccagccctgcccaaggagatctgcagcgacttcaccgtgtctgtgaccacccctgtgcccaagcaggagggccacctggacagcgagagccccaccaacatccccctgaccaagcagggcggcagcagagatgtgcagggccctgaccctgtgtgcagccagcccatccagcccctgtcctggcacggcagcagcctggacccccagggccctggggacaccctgccccccctgccctgccacctgcctgacctgcagatccctggcaccagccccctgcctgcccacggcagccacctggaccaccgcatcccagccaatgcccccctgagcctgagccaggagctgcctgacacccaggtgcctgccaccacccccctgcccctgccccaggtgctgacagacatctgggtgcaggccctgcccaccagccccaagcagggcagcctgcctgacatccagggccctgctgctgccccacccctgcctgagcccagcctgacagacacccaggtgcagaagctgacccccagcctggagcagaagagcctgattgatgcccacgtgcctgctgccacccccctgcctgagcggggcggcagcctggacatccagggcctgagccccacccctgtgcagaccaccatggtgctgagcaagccaggcggcagcctggccagccacgtggcccggctggagagcagtgacctgaccccaccccacagccccccacccagcagccggcagctgctgggccccaatgctgctgccctgagccgctacctggccgccagctacatcagccagagcctggcccggcggcagggccctgggggcggggccccagctgccagccggggctcctggagcagcgcccccaccagccgggccagcagccccccaccccagccccagcccccacctcctccagcccggcggctgtcctatgccaccaccgtgaacatccacgtgggcggcggcggccgcctgcggcctgccaaggcccaggtgcggctgaaccacccagccctgctggccagcacccaggagagcatgggcctgcaccgggcccagggcgccccagatgcccccttccacatgtag

SEQ ID NO: 319962 - DNA, 597 bp, Artificial Sequence
  derived and/or modified sequence
atgcctgagggcgcccagggcctgagcctgagcaagcccagccccagcctgggctgcggcagaagaggagaggtgtgtgactgtggcaccgtgtgtgagaccaggacagctgccccagctgcccccaccatggccagcccccggggcagcggcagcagcaccagcctgagcacagtgggcagcgagggggaccctgcccctggccccaccccagcctgcagcgccagcaggcctgagcccctgcccggcccccccatccggctgcacctgagccctgtgggcatccctggcagcgcccggcccagccggctggagcgggtggcccgggagatcgtggagacagagcgggcctacgtgcgggacctgcggagcatcgtggaggactacctgggccccctgctggatggaggagtgctgggcctgtctgtggagcaggtgggcaccctgtttgccaacatcgaggacatctatgagttcagcagcgagctgctggaggacctggagaacagcagcagcgctgggggcattgctgagtgctttgtgcagaggagtgaagattttgacatctacaccctgtactgcatgaactacccctag

SEQ ID NO: 319963 - DNA, 4074 bp, Artificial Sequence
  derived and/or modified sequence
atgcccgagggcgcccagggcctgagcctgagcaagcccagccccagcttaggttgtgggcgtaggggagaagtgtgtgactgcgggactgtgtgcgagacccggactgccccagccgcacctaccatggccagtccgcgggggtcaggctcgtctactagtcttagcacagtgggaagtgagggggatccggcccccggaccaactccagcttgctctgcatctcggccagaacctctacctggtccacctatccgtttgcacctatctccagtgggtatccctggctcagcgagaccctctcgtctggaacgagtggccagggaaattgtggagacggaaagagcttatgtgagagatctcagatccattgttgaagactacctaggaccactcctggatggcggcgtactcggattgtcagttgaacaggtgggcaccctattcgctaacatcgaagacatctacgaattcagcagtgagctgttagaagacctggagaactcatcgtctgccgggggcatcgccgagtgcttcgtgcagaggagtgaagacttcgatatatacactctgtattgcatgaattatccatcatcattggcgctgctcagggagttgagcctgtccccacccgccgctctatggctgcaggaaagacaggcccagctgagacactctctgcctctccagagctttctgcttaagcccgtgcagcgaattctcaaataccacctgcttctacaggagctgggcaagcactgggctgagggcccaggcaccggcggcagggaaatggtggaagaggccattgtttccatgacggccgtggcctggtacatcaatgatatgaaacgaaagcaggagcacgcggcgagactgcaggaggtacaacggcgtctcggaggctggacaggaccagaattgagcgctttcggtgagttggtgctcgagggagcattccgaggcggaggcggtgggggccctcgactcagggggggcgagcggctgctatttctcttcagtaggatgctcctggtggctaagcgacggggtctggagtacacctataagggtcatattttctgctgcaatctctccgtcagcgagtccccgagagatcccctcggtttcaaggtaagtgacctcaccatccccaagcatcgccatctgctccaggccaagaaccaggaagagaagcgactctggattcactgccttcagcggctgttcttcgagaaccaccctgcgagcattcctgcgaaggccaaacaggtattgttggagaactccctgcattgcgcccctaaatcaaagccagtgctggagccgctgacacctcctctcggctcccctaggcccagagacgccagatcttttaccccgggaagacggaacacagcaaaacccggcttcaagcatgcaggttcagagggggagctgtacccaccagaaagccagccacccgtttctgggagtgccccccctgaagatctcgaggatgcaggccctccgaccctcgacccaagcgggactagcatcacagaggaaatcctggaactcctcaatcagagaggcctgcgcgatcccgggccaagcactcacgacatccctaagtttcccggcgatagccaagtgcccggtgactccgagacactgaccttccaggctttaccaagccgagactcctccgaagaggaagaggaggaagaagagggtctggaaatggacgagaggggcccgtcccccctgcatgttctcgaagggttggagtcaagtatcgctgcagaaatgccgtcaatcccctgcttaacaaagatcccagacgtgcctaatctcccagaaatcccatctcgctgtgaaatacctgagggctcacgcctgccctctctgagcgatatcagtgatgtcttcgagatgccatgtcttcccgcaattcctagcgtgcccaacacaccctccctgtcttcgactcctaccctcagctgtgatagctggctgcagggccctctccaagagcccgccgaagcaccagccacgcgacgggaactgttttccggcagtaatcctggaaagctgggagagcccccttcaggggggaaagctggccccgaggaggatgaggagggcgtatcctttacggatttccaaccgcaggatgtcacgcagcaccaaggctttccggacgaacttgctttccgctcttgtagcgagattagaagcgcatggcaagccctggagcaggggcagcttgcgaggcctggattccctgagccccttctcattctagaagactctgatctgggaggtgactctggcagcggaaaagcaggggccccatcaagtgaacgcaccgcgtcgagagtgcgagaactggctcgcctgtattccgagcggattcagcagatgcagcgcgctgagacccgcgcgtctgctaacgccccaagacggaggcccagagtgctggcccaaccacagccttctccttgtttaccacaggagcaggccgaaccgggcctgctgcctgcattcggacatgttctcgtgtgcgaattagcttttccactcacttgtgcacaagaatccgtgccacttggacctgccgtctgggtgcaagcggctatcccactcagcaagcagggtgggtctcccgacgggcagggcttgcacgtaagcaatctgcctaaacaggacctccctggcattcacgtgtctgctgccacacttctgcccgagcagggcggctcaagacacgtgcaggccccagcagcaacacccctgcccaagcaagaagggccgctacacttacaggtgcccgcactgaccactttctctgatcagggccatcctgagatccaggtgccagcaactactccgctgccagaacaccgttcacatatggtgattcctgcgcctagcaccgccttctgccccgagcagggacattgcgctgacatacatgttcctacaacaccggccctccccaaagaaatctgctcggattttacagtctcagtgacaacccccgtgcccaagcaagagggacacctcgattcagagtcgccaacgaatattcccctcaccaagcaaggggggtcccgggacgtacaggggcccgacccagtttgttcacagccgatacagccactctcttggcacgggtcttctctggacccgcaagggcctggcgataccctgcctcctctgccatgtcacctgccggacttgcagatcccaggcacttcgcctctccccgcccacggctctcatttagatcaccgtattccggccaacgcgccattgtctttgagccaggagcttcctgacacacaagtgcctgcaacaacccctctcccactcccccaagtgctgaccgacatctgggtgcaggccctgccaacatcacccaaacagggcagtctccctgatatccagggccccgccgctgcaccaccattaccagaaccgagcctaactgatacccaggtacaaaagctcacacccagccttgaacaaaagagtcttattgacgcccatgtgccagctgcaacaccgctcccagaaaggggagggtctctggacattcagggtctctctccgactcccgttcaaaccacgatggtcttaagtaaacccggtggctccctcgcttcccacgtggcgcgcctggagtctagcgacctgacacctcctcactctccccctccaagcagtcgccagctgctggggcctaacgcagccgctttatccagatacctcgccgcctcatacattagtcaaagcctggcacggagacagggtccaggagggggtgcccctgcagcttcaaggggcagctggtccagcgccccaacctccagggccagcagtccccctccccaaccccagccaccccctccacctgctagaagactttcgtatgcaacgaccgtgaacattcatgtaggggggggaggtaggctccggcccgccaaagcgcaggtcagactgaatcacccagcattgcttgcatccacacaagagtccatgggtctgcaccgtgcccagggggcgccagatgctccattccacatgtag

SEQ ID NO: 319964 - DNA, 597 bp, Artificial Sequence
  derived and/or modified sequence
atgcccgagggcgcccagggcctgagcctgagcaagcccagcccctctctcgggtgcggccggcggggcgaggtttgcgactgcggcacagtctgcgaaacccggaccgccgccccagctgcccctacgatggcctcgccgcggggcagtggaagctctaccagcttgagcacagtcggctctgaaggcgaccctgcccccggaccaaccccagcatgtagtgcatcccggcctgagcctctcccgggcccccctattcgcctgcatctatcacccgtgggcatcccagggtctgctcgcccttcacggctggaacgggttgcccgcgagatcgtcgagaccgaacgtgcctacgtccgggacctgaggtccatcgtggaggactacctgggcccacttctggatgggggtgttctgggccttagcgtggagcaggttggaaccctgtttgccaatattgaggacatctatgagtttagctccgagctgctggaggaccttgagaactcctcttctgccgggggcatcgctgagtgttttgtgcagcgctccgaggacttcgatatttacactctctattgcatgaattacccgtag

SEQ ID NO: 319965 - DNA, 4074 bp, Artificial Sequence
  derived and/or modified sequence
atgccggaaggggctcaggggctcagcctgtcgaagcccagccctagtctgggttgcggaaggagaggcgaagtctgtgactgcggtaccgtctgcgagacacgtactgcacccgcagcaccaacaatggcctcacccagaggttcagggtctagtacctctcttagtactgtcgggtctgagggagaccctgctcccggacccacccctgcatgctcggccagtcgacctgagccactgcctggcccacccatccgactgcacctgtctccagtgggcattcctgggagcgcaaggccctcacgcctggagagagtggcacgtgagattgtggagaccgagcgcgcatacgtcagggatttaagatctattgtggaagactatctgggtcccttgctggacgggggtgtgctcggccttagtgtggagcaggtcgggacgttattcgctaatatcgaggacatttacgagttctccagcgagctgctggaggatctggaaaactcaagcagcgccggaggaatcgcagagtgctttgtgcaacggtcagaggactttgacatctacaccttgtactgcatgaattaccccagttctctagccctgttgcgggaactcagcttatcaccccctgctgccctgtggcttcaggaaaggcaagcccagctgcgccattccttgccactccagtctttcctactgaagcccgtgcagaggattctgaagtatcatcttctcctgcaggaattgggtaaacattgggctgaaggaccgggtactggtgggcgtgaaatggttgaggaggctatcgtgtccatgacggcggtggcatggtacattaacgatatgaaaaggaaacaggagcatgccgctcggctgcaggaggtacagcgacgactgggcggatggaccggcccagagctgagtgcttttggagaactggttctcgaaggcgcttttcgaggcggaggtggtggcggtccacggctacgtgggggtgagcgactcctctttctcttctcccgaatgcttcttgtggctaagagaagaggtctcgagtatacgtataaaggtcatatcttctgctgtaatcttagcgtatccgaaagtccacgagatcccctggggttcaaggtgagcgacctaaccatcccgaagcatcgtcatctgctccaggccaaaaaccaggaggaaaaacgactgtggatccactgcttacagcgattgtttttcgaaaaccatcccgcttctatcccagcaaaagccaaacaggtattacttgaaaattcgttacactgcgctccgaagagcaaaccagtgttggaaccgctcacaccgcctctgggttctcccagacccagagacgcacgttcctttactcccggtaggcggaacacagcgaaacctggcttcaagcacgcaggctctgagggggaattatatcccccagaatcccagccacctgtgagtggcagcgcccctcctgaagacttggaggacgcgggacccccaaccctggatccttctggaacttctattaccgaagaaatattggagctgctgaatcagagagggctgagggaccctggccctagtacccatgatataccgaagttccctggcgacagccaggtacccggagatagcgagacgctgaccttccaggcgctcccaagcagggacagttcagaggaagaagaagaggaagaggagggcctggagatggatgagcggggacctagcccactacacgtcctggagggtcttgagtcctcaatagccgcagagatgccttctattccctgtctgacaaaaatccctgacgtgccaaacctgccggagatcccctcaaggtgcgaaattccagagggctcccggctcccctccctgtcggacatatccgacgtgttcgaaatgccgtgtctacccgctatcccttccgtccccaacactcccagcttgagttccacacccaccctgagctgtgacagctggcttcagggcccattacaagagcccgcagaggctcctgctactaggagagaactgttttctggcagcaatcctgggaagttgggcgaacccccttcgggtggtaaagctggtcctgaggaggatgaggaaggagtctctttcacagacttccaaccgcaggatgtaacccagcaccagggcttcccggatgaattggcttttcgctcctgttccgaaatccgcagtgcatggcaagcactcgaacaggggcagctcgctcgtccaggatttcccgaaccactcctgatactggaggacagcgacctcggcggagacagtgggtctggcaaagcgggagccccatcatcggaacgcacagctagtagagtgcgcgagctagcaagactatattccgagagaattcagcaaatgcagcgagctgagacccgagcctctgcaaacgcaccaagaagacggcctcgcgtcctagctcagccacagcccagtccctgcttgccacaggaacaagcagaaccaggacttctccctgccttcggccatgtgcttgtctgcgagctggcctttcctctgacctgcgcacaggaatccgtgcctctcgggccagctgtatgggtgcaggccgcaattcctctgagtaagcagggaggctctcctgatggccaaggattgcatgtgtctaacctccccaaacaggacctgccgggtatccacgtaagcgctgctacgttgctccccgaacaggggggttcccgccatgtccaggctccggcagccactcccctccctaagcaggagggccctcttcatctgcaggtccctgcactcacaaccttttccgaccaagggcaccccgaaatccaggtgcccgctacaaccccccttcccgagcaccgctctcatatggtcatcccagcacccagcaccgcattctgcccagaacaggggcattgtgccgacatccatgtcccgaccacaccagcgctgcccaaggaaatatgctccgattttacggtgagcgtgaccacaccagtcccgaaacaggaaggccacctcgactcggaatcccccacgaacatcccactgaccaagcagggcggatcccgagatgtacaaggcccagatcctgtgtgctctcaaccaatacagccattaagctggcacggcagttcactcgaccctcaaggccctggcgacaccctcccacctctgccctgccaccttcctgatttacaaatacccggaacttcacctctccccgctcatgggtcccacctggaccaccggataccagcgaacgctcccttatccctgtctcaggaattgcctgatacacaggtgcctgcaaccaccccactgcctctcccacaagtgctcaccgatatatgggtccaagcgctgccaacatcccctaagcagggtagtttaccggatatacaggggccagcggcagcaccacccttgccagagccaagcctgacggatacccaggtccaaaagctcaccccgtccttggaacagaaatctctgattgacgctcacgtgcctgccgctacacctctcccagaacgagggggtagcctggacatacagggtctgagccccacccccgttcagactacaatggtactgtctaagccgggaggcagtcttgcaagccacgtagcacgtcttgaatcaagtgatcttactcctccccactccccgcctcctagcagcagacagctactgggacctaacgccgcagccttgtcaagatacctggccgcttcatacatctctcagagcttggcgagaagacagggccctggcggtggggctcctgccgcaagtcgaggctcttggtcgtccgctcccacctctagggcttcaagccctccaccccaaccacagccacccccacccccagccagaagacttagttacgccaccactgttaatatacacgtcggaggcggaggccgtctccggccagcgaaggctcaggttaggctcaaccaccccgctctcttggctagtacccaggaaagtatgggccttcacagggcccagggcgctccggacgccccatttcatatgtag

SEQ ID NO: 319966 - DNA, 597 bp, Artificial Sequence
  derived and/or modified sequence
atgcctgagggagcccagggattgagtctgtccaagcctagtccgagtttgggctgcgggaggagaggggaggtgtgtgattgcggcacagtttgtgagacacggaccgcagcgccagccgcaccaactatggcctcaccaagaggctcaggatccagcaccagtctgagcacagtcgggtccgaaggagatcctgcaccaggccctactccggcttgtagcgcgagtcggccagagccactgcccggacccccaattcgtttacacctatcacctgtgggaatcccagggagcgcccgtccaagcagattagaaagggtggcacgcgaaatagtagagacagagcgggcatacgtgagagacctgagatccatcgtggaagactatctcggaccacttctggatggaggggttctcggtctatcagtggagcaagtgggcactctgttcgctaacattgaggatatctacgaatttagcagcgaattgctggaggatctggagaatagctcaagcgccggaggaatcgctgagtgctttgttcagcgctctgaagactttgacatatacaccctgtactgtatgaattacccttag

SEQ ID NO: 319967 - DNA, 7519 bp, Artificial Sequence
  derived and/or modified sequence
gaattaggggaactcagaaatccatcccccaccccacggccctacctagaagacttaggaatgtgggtccccagcgccgccatctgagactccagagtcgaggctcctagcatcccctacgtagaacactgagaaattccgactgcgggaccccagtctccgagagaccccagattctattcctggagcctgagagcccgaagttcacgcccctgagtctgggctccgcacctccctggggaccgcgtcggggtcgcgcaggagccgggctgcctcgagccggggctggaggctccccgggaggactctgctgggccgctcagccatgcctgagggagcccaaggactgagcctctccaaacctagcccaagcctcgggtgtggccgaagaggtgaagtgtgtgactgtggcaccgtgtgtgagactcggacagctcctgcagcccccaccatggcctccccccgaggttctgggagctccacatccctgagcacagtgggctctgagggggatccagcccctgggcccactccagcctgctcagcctccaggccagagccccttccagggcctcccatccgcctacatctctctccggtggggatcccaggttcagccagaccctcaaggctggagcgtgtggcccgggagatcgtggagacagaacgggcctatgtcagggacctccgcagcatcgtggaggactacctgggccctctgctggacggcggggtcctggggctgagcgtggagcaggtgggcacgctgtttgccaacattgaggacatctacgagttcagcagcgagctcctggaggacttggagaacagcagcagcgccgggggtattgccgagtgcttcgtgcagaggagcgaggattttgacatctacacattgtactgcatgaactacccgagctccctggccctgctccgggagctgtcgttgtctccgccagcagccctgtggctgcaggagcgccaggcccagcttcgccactcgctgcccctgcagagcttcctgctgaaacctgtccagcgcattctcaagtaccatctgctgctgcaggaactagggaagcactgggcggagggcccaggcactgggggtcgcgagatggtggaggaagctattgtgtccatgacagcggttgcctggtacatcaacgacatgaagcgcaagcaggagcatgcagcgcgcctccaggaagtgcagcggcggctgggtggctggaccggaccagagctcagtgcttttggggaactggtgttggagggcgcgttccgaggaggcggagggggtggcccccggctacgagggggtgagcggctgctcttcctgttctctcggatgctgctggtggccaagcgcagggggctggagtacacctacaaaggccacatcttctgctgcaacctgagcgtgagcgagagtccccgagaccctctagggttcaaggtgtctgatctgaccattcccaagcacagacacctgctccaggccaagaaccaagaagagaagaggctgtggattcactgtctccagcgcctcttctttgagaaccaccctgcctccatccctgccaaggcaaagcaagttctccttgaaaacagcctgcattgtgcccccaaaagtaagcctgtcctagagcccctgacacccccacttgggtctcctcgacctcgagatgctagaagttttacccctgggcgaaggaacacagctaagcctggattcaagcacgctggcagcgaaggggaactctaccctccagaatctcagccaccagtttcaggctctgcaccccctgaggacctggaggatgctggacccccaacactggacccctctgggacctcaatcactgaagaaatcctggaactgctgaatcagcgaggccttcgagatccagggccgtccacccatgacattcccaagttccccggagactcccaggtgcctggcgacagcgaaaccctcacattccaagccctgcccagccgggactcttcagaagaggaggaggaggaagaggaagggctggagatggatgaacgggggccttccccactccacgtcctggaagggctcgaaagttccattgcagctgaaatgcccagcattccctgccttaccaaaattcctgacgtgcccaaccttcctgaaattcccagccgctgtgaaattcccgaaggttctcgccttcctagtctctctgacatttccgatgtttttgagatgccctgccttccagccatacctagtgtccccaacacccccagtctgtctagcactcccaccctctcctgtgactcctggctccaagggcctctgcaggaaccagctgaggctccagccaccaggagagaactgttttctgggagcaatcctgggaaactgggagagccgccttcaggaggcaaggcagggccagaggaggatgaagaaggggtatcattcacagacttccagccccaggatgtcacccaacatcagggattcccagatgagctggcattccgctcttgctcagaaatccggagcgcctggcaggcattggaacagggacagctggcccggccaggcttcccagagccactgctgatcctggaggattcggatctgggtggagacagcgggagcgggaaggcaggagccccgagttcagaaaggacggcgtcccgagtgcgagagctggcccggctttacagcgagcggatccagcagatgcagcgggcggagactcgggcatcagccaatgccccgcgccgccggcctcgggttctggcccaaccccagccatccccctgtctgccccaggagcaggcagagccagggctcctgcctgcctttggacacgtgctggtatgtgagctggccttcccactgacatgtgcccaggagtctgtccccctgggtcctgctgtctgggttcaagctgccatacctttgtcaaagcagggaggcagcccggatggccagggtctacatgtttccaatttgcctaagcaagaccttccgggcatccacgtttcagctgctacccttttgcctgagcaaggaggttcccggcatgtccaggctccagccgccacacctttgcccaagcaagaaggccccctgcacctccaggtgccggctcttacaactttctctgatcaaggccacccagaaatccaagttccagccaccactcctttgcctgagcatagaagtcacatggttataccagctccatccaccgccttttgtcctgagcagggacactgtgcggacatccacgttcccaccactccagctttgcccaaggagatttgttctgatttcacagtttcagtcaccacccctgtgcccaagcaagaaggtcacctagacagcgagagcccaaccaatatcccactgacaaagcaaggaggttccagggatgttcagggcccagaccctgtctgcagtcaacccatccagcctttgtcttggcatggaagcagcctggatccccagggcccaggcgacaccctaccacccttgccatgtcacctcccagaccttcagattccaggtacctcacctttgcctgcacatggaagccacctggaccatcggatcccagccaacgccccactgtctttgtcccaggagctcccagacactcaggttccagctaccacacctttgcccctgccacaagtcctcacagacatctgggtccaagccctcccaacttcacccaagcagggaagcctcccagacatccagggtccagcggctgcacctccacttccggagccaagccttacagatacacaggtccaaaaactcacaccttcgttggagcagaagagcctcatagatgcccatgttccagctgccacacctttacctgagagaggaggctctctagacattcagggcctctcacccaccccagttcagaccaccatggttttgtccaaaccaggaggctccttagcctctcacgttgccaggttggagtcttcagacttgacgccacctcatagtcccccaccttccagccgtcagctcctgggccccaatgcagctgccctctccagatacctggcagcctcatatatcagccagagcctggctcggcggcaggggcctgggggaggggcccccgcagcctcccggggctcctggtcctctgctcccacgtcacgggcatcttcgccgcccccccagccccagccaccacctcccccagccaggcggctcagctatgccacgacggttaacatccacgtgggcgggggtgggcggctgcggccagccaaggcccaggtccggttgaaccaccctgctctcttggcctccacacaggaatctatgggccttcacagggcccagggggctcctgatgcccccttccacatgtgagccaggacatgaggcttccctgaagcaaggatttcagccagatgccatagaccctcagaacttgacctggaagtccagacactgaacgcaggcctcaaaactgctgcggccttccaactcctggtatctgcatcggcgaatggcccttcttgccttgatccacagggatggggaagggaggaatgtcattaatgttttgttaatactgattctttcatgcaatgatgtgtattttcccattctggaggctgtgggagatgacaagacaatgaatgggaaggtctgacacagaacaaatcagcggttctgaaagcttggggaatctcagactcctttgagaattattggaaaatggacccactataacttggcgtgtgtgtgaactgcttgatgcccatccaggaaagccaagttaagaagctttgcttcaagtagacactagaaatccattcccttggcaatttatacagttcacgtctcccaccatccgttcatctcacccaccctgccatctctccacctatccatctggctattgctccatctagctttcccgctccatctacccatcttccaatccatcatctcacgtatctgccttgcttatccaactgtctgccttattcacccacccatccctttatcattctaaccccatctggcattccatccctccatttatccatcttcccacttacccatcttctccatccagcactccgttcatcagtccgtctctccctccatatttccatctgtccattcatccactcattttgccatccatacatattcacccagccatctcccaatccatcgacataccccatccctccctcactggactctccggggtcttagtactatgatacttcagagacaattccatgctgatacgggggagatcaattttggggctctgggataagtctgtcccacatctgtctgatttcccttggcatccttcccgtcagttcctcttgaatatcccagttcttgtacccactcacatacctcagatcccttcactcctccccgcagtttgcagcctctacaattcatccacatgctccctcccccagcaaaataattcaggtcgtggagacaaaaggcttttatgttaggttctgtctgcccccttgttccagcagtggtatgcccagtgagaggcacaatttaaacggtttctttggtgatgatattagctactttcatcaaatacttagcctcttgtgctttagcacattatttatgtaagctcccctaggattctctgaagcaccctggtgtcctggctgtgaattcaagtcccatctttacttatttggtgtgggtcctccctctgagccggttttctcatctacaaaatgaagacaacagtacttccctcctgggatcattgaaagatttagggagcatatccttccacttcccaaacatatttgaacctctgacttgcttaggagcatcattcaaatcacagatcccccagtatctagtcccaacctattgaatcaggatccccagggaaggaggagcttgggaatctgatttttttttttttttttagataaagtctcactctgtcacccaggcttgagtgcagtggcaaaatcttggctcattgcaacctccacctcctgggttcaagcaattctcatgcctcagcttcccgacatagctgggattataggcgtgcaccaccatgcccagctaatttttcgttgttgttgttgttgttttgtttttgagacagagtctcgctctgttgcccaggctggagtacagtggcacgatcttggctcactgcaagctccgcttcccgggttcacgccattctcctgcctcagcctcccgagtagctgggaccacaggtgcccgccaccacgcccggctaatttttttggtatttttagtagagacggggttttaccatgttagccaggatggtctcgatctcctgacctcgtgatcctcccgcctcggcctcccaaagtgctggcattacaggcgtgagccatcattcctggctgggaatccgaatttttttttttttttagacggagtttcgctcttgttgcccaggctggagttcaatagcatgatctcggctcactgcaacctctgcctcccaggttcaagtgattctcctgcctctagctgggattgcaggcgcccacgaccacgcccagctaatttttgtattttgtagtagagacgggatttcgccatattggccaggccatagtggtcttggactcctgacctcaggtgatccgcccacctcggcctcccaaagtgttgggtttacaggcgtgagctaccataccctgcccaggaatctgaatttttagcaatcagttagcagcaaataagctgagatttcctgggtactaagcacatactatgagcattacagccgctttatataagctcgttcactgtcctcattacattcctaatatgcaagtgagcatgttttttaatcctcagtctagaggtgaggaaactgaggcaggcacagagaggctaagggatttgcctagtcgcacagctaggaaggtgcagcactgagactcgaatccacacagcttggcttaagtctaccattaaatttgcctgtcctggccaggtgcggtggctcacgcctgtaatcccaacacttcgtgaggccaaggcaggtggatcacttgaagtgaggagttcgagaccacaccagcctggccaacatggtgaaatcccgtctttactaaaaatacaaaaaattagctgggcgtggtggtgggtgccggtaatcctagctactcaggaggctgaggcaggagaatcacttgaacctgggaggtggaggttgcagtgaaccgagattgcgccactagactccagcctgggagacgagcaaaactgtctcaaaaaaataaaatgaaatacataaataaatgtgcctatcctgtgccgggtgctgttcttgccagtggggatacatgagagaacactgccttgcccgcatgaggcttgtggcctggtactgtgcacacctcaggggattctgataattagctgagcacagttgccagcacagggcctggctcaataaatattagctgctggcttctgctc

SEQ ID NO: 319968 - DNA, 800 bp, Artificial Sequence
  derived and/or modified sequence
tttcgccaggttctctctccttgtccccttctttctgtcactttgtgcctcccccattagttactcccaggggcccctccctggatttacaccacgctcctaattcccagcccccatctgtgagtctgggcggcggagaggcccatggggtcctgatatccaagaaggggctctttctgcaggactctgctgggccgctcagccatgcctgagggagcccaaggactgagcctctccaaacctagcccaagcctcgggtgtggccgaagaggtgaagtgtgtgactgtggcaccgtgtgtgagactcggacagcagctcctgcagcccccaccatggcctccccccgaggttctgggagctccacatccctgagcacagtgggctctgagggggatccagcccctgggcccactccagcctgctcagcctccaggccagagccccttccagggcctcccatccgcctacatctctctccggtggggatcccaggttcagccagaccctcaaggctggagcgtgtggcccgggagatcgtggagacagaacgggcctatgtcagggacctccgcagcatcgtggaggactacctgggccctctgctggacggcggggtcctggggctgagcgtggagcaggtgggcacgctgtttgccaacattgaggacatctacgagttcagcagcgagctcctggaggacttggagaacagcagcagcgccgggggtattgccgagtgcttcgtgcagaggagcgaggattttgacatctacacattgtactgcatgaactacccgag

SEQ ID NO: 319969 - DNA, 1026 bp, Artificial Sequence
  derived and/or modified sequence
atggaacaggctctgcaccgcttcggccgcggtctcgtatggctctccgtggcctggctcagcgtcggccgtgtgagggtgcgggacgacggggataccgggcgtggattctgtcgcgcaggccccgtgctcacaagaggaccttctggtgattcatcacctctgccgctgccaaccagtgtcacggctgcctacaaacacgctgacgggaagaagatagatggtcgtagggtgctagtcgacgtggagcggggccgcactgttaaagggtggcgcccaagacggctgggaggcgggttgggcggcactagaagaggtggcgccgacgtcaacatcagacactccgggcgagatgatacctctcggtatgacgagcgtcctggaccttcccctctcccccatagagaccgcgatagagatcgcgagcgcgagagacgtgagcgaagtcgtgaacgagacaaggagagagaaaggaggcgttcccggtcccgagataggcgccgtcggagcagaagccgagataaggaagaaaggagacggtccagggagcggagcaaggataaagacagggatagaaagcggcgcagctcccggtcaagggagagagcgcgtagagaacgcgaacggaaagaagagctgagaggaggaggaggcgatatggccgagccaagtgaggccggggatgctcctcccgatgatggtccgcccggagagttggggccagatggtcccgatgggcctgaggagaaaggtagggacagggatcgcgaacgccggcgcagtcacagatccgaacgtgaaagacgccgtgatagggacagagaccgtgatagagaccgcgagcacaagcgtggcgaaagagggagcgaaagagggcgagatgaagcccgcggggggggaggtggccaagacaacggactcgaaggactagggaacgattcaagagatatgtacatggagtctgagggaggcgatggttacctggcaccggaaaatggataccttatggaagcggctccagagtag

SEQ ID NO: 319970 - DNA, 1026 bp, Artificial Sequence
  derived and/or modified sequence
atggagcaggccctgcaccgcttcggccggggcctggtgtggctgtctgtggcctggctgtctgtgggccgggtgcgggtgagagatgatggagacaccggccggggcttctgccgggccggccctgtgctgacccggggccccagcggggacagcagccccctgcccctgcccacctctgtgacagctgcctacaagcatgctgatggcaagaagattgatggccggcgggtgctggtggatgtggagcggggccgcacagtgaagggctggaggccccggcggctgggcggcggcctgggcggcacccggcggggcggcgcagatgtgaacatccgccacagcggcagagatgacaccagccgctatgatgagaggcctggccccagccccctgccccaccgggaccgggaccgggaccgggagcgggagcggcgggagaggagccgggagcgggacaaggagcgggagaggagaagaagccgcagccgggacagaagaagaagaagccgcagccgggacaaggaggagaggagaagaagccgggagaggagcaaggacaaggaccgggacaggaagaggaggagcagccgcagccgggagcgggcccggcgggagcgggagaggaaggaggagctgcggggcggcggcggggacatggccgagcccagcgaggccggagatgcccccccagatgatggccccccaggagagctgggcccagatggcccagatggccctgaggagaagggccgggaccgggaccgggagaggagaagaagccacaggtctgagcgggagaggagaagagaccgggaccgggaccgggaccgggaccgggagcacaagagaggagagcggggcagcgagcggggcagagatgaggcccggggcggcggcggcggccaggacaatggcctggagggcctgggcaatgacagccgggacatgtacatggagagcgagggcggagatggctacctggccccagaaaatggctacctgatggaggccgcccctgagtag

SEQ ID NO: 319971 - DNA, 1026 bp, Artificial Sequence
  derived and/or modified sequence
atggagcaggccctgcaccggttcggccggggcctggtgtggctgagcgtggcctggctctctgtgggcagggtcagagtccgtgacgatggcgacactgggcgcggcttctgtagagctggccccgtgctcacacgagggccctctggggactctagtcctctccccctccctacatctgtgacggctgcctacaagcacgccgacggcaagaaaatagatggcagaagagtgctggtcgatgtggagagaggtcgtactgtgaagggatggcggccgcggcgactcggcggagggctcggggggacccgaagggggggcgcggatgttaatatccggcacagcggccgcgatgatacatccagatacgacgaacggccaggaccaagccccctgccacacagagaccgggatcgggacagagagcgcgaaagaagggagcggagccgcgagcgcgataaggagcgagaacgcaggcggtctcgctcccgtgacaggagacgtcgttcacggagccgggacaaggaggagagacgacggagccgcgagaggtctaaagataaggaccgcgatcgcaaaagacgctcatcccgaagtcgggagcgtgctaggcgagaaagggaacggaaagaggagctgaggggaggcggtggcgacatggcagaaccttctgaggccggtgatgcgccacccgatgacgggccacccggcgagctgggccccgatggtcccgatggacctgaggaaaaaggacgcgaccgcgatcgggagagaaggcgaagtcaccggagcgagcgagagcgtcgtcgggaccgagaccgcgaccgcgaccgcgaccgggagcacaagcggggtgaacgtggatctgaaaggggacgtgacgaagcacggggcggcggcggcgggcaagacaatggtcttgaaggcctggggaacgattctcgcgatatgtacatggaatcagagggtggggacgggtatttagcaccagagaatggatatctaatggaagcagcccccgagtag

SEQ ID NO: 319972 - DNA, 3071 bp, Artificial Sequence
  derived and/or modified sequence
atggggctgctactgtgctggccctggagagtctttttggctgctagttttggggtgctctgccccctttctgtcttccttactgtggttgaggcctcccgagggggctggctgtggtgtccagcagctctccagaggtggtcaggagctccctaaagtgcatggaattggggcttggggtgtgggagggaccaaggggtaggctgctagcagctgaaggtgtcgtaggtttttactaaagaaccttccactgtctagagacttgagagagggaaagagagagagaggcctagacgaacacaatcacatgttttctttgctgttcctcccgggatgggcctgttttggggtttgggactctgaacccgagcggggttccttcgcttgactttgatcctggtccttaaatgcctttccccactcccctcccgtgggttcaggggccaagcggcccctcctcagagcacgggcagcaccgtctcctggacccctgtgtgccagcctctgcagacgcagctggtgggagggagcatggatttggaggtggagaagtcactcctggtcctcggagggggtgggctgtgtgcctagttcagtgtgactcggggattggtgagggcggacaggtttctgaggcctccctagccttctttgtaaattcacacgagatagtccagggctttccagcgcccagcttggatgataatcctcgtctcccccactctaaggcctccttgagatttctttggggtctaccacgtcctctgcctgtctccaggtggtacaggagatgtggttcctctccctctcctggctccctagaaccccccacttcccctccctgtagctttagctgaccccgtggtggtgggtgtggggtctgtgcgcgtgctcaggtaagcttgggggctccaggtaagcggtcccgtgtcccccccccgggaagcccgcctcctcgccaggcccccaggagttgccgagccccccccatcccgctcggtttggacacccgcaaggccggcatcggtaaatggcacctttttctcttcctctggttgttatttgggggggagcgggctggggcggggcagggtattacggttggttgaggacagccccctaggccagggctgggtgggggaacggggactttttggccttcatgacagccccacgttgatcacaggccagggcctcaggcttgccttctgctacgcgctgcccgagagcagcagtgagcctctcccccgtctcccctctacgactcccctttcctggcaggctcaggctggggtgcgctcccagcacgtgttgagccgggggtgtggagggcgagatggggcagggctggggggaggcagagtcagtcgtctcaggtaaggcagggattttcagtagcaccgcacggctccccatgcttcctccactgcccctctcccctgctgcaggggccccgccaggccccctgggagtgtataacccgcctctctgctccctgccatttcctgaagatttctcccacccccttctggttcattttctgttctgatgtctgttccccccacactcacccccctccaaaaaaaacaaaaacagaaaaaaccggtgtggtctggggtgcggagcgtcccagctgggcctcctgccccggcttggtgtctcagggtgcatgcttggggttgtggaggagccccctcccccacagcagagtccagcgtggagttaaccttcagtttctttgcagcgattttggccgccctggcgggagggggctgttccatcatgtgggagaggaagggccggggagcctagggggtggcgggtgagggtggacgtctcccccgaccaggagtggttggggcgctgagaggaagcagacgctgagatggagcaggcccttcaccggtttgggagagggttggtctggctgtcagttgcctggctgtctgttgggcgtgtgcgtgtgcgtgatgatggggacacggggcggggattctgtagagctgggcctgtcctgactagaggaccctctggggactcctctcccctccccctccccacatctgttacagccgcttacaaacacgcagatggcaagaagattgatggcaggagggtccttgtggacgtggagaggggccgaaccgtgaagggctggaggccccggcggctaggaggaggcctcggtggtaccagaagaggaggggctgatgtgaacatccggcattcaggccgcgatgacacctcccgctacgatgagaggcccggcccctccccgcttccgcacagggaccgggaccgggaccgtgagcgggagcgcagagagcggagccgggagcgagacaaggagcgagaacggcgacgctcccgctcccgggaccggcggaggcgctcacggagtcgcgacaaggaggagcggaggcgctccagggagcggagcaaggacaaggaccgggaccggaagcggcgaagcagccggagtcgggagcgggcccggcgggagcgggagcgcaaggaggagctgcgtggcggcggtggcgacatggcggagccctccgaggcgggtgacgcgccccctgatgatgggcctccaggggagctcgggcctgacggccctgacggtccagaggaaaagggccgggatcgtgaccgggagcgacggcggagccaccggagcgagcgcgagcggcgccgggaccgggatcgtgaccgtgaccgtgaccgcgagcacaaacggggggagcggggcagtgagcggggcagggatgaggcccgaggtgggggcggtggccaggacaacgggctggagggtctgggcaacgacagccgagacatgtacatggagtctgagggcggcgacggctacctggctccggagaatgggtatttgatggaggctgcgccggagtgaagaggtcgtcctctccatctgctgtgtttggacgcgttcctgcccagccccttgctgtcatcccctcccccaaccttggccacttgagtttgtcctccaagggtaggtgtctcatttgttctggccccttggatttaaaaataaaattaatttcctgttg

SEQ ID NO: 319973 - DNA, 1026 bp, Artificial Sequence
  derived and/or modified sequence
atggagcaagccctgcatcgctttgggagggggctggtgtggctgagcgtcgcttggctctctgttgggcgagtgcgggtaagggacgatggcgataccggccgtggcttttgccgcgctggcccagtcctgacccgaggacccagcggggactcatccccccttcccttgcccaccagcgtcaccgctgcatataagcacgctgatgggaagaagattgatggcagaagagttttggtggacgtggagaggggccgaaccgtgaagggctggaggcctaggaggctcggaggcggtcttggtgggactaggagaggaggggcagatgtcaatatcagacacagcggtagagacgacacgtcccgatacgatgaacgcccaggacctagccctctcccacatcgcgaccgcgaccgcgaccgggaacgagagaggagagaaaggtctcgggaacgggataaggagagagaaaggcgcagaagcagatcaagggacagaagacgaagaagcagatccagagacaaagaggagcgacgtcgaagcagggagagatctaaagataaggaccgtgatagaaaacgtagatctagcagaagtcgcgagcgggcaaggcgggagagagagaggaaagaagagctgagaggagggggaggcgatatggccgagcctagcgaggccggagacgccccacccgatgatggacctcccggagaacttggcccagacgggcctgacggaccagaggaaaaaggccgagatagggaccgagaaagacgtaggtcacaccggtctgaacgggaaagaagacgcgacagagacagggaccgggatagagacagggaacacaagagaggggaacggggttccgagagagggagggacgaggccagaggaggcggaggtggacaggacaatggtctcgaaggacttggcaacgatagccgcgacatgtatatggaatctgaaggcggtgatggttacctggccccagaaaatggctatttgatggaagccgcaccagaatag

SEQ ID NO: 319974 - DNA, 1026 bp, Artificial Sequence
  derived and/or modified sequence
atggagcaggccctgcacagattcggcagaggcctggtgtggctgagcgtggcctggctgagcgtgggcagagtgagagtgagagacgacggcgacaccggcagaggcttctgcagagccggccccgtgctgaccagaggccccagcggcgacagcagccccctgcccctgcccaccagcgtgaccgccgcctacaagcacgccgacggcaagaagatcgacggcagaagagtgctggtggacgtggagagaggcagaaccgtgaagggctggagacccagaagactgggcggcggcctgggcggcaccagaagaggcggcgccgacgtgaacatcagacacagcggcagagacgacaccagcagatacgacgagagacccggccccagccccctgccccacagagacagagacagagacagagagagagagagaagagagagaagcagagagagagacaaggagagagagagaagaagaagcagaagcagagacagaagaagaagaagcagaagcagagacaaggaggagagaagaagaagcagagagagaagcaaggacaaggacagagacagaaagagaagaagcagcagaagcagagagagagccagaagagagagagagagaaaggaggagctgagaggcggcggcggcgacatggccgagcccagcgaggccggcgacgccccccccgacgacggcccccccggcgagctgggccccgacggccccgacggccccgaggagaagggcagagacagagacagagagagaagaagaagccacagaagcgagagagagagaagaagagacagagacagagacagagacagagacagagagcacaagagaggcgagagaggcagcgagagaggcagagacgaggccagaggcggcggcggcggccaggacaacggcctggagggcctgggcaacgacagcagagacatgtacatggagagcgagggcggcgacggctacctggcccccgagaacggctacctgatggaggccgcccccgagtag

SEQ ID NO: 319975 - protein, 112 aa, Artificial Sequence
  derived and/or modified sequence
ALDTNYCFSSTEKNCCVRQLYIDFRKDLGWKWIHEPKGYHANFCLGPCPYIWSLDTQYSKVLALYNQHNPGASAAPCCVPQALEPLPIVYYVGRKPKVEQLSNMIVRSCKCS

SEQ ID NO: 319976 - protein, 173 aa, Artificial Sequence
  derived and/or modified sequence
SKAQPQDSQHLRHSLGRTRMSDTEEQEYEEEQPEEEAAEEEEEGEVPDSAEEERPKPSRPVVPPLIPPKIPEGERVDFDDIHRKRMEKDLLELQTLIDVHFEQRKKEEEELVALKERIERRRSERAEQQRFRTEKERERQAKLAEEKMRKEEEEAKKRAEDDAKKKKKKKKKK

SEQ ID NO: 319977 - DNA, 2620 bp, Artificial Sequence
  derived and/or modified sequence
gcgcacgtacacacgaagggcctgctgactacatctgccggaaagcatcgggccaagcctttctccattttgcggtctaggaagtagcagaggccccttcctgtagggagttgccatggagacgcggtggggcaccgacggagttctaatgacggccgtgattggtgcaggatcctgctaatctcaggaaggcccgtagagaagggcagacactggcctcagatacctgacctggtaccctctatgaggcctgcggtgctgggctccccagaccgagcacccccagaagatgaggggcctgtcatggtgaagctagaggactctgaggaggagggtgaggctgccttatgggacccaggccctgaagctgcacgcctgcgtttccggtgcttccgctatgaggaggccacagggccccaagaggccctggcccagctccgagagctgtgtcgccagtggctgcgtccagaggtacgctccaaggagcagatgctggagctgttggtgctggagcagttcctgggcgcactgccccctgagatccaggcccgtgtgcaggggcagcggccaggcagccccgaggaggctgctgccctagtagatgggctgcgccgggagccgggcggaccccggagatgggtcacagtccaggtgcagggccaggaggtcctatcagagaagatggagccctccagtttccagcccctacctgaaactgagcctccaactccagagcctgggcccaagacacctcctaggactatgcaggaatcaccactgggcctgcaggtgaaagaggagtcagaggttacagaggactcagatttcctggagtctgggcctctagctgccacccaggagtctgtacccaccctcctgcctgaggaggcccagagatgtgggaccgtgctggaccagatctttccccacagcaagactgggcctgagggtccctcatggagggagcaccccagggccctgtggcatgaggaagctgggggcatcttctccccagggttcgcgctgcagctaggcagcatctccgcaggtccaggtagtgtaagccctcacctccacgtcccctgggacctcggcatggctggcctttctggccagatccaatcaccctcccgcgaaggtggctttgcgcatgcgcttctgctccccagcgatctgaggagtgaacaggaccccacggacgaggatccctgccggggtgtgggccctgctctgatcaccacccgctggcgctcccccaggggccggagccggggccgccccagcactgggggcggggtggttaggggcggccgttgcgatgtatgtggcaaggtgttcagccaacgcagcaacctgctgaggcaccagaagatccacacgggtgagcgaccattcgtgtgcagcgagtgcggccgcagcttcagccgcagctcgcacctgctgcgccaccagcttacgcacaccgaggagcggccgttcgtgtgcggcgactgtggccagggcttcgtgcgcagcgcgcgcctggaagagcatcggagagtgcacacgggcgaacagcctttccgttgcgctgagtgcggccagagcttccggcagcgctccaatctgctgcagcaccagcgcatccacggcgatcccccgggccctggcgctaagcccccggcccctcctggtgcgcccgagcctcccggcccctttccgtgcagcgagtgccgcgagagcttcgcgcggcgcgccgtgctgctggagcaccaggcggtacacacgggcgacaagtcctttggctgcgtcgagtgcggcgagcgcttcggccgccgctcagtgctgctgcagcaccggcgcgtgcacagtggcgagcggcccttcgcctgtgccgagtgcggccagagcttccggcagcgctccaacctgacgcagcaccggcgcatccacaccggggagcggcccttcgcctgcgccgagtgtggcaaggccttccgccagcggcctacgctcacgcagcatctccgcgtacacacgggcgagaaaccctttgcctgccccgagtgtggccagcgcttcagccagcgcctcaagctcacgcgtcatcagaggacacacaccggcgaaaagccctaccactgcggtgagtgcggcctgggcttcacgcaggtctcgcggctcaccgagcaccagcgcatccacacgggcgaacggcccttcgcctgccccgagtgcggccagagctttcggcagcacgccaacctcacccagcaccggcgcatccacacgggtgaacggccctacgcatgccctgagtgtggcaaggccttccgccagcggcccacgctcacgcagcatctgcgcacccaccgacgagagaagcccttcgcctgccaggactgtggccgccgcttccaccagagcaccaagctcattcagcaccagcgcgtccacagcgccgagtagctccagccgggacgcactgtgtccgccatggtcagaacacctacctcccctggttattgtgaggctggcgattacataagtataagcaggtccgcccagggcttggctactgtaggtgtccaataaacagtagatggaaactgggtctccacccaaaaaaaaaaaaaaaaaa

SEQ ID NO: 319978 - DNA, 2920 bp, Artificial Sequence
  derived and/or modified sequence
gcgcacgtacacacgaagggcctgctgactacatctgccggaaagcatcgggccaagcctttctccattttgcggtctaggaagtagcagaggccccttcctgtagggagttgccatggagacgcggtggggcaccgacggagttctaatgacggccgtgattggtgcaggatcctgctaatctcaggaaggcccgtagagaagtgaggaaaacgtggtggggggcatgcgcgatctggtaggcggtgctgccgtctgttgtacctgagaggcttgcgcatgccgacgcacggattcgaggcggggagcatgggaagaagcggccaggagtatgacctgatcattgcgaccaccgctaggggaagggaggagagggtgtagaaacggggacgagggtgggggaagggcaaggaggcgctcgagctggtgcgcggagcatcctgggagacgtagtccagcgggagggggaagtcgaagactgcgcgtgctcaggagcgcggagcggcccgctgagcgcagaggggcagacactggcctcagatacctgacctggtaccctctatgaggcctgcggtgctgggctccccagaccgagcacccccagaagatgaggggcctgtcatggtgaagctagaggactctgaggaggagggtgaggctgccttatgggacccaggccctgaagctgcacgcctgcgtttccggtgcttccgctatgaggaggccacagggccccaagaggccctggcccagctccgagagctgtgtcgccagtggctgcgtccagaggtacgctccaaggagcagatgctggagctgttggtgctggagcagttcctgggcgcactgccccctgagatccaggcccgtgtgcaggggcagcggccaggcagccccgaggaggctgctgccctagtagatgggctgcgccgggagccgggcggaccccggagatgggtcacagtccaggtgcagggccaggaggtcctatcagagaagatggagccctccagtttccagcccctacctgaaactgagcctccaactccagagcctgggcccaagacacctcctaggactatgcaggaatcaccactgggcctgcaggtgaaagaggagtcagaggttacagaggactcagatttcctggagtctgggcctctagctgccacccaggagtctgtacccaccctcctgcctgaggaggcccagagatgtgggaccgtgctggaccagatctttccccacagcaagactgggcctgagggtccctcatggagggagcaccccagggccctgtggcatgaggaagctgggggcatcttctccccagggttcgcgctgcagctaggcagcatctccgcaggtccaggtagtgtaagccctcacctccacgtcccctgggacctcggcatggctggcctttctggccagatccaatcaccctcccgcgaaggtggctttgcgcatgcgcttctgctccccagcgatctgaggagtgaacaggaccccacggacgaggatccctgccggggtgtgggccctgctctgatcaccacccgctggcgctcccccaggggccggagccggggccgccccagcactgggggcggggtggttaggggcggccgttgcgatgtatgtggcaaggtgttcagccaacgcagcaacctgctgaggcaccagaagatccacacgggtgagcgaccattcgtgtgcagcgagtgcggccgcagcttcagccgcagctcgcacctgctgcgccaccagcttacgcacaccgaggagcggccgttcgtgtgcggcgactgtggccagggcttcgtgcgcagcgcgcgcctggaagagcatcggagagtgcacacgggcgaacagcctttccgttgcgctgagtgcggccagagcttccggcagcgctccaatctgctgcagcaccagcgcatccacggcgatcccccgggccctggcgctaagcccccggcccctcctggtgcgcccgagcctcccggcccctttccgtgcagcgagtgccgcgagagcttcgcgcggcgcgccgtgctgctggagcaccaggcggtacacacgggcgacaagtcctttggctgcgtcgagtgcggcgagcgcttcggccgccgctcagtgctgctgcagcaccggcgcgtgcacagtggcgagcggcccttcgcctgtgccgagtgcggccagagcttccggcagcgctccaacctgacgcagcaccggcgcatccacaccggggagcggcccttcgcctgcgccgagtgtggcaaggccttccgccagcggcctacgctcacgcagcatctccgcgtacacacgggcgagaaaccctttgcctgccccgagtgtggccagcgcttcagccagcgcctcaagctcacgcgtcatcagaggacacacaccggcgaaaagccctaccactgcggtgagtgcggcctgggcttcacgcaggtctcgcggctcaccgagcaccagcgcatccacacgggcgaacggcccttcgcctgccccgagtgcggccagagctttcggcagcacgccaacctcacccagcaccggcgcatccacacgggtgaacggccctacgcatgccctgagtgtggcaaggccttccgccagcggcccacgctcacgcagcatctgcgcacccaccgacgagagaagcccttcgcctgccaggactgtggccgccgcttccaccagagcaccaagctcattcagcaccagcgcgtccacagcgccgagtagctccagccgggacgcactgtgtccgccatggtcagaacacctacctcccctggttattgtgaggctggcgattacataagtataagcaggtccgcccagggcttggctactgtaggtgtccaataaacagtagatggaaactgggtctccaccc

SEQ ID NO: 319979 - DNA, 2587 bp, Artificial Sequence
  derived and/or modified sequence
gcgcacgtacacacgaagggcctgctgactacatctgccggaaagcatcgggccaagcctttctccattttgcggtctaggaagtagcagaggccccttcctgtagggagttgccatggagacgcggtggggcaccgacggagttctaatgacggccgtgattggtgcaggatcctgctaatctcaggaaggcccgtagagaagggcagacactggcctcagatacctgacctggtaccctctatgaggcctgcggtgctgggctccccagaccgagcacccccagaagatgaggggcctgtcatggtgaagctagaggactctgaggaggagggtgaggctgccttatgggacccaggccctgaagctgcacgcctgcgtttccggtgcttccgctatgaggaggccacagggccccaagaggccctggcccagctccgagagctgtgtcgccagtggctgcgtccagaggtacgctccaaggagcagatgctggagctgttggtgctggagcagttcctgggcgcactgccccctgagatccaggcccgtgtgcaggggcagcggccaggcagccccgaggaggctgctgccctagtagatgggctgcgccgggagccgggcggaccccggagatgggtcacagtccaggtgcagggccaggaggtcctatcagagaagatggagccctccagtttccagcccctacctgaaactgagcctccaactccagagcctgggcccaagacacctcctaggactatgcaggaatcaccactgggcctgcaggtgaaagaggagtcagaggttacagaggactcagatttcctggagtctgggcctctagctgccacccaggagtctgtacccaccctcctgcctgaggaggcccagagatgtgggaccgtgctggaccagatctttccccacagcaagactgggcctgagggtccctcatggagggagcaccccagggccctgtggcatgaggaagctgggggcatcttctccccagggttcgcgctgcagctaggcagcatctccgcaggtccaggtagtgtaagccctcacctccacgtcccctgggacctcggcatggctggcctttctggccagatccaatcaccctcccgcgaaggtggctttgcgcatgcgcttctgctccccagcgatctgaggagtgaacaggaccccacggacgaggatccctgccggggtgtgggccctgctctgatcaccacccgctggcgctcccccaggggccggagccggggccgccccagcactgggggcggggtggttaggggcggccgttgcgatgtatgtggcaaggtgttcagccaacgcagcaacctgctgaggcaccagaagatccacacgggtgagcgaccattcgtgtgcagcgagtgcggccgcagcttcagccgcagctcgcacctgctgcgccaccagcttacgcacaccgaggagcggccgttcgtgtgcggcgactgtggccagggcttcgtgcgcagcgcgcgcctggaagagcatcggagagtgcacacgggcgaacagcctttccgttgcgctgagtgcggccagagcttccggcagcgctccaatctgctgcagcaccagcgcatccacggcgatcccccgggccctggcgctaagcccccggcccctcctggtgcgcccgagcctcccggcccctttccgtgcagcgagtgccgcgagagcttcgcgcggcgcgccgtgctgctggagcaccaggcggtacacacgggcgacaagtcctttggctgcgtcgagtgcggcgagcgcttcggccgccgctcagtgctgctgcagcaccggcgcgtgcacagtggcgagcggcccttcgcctgtgccgagtgcggccagagcttccggcagcgctccaacctgacgcagcaccggcgcatccacaccggggagcggcccttcgcctgcgccgagtgtggcaaggccttccgccagcggcctacgctcacgcagcatctccgcgtacacacgggcgagaaaccctttgcctgccccgagtgtggccagcgcttcagccagcgcctcaagctcacgcgtcatcagaggacacacaccggcgaaaagccctaccactgcggtgagtgcggcctgggcttcacgcaggtctcgcggctcaccgagcaccagcgcatccacacgggcgaacggcccttcgcctgccccgagtgcggccagagctttcggcagcacgccaacctcacccagcaccggcgcatccacacgggtgaacggccctacgcatgccctgagtgtggcaaggccttccgccagcggcccacgctcacgcagcatctgcgcacccaccgacgagagaagcccttcgcctgccaggactgtggccgccgcttccaccagagcaccaagctcattcagcaccagcgcgtccacagcgccgagtagctccagccgggacgcactgtgtccgccatggtcagaacacctacctcccctggttattgtgaggctggcgattacataagtataagcaggtccgcccagggcttggctactgtaggtgtccaataaacagtagatggaa

SEQ ID NO: 319980 - DNA, 2385 bp, Artificial Sequence
  derived and/or modified sequence
gcatgccgacgcacggattcgaggcggggagcatgggaagaagcggccaggagtatgacctgatcattgcgaccaccgctaggggaagggaggagagggtgtagaaacggggacgagggtgggggaagggcaaggaggcgctcgagctggtgcgcggagcatcctgggagacgtagtccagcgggagggggaagtcgaagactgcgcgtgctcaggagcgcggagcggcccgctgagcgcagaggggcagacactggcctcagatacctgacctggtaccctctatgaggcctgcggtgctgggctccccagaccgagcacccccagaagatgaggggcctgtcatggtgaagctagaggactctgaggaggagggtgaggctgccttatgggacccaggccctgaagctgcacgcctgcgtttccggtgcttccgctatgaggaggccacagggccccaagaggccctggcccagctccgagagctgtgtcgccagtggctgcgtccagaggtacgctccaaggagcagatgctggagctgttggtgctggagcagttcctgggcgcactgccccctgagatccaggcccgtgtgcaggggcagcggccaggcagccccgaggaggctgctgccctagtagatgggctgcgccgggagccgggcggaccccggagatgggtcacagtccaggtgcagggccaggaggtcctatcagagaagatggagccctccagtttccagcccctacctgaaactgagcctccaactccagagcctgggcccaagacacctcctaggactatgcaggaatcaccactgggcctgcaggtgaaagaggagtcagaggttacagaggactcagatttcctggagtctgggcctctagctgccacccaggagtctgtacccaccctcctgcctgaggaggcccagagatgtgggaccgtgctggaccagatctttccccacagcaagactgggcctgagggtccctcatggagggagcaccccagggccctgtggcatgaggaagctgggggcatcttctccccaggggccggagccggggccgccccagcactgggggcggggtggttaggggcggccgttgcgatgtatgtggcaaggtgttcagccaacgcagcaacctgctgaggcaccagaagatccacacgggtgagcgaccattcgtgtgcagcgagtgcggccgcagcttcagccgcagctcgcacctgctgcgccaccagcttacgcacaccgaggagcggccgttcgtgtgcggcgactgtggccagggcttcgtgcgcagcgcgcgcctggaagagcatcggagagtgcacacgggcgaacagcctttccgttgcgctgagtgcggccagagcttccggcagcgctccaatctgctgcagcaccagcgcatccacggcgatcccccgggccctggcgctaagcccccggcccctcctggtgcgcccgagcctcccggcccctttccgtgcagcgagtgccgcgagagcttcgcgcggcgcgccgtgctgctggagcaccaggcggtacacacgggcgacaagtcctttggctgcgtcgagtgcggcgagcgcttcggccgccgctcagtgctgctgcagcaccggcgcgtgcacagtggcgagcggcccttcgcctgtgccgagtgcggccagagcttccggcagcgctccaacctgacgcagcaccggcgcatccacaccggggagcggcccttcgcctgcgccgagtgtggcaaggccttccgccagcggcctacgctcacgcagcatctccgcgtacacacgggcgagaaaccctttgcctgccccgagtgtggccagcgcttcagccagcgcctcaagctcacgcgtcatcagaggacacacaccggcgaaaagccctaccactgcggtgagtgcggcctgggcttcacgcaggtctcgcggctcaccgagcaccagcgcatccacacgggcgaacggcccttcgcctgccccgagtgcggccagagctttcggcagcacgccaacctcacccagcaccggcgcatccacacgggtgaacggccctacgcatgccctgagtgtggcaaggccttccgccagcggcccacgctcacgcagcatctgcgcacccaccgacgagagaagcccttcgcctgccaggactgtggccgccgcttccaccagagcaccaagctcattcagcaccagcgcgtccacagcgccgagtagctccagccgggacgcactgtgtccgccatggtcagaacacctacctcccctggttattgtgaggctggcgattacataagtataagcaggtccgcccagggcttggctactgtaggtgtccaataaacagtagatggaaa

SEQ ID NO: 319981 - protein, 474 aa, Artificial Sequence
  derived and/or modified sequence
MTTFKEAVTFKDVAVFFTEEELGLLDPAQRKLYQDVMLENFTNLLSVGHQPFHPFHFLREEKFWMMETATQREGNSGGKTIAEAGPHEDCPCQQIWEQTASDLTQSQDSIINNSHFFEQGDVPSQVEAGLSIIHTGQKPSQNGKCKQSFSDVAIFDPPQQFHSGEKSHTCNECGKSFCYISALRIHQRVHLREKLSKCDMRGKEFSQSSCLQTRERVHTGEKPFKCEQCGKGFRCRAILQVHCKLHTGEKPYICEKCGRAFIHDFQLQKHQIIHTGEKPFKCEICGKSFCLRSSLNRHCMVHTAEKLYKSEECGKGFTDSLDLHKHQIIHTGQKPYNCKECGKSFRWSSYLLIHQRIHSGEKPYRCEECGKGYISKSGLNLHQRVHTGERPYNCKECGKSFSRASSILNHKKLHCRKKPFKCEDCGKRLVHRSFCKDQQGDHNGENSSKCEDCGKRYKRRLNLDIILSLFLNDM

SEQ ID NO: 319982 - DNA, 4132 bp, Artificial Sequence
  derived and/or modified sequence
agacgctctgtggagacgcgagcacttccggtgtgtgagcctgcggttgctacataaccgcgtagtttgagccatttctgcgtctggcgggtccttctgaacttgtcaccttcgcttggggtcgcaacgacccgatgatcgatgatccaagcaagggaaaagaagccttggcggagagcggaggcacaattccaccttcctttgtgctccattactcaagacactgaagactccaaaaagtaggaggaaaaatgaccacattcaaggaggcagtgaccttcaaggatgtggctgtgttcttcactgaggaggaactggggctactggaccctgcccagaggaagctgtaccaagacgtgatgcttgagaacttcacgaacctgctgtcagtggggcatcaaccattccaccctttccacttcctaagggaagaaaagttttggatgatggagacagcaacccaaagagaaggaaattcaggcggcaagactattgcggaagcaggaccacatgaagactgcccttgccagcaaatctgggaacaaactgcaagtgacttaacccagtctcaagactccatcataaataattctcacttctttgaacaaggtgatgtcccctcccaggttgaggcaggactatctataattcatacaggacagaaaccttcacagaatgggaagtgtaaacagtccttcagtgatgttgccatctttgatcctcctcagcagttccactcaggagagaagtctcatacatgcaatgagtgtggaaaaagcttctgttacatctcagctcttcgtattcaccagagagttcacttgagagagaaactctctaagtgtgacatgcgtggtaaggaattcagtcagagctcatgtctgcaaactcgtgagagagtccacactggagagaaaccattcaaatgtgagcaatgtgggaaaggcttcagatgtagagcgatacttcaagttcactgcaaattacacacaggagagaaaccttatatttgtgagaaatgtgggagggccttcattcacgatttccagcttcagaaacatcagataattcatactggggagaagccgttcaaatgtgaaatatgtggtaagagcttctgccttaggtcaagtcttaataggcattgcatggtccacacagcagagaaactgtacaaatctgaggagtgtggaaaaggcttcactgatagcctagatttgcataagcatcagataattcacacaggacagaaaccgtacaattgtaaagaatgtgggaagagcttcagatggtcctcatatcttttgatccatcagcgaatccacagtggagaaaaaccatacagatgtgaggagtgtgggaagggctacattagtaagtcaggtcttaacttgcaccagagggtccatactggagagagaccttataattgtaaggaatgtgggaagagctttagccgggcttcaagtattttgaatcataagaaactccactgccggaaaaaacccttcaaatgtgaggattgtggaaagaggcttgtacaccggtctttctgtaaagaccaacaaggagaccacaatggagaaaactcatccaaatgtgaggactgtgggaagcgctacaagaggcgcttgaatctggatataattttatcattatttttaaatgatatgtaagttgtacatatatatgggatatggtatgaaattttaatatgtgtatataatacgtaatgatcaaattgatgtaattagtgtattaccttaaacaattaacatttctttgttttgggaaaattcaaaatccattgttctagcgatttgaaaagaaacaataaattattgttgattatagtcacctttggtgctttagaacactagaatgtatttctcctatctagcagtacttatgtatcttgttacccaatctttggctatctcacctaacccctacacttccctgcttctagaaccactgttttactcactaattctatgaaatcaacttttttagcttccatatgtgtgtgaggacagttagtatttatcttaccttgcttagcttatattgtttaacatgtcctccaaagctcatctatgttgccacaaatgacacaattttgttttctttttatgcccaaagagtattctattgtgtatatatgccaccttttcttcatttatctattgatggacacataggtgggttccatatcttaactattgtgaagaatagtgctccaatgaacatggtagtgtagatatctgatccacatactgatttcctttgctttggatatactcaatagtgggattgctagatcactcgaatcttatgcctcagaggcttgacacaagagcaaaactatggaagtgtggctagggtgatatggcttcataccacctcaggcctcaagtcctcaactgcaccagagtgtccacgttggacagaatccttagtaatgaggtgtgtgataaagtctctgctcagttgtctataatctcatttgagagttcacaaaggggcaaaacattaaaaagaggcatatggtaagcacttcagtgtgtgtttatatcataatttatcacagtccatactgataatatatttcatccaggcttgtaggacagaaaacatttgtttaagttaaattcagtgtttcaccatagctcagcattctcccatcatcctaggaccatcgtagtagagaactcttgtaaattgtgcagtagggttgcaaacagaacttacgcttgtcattcaggagacaggccttagaataagagtttgttcacacatttacaaaaccctaatgatgaacatgtcaaaagtggtgaccactagaatgtcaactacaggtaccttgttttctgcatcctcaggaccttaacactgattagcacttacatgtttagtatgtgttaaatgactcaaaaggagaaaatatgatattttaaaattgcatctaggagagaaaatctacaaaaaataattcagggacacgagttaaaatgcagaatacactcagttctgcaatccaaagcattattttgggtaatcttaccctgttgcacttggctgctggcttcccctcatcctctgttctgaagtttactactagtggctttgtctaatgctccattggttgcatacaatataaattcaacaatcatttgtaactcttctcacactacaggctgaaaatggtttgttaacttgtcaataacagtccactgcatatatcacaattacatttttttcaacagtgttaaggcaaaatttatagtaatactttttacgtggcagatgtagttacgttggaaaaaacttccttagttctgaattctcatgattgcttctgtatttccatgcaggccttgatataatggccttctaattgtggtagcatttattttatcaaacaactcaggtagaagctatgccaatttgacaatttttggaaacctaacctaatattctcttcctatctctatgaaataccaagagaaacctatcggagtttggtaatttcatgaaatgtatccatgattggggtaggagtgacatttacatgctcttctttattgttggcagtaaaaataagtcttttgtaagcagtgtatatcagaatgtataaggtacaagtgttttacctggaaatgatgggataggaaattatgattatgatgttaaaactgtgaaaagtagaaaaccacatggatgatatcaccccattttaaaatggaataagtattcaacaagaatttgtgtgaaatgcatttattcctataacataagaccaataaaatgagggaaccagacatacagtaaaaggagaaaaacataatgtgagctttgtgaaatctgactgtaaccttcataacataatcaaatatctttgtgtgtttctgggactttttaatgtgtatatacgtaatttgtgaacaactattctttcctctggcaatgaatatttgctggtatttttccattttataattttatgcattttttctcagtgaacatcagttttatcaaagcagtaaatttagtgcaataaatttgcaaacttattaacgttaatcacttacctaccaggactcagaatctcagaataaaattgctctatatt

SEQ ID NO: 319983 - DNA, 1425 bp, Artificial Sequence
  derived and/or modified sequence
atgaccaccttcaaggaggccgtgaccttcaaggacgtggccgtgttcttcaccgaggaggagctgggcctgctggaccccgcccagagaaagctgtaccaggacgtgatgctggagaacttcaccaacctgctgagcgtgggccaccagcccttccaccccttccacttcctgagagaggagaagttctggatgatggagaccgccacccagagagagggcaacagcggcggcaagaccatcgccgaggccggcccccacgaggactgcccctgccagcagatctgggagcagaccgccagcgacctgacccagagccaggacagcatcatcaacaacagccacttcttcgagcagggcgacgtgcccagccaggtggaggccggcctgagcatcatccacaccggccagaagcccagccagaacggcaagtgcaagcagagcttcagcgacgtggccatcttcgaccccccccagcagttccacagcggcgagaagagccacacctgcaacgagtgcggcaagagcttctgctacatcagcgccctgagaatccaccagagagtgcacctgagagagaagctgagcaagtgcgacatgagaggcaaggagttcagccagagcagctgcctgcagaccagagagagagtgcacaccggcgagaagcccttcaagtgcgagcagtgcggcaagggcttcagatgcagagccatcctgcaggtgcactgcaagctgcacaccggcgagaagccctacatctgcgagaagtgcggcagagccttcatccacgacttccagctgcagaagcaccagatcatccacaccggcgagaagcccttcaagtgcgagatctgcggcaagagcttctgcctgagaagcagcctgaacagacactgcatggtgcacaccgccgagaagctgtacaagagcgaggagtgcggcaagggcttcaccgacagcctggacctgcacaagcaccagatcatccacaccggccagaagccctacaactgcaaggagtgcggcaagagcttcagatggagcagctacctgctgatccaccagagaatccacagcggcgagaagccctacagatgcgaggagtgcggcaagggctacatcagcaagagcggcctgaacctgcaccagagagtgcacaccggcgagagaccctacaactgcaaggagtgcggcaagagcttcagcagagccagcagcatcctgaaccacaagaagctgcactgcagaaagaagcccttcaagtgcgaggactgcggcaagagactggtgcacagaagcttctgcaaggaccagcagggcgaccacaacggcgagaacagcagcaagtgcgaggactgcggcaagagatacaagagaagactgaacctggacatcatcctgagcctgttcctgaacgacatgtag

SEQ ID NO: 319984 - DNA, 1425 bp, Artificial Sequence
  derived and/or modified sequence
atgaccacattcaaggaggcggtcactttcaaggacgtggccgtcttctttactgaggaagaattgggcctgctagaccccgcacagaggaagctgtatcaggatgttatgctggagaacttcaccaatctcctcagtgttggacatcagccatttcacccatttcatttcctgcgtgaggaaaaattttggatgatggagactgccactcagcgggaaggcaactcaggcggtaagacaattgcagaagctggcccacatgaagactgcccttgtcagcagatttgggagcagactgctagcgatctgacccagagccaggatagcataataaacaactcccactttttcgagcagggagacgtacccagccaagtggaggcgggtctaagcatcattcatacaggccagaaacccagccagaacggcaaatgtaagcagagctttagcgacgtggcaatctttgatccaccacagcagttccactcgggtgaaaagtcccacacctgtaatgagtgcggcaagtctttttgctatatctcagcattgcgcatccaccagagagtgcaccttagagaaaaactgtccaaatgtgacatgcgtggcaaagagttctcccagtccagttgtcttcagacccgagaaagagtccacactggtgaaaagcctttcaaatgcgaacagtgcggtaagggctttcgctgtcgggccattctccaggtccattgtaaattgcacacgggtgagaagccatacatatgtgagaaatgcggacgtgcattcatccatgatttccagctgcaaaaacatcagatcatacacacaggggaaaagccgttcaaatgtgaaatttgcggaaagtcattctgtctgcggtcctcactgaataggcactgtatggtacacacagccgagaagctatacaagagtgaagagtgcggcaagggattcaccgatagcctggacctgcacaagcatcagatcatacatacaggtcagaagccctacaactgcaaagagtgcgggaagtcgttccgctggagttcatatctcctcattcaccaaagaattcattctggggagaaaccctatcggtgtgaggagtgcggcaagggctacatctcaaaaagtggcctgaatttacaccagagagtgcacacaggtgaacgcccctacaactgcaaggagtgtggaaagagttttagccgcgcctcatccatattaaaccacaagaaattacactgccggaagaaaccattcaaatgtgaggattgtggtaagagactggtgcacagaagtttttgtaaagaccagcagggagaccataacggagagaacagctctaagtgtgaggactgtggtaagaggtacaagaggaggctcaatttggacatcattctgagcttgttcctaaatgacatgtag

SEQ ID NO: 319985 - DNA, 1425 bp, Artificial Sequence
  derived and/or modified sequence
atgaccaccttcaaggaggccgtgaccttcaaggatgtggccgtgttcttcacagaggaggagctgggcctgctggaccctgcccagaggaagctgtaccaggatgtgatgctggagaacttcaccaacctgctgtctgtgggccaccagcccttccaccccttccacttcctgcgggaggagaagttctggatgatggagacagccacccagcgggagggcaacagcggcggcaagaccatcgccgaggccggcccccatgaggactgcccctgccagcagatctgggagcagacagccagtgacctgacccagagccaggacagcatcatcaacaacagccacttctttgagcagggagatgtgcccagccaggtggaggccggcctgagcatcatccacacaggccagaagcccagccagaatggcaagtgcaagcagagcttcagtgatgtggccatctttgatcctccccagcagttccacagcggggagaagagccacacctgcaatgaatgtgggaagagcttctgctacatcagcgccctgcgcatccaccagagggtgcacctgcgggagaagctgagcaaatgtgacatgaggggcaaggagttcagccagagcagctgcctgcagacccgggagcgggtgcacactggagagaagcccttcaagtgtgagcagtgtgggaagggcttccgctgccgggccatcctgcaggtgcactgcaagctgcacactggagagaagccctacatctgtgagaagtgtggccgggccttcatccatgacttccagctgcagaagcaccagatcatccacactggagagaagcccttcaagtgtgagatctgtgggaagagcttctgcctgcggagcagcctgaacagacactgcatggtgcacacagctgagaagctgtacaagtctgaggagtgtgggaagggcttcacagacagcctggacctgcacaagcaccagatcatccacacaggccagaagccctacaactgcaaggaatgtgggaagagcttccgctggagcagctacctgctgatccaccagaggatccacagcggggagaagccctaccgctgtgaggagtgtgggaagggctacatcagcaagagcggcctgaacctgcaccagagggtgcacactggagagcggccctacaactgcaaggaatgtgggaagagcttcagccgggccagcagcatcctgaaccacaagaagctgcactgcaggaagaagcccttcaagtgtgaggactgtgggaagaggctggtgcaccgctccttctgcaaggaccagcagggcgaccacaatggagagaacagcagcaaatgtgaggactgtgggaagcgctacaagaggcggctgaacctggacatcatcctgagcctcttcctgaatgacatgtag

SEQ ID NO: 319986 - DNA, 1425 bp, Artificial Sequence
  derived and/or modified sequence
atgaccaccttcaaggaggccgtgaccttcaaggacgtggccgtgttctttacagaggaggagctgggtcttctggatccagcacagcgtaagctatatcaggatgtgatgttagaaaattttaccaacctgttatctgtcggccaccaaccatttcatcccttccattttttgagagaggagaaattctggatgatggaaactgccacccagagagaaggtaacagcgggggaaagacaatcgccgaggccggaccacacgaggactgtccatgccagcagatatgggagcaaaccgccagcgacctaacccagtcccaggattccattatcaacaacagtcactttttcgaacaaggcgatgttccttcacaggtggaagccggattgtccatcatccataccggccagaagcccagccagaatgggaaatgtaaacagtccttcagcgatgtcgccatctttgaccccccccaacagtttcacagcggagaaaagtcccacacttgtaatgaatgtggcaagagtttttgctatatctctgcactgaggatacatcagagagtgcatctgcgggagaaactgtcaaagtgcgatatgagagggaaggaattctctcagtctagctgtctgcagaccagggagagagttcacactggtgaaaagcccttcaaatgtgagcagtgcggaaagggattcaggtgtagagctatcctacaggtccattgcaagctccataccggggagaagccttatatttgcgagaagtgtggtcgtgccttcattcacgatttccagctccagaagcaccagatcatccataccggtgagaagccattcaaatgcgagatctgcggtaaatctttttgcttgagatccagtctcaaccggcactgtatggtgcacacagcagaaaagctgtataagtccgaagaatgtggtaaagggttcactgacagtctggatctgcacaagcaccagatcatccacaccggccagaaaccatacaattgtaaagagtgtgggaaaagcttccgctggagcagttacctgctcatacaccaaagaattcacagtggggagaaaccctaccgatgtgaggaatgcggcaaggggtacatctcgaaatcaggactcaacctacaccagagggtccataccggcgagcgcccctacaactgcaaagagtgcggcaaaagcttctctagggcctcttcaattctgaatcacaaaaaactccactgtcggaagaaaccattcaagtgcgaagactgtgggaaaagactagtgcatcgctcattctgcaaggaccagcagggtgatcataacggcgagaattcgtccaaatgtgaagattgtggcaagcgctataagagacgcctgaatctggacattatcctgtctttgttcctgaacgacatgtag

SEQ ID NO: 319987 - DNA, 1425 bp, Artificial Sequence
  derived and/or modified sequence
atgactaccttcaaagaagccgtgactttcaaggatgtggcagtgttcttcacagaggaggaactgggcctgctggaccccgcacagagaaagctctatcaagacgtcatgctcgaaaacttcactaatttgctgagtgtggggcatcagccgtttcacccattccatttcttgcgagaggagaagttctggatgatggaaacagcaacacagcgtgaaggcaattcaggcggtaagacaatagcagaagcgggaccgcacgaggattgtccttgtcagcagatttgggagcagaccgccagtgacctgacgcagagccaggattcaatcattaataattcccacttctttgaacagggcgacgtcccatcccaggtcgaggcgggactctccatcatccacacaggacagaaacctagtcagaatggtaagtgtaaacagagtttctccgatgttgccatttttgacccaccccagcaattccatagcggggaaaaatcacatacatgcaacgagtgtggcaaatctttttgttatatttcggcactcagaatccatcagcgcgtgcacttgagagagaaacttagcaagtgcgacatgcgagggaaggagttctctcaaagcagctgcctccagactcgcgaacgcgttcatactggggagaagccatttaagtgcgagcaatgcggcaaaggctttcgatgtcgcgctattcttcaggtgcattgtaagctgcatacaggtgagaaaccttacatctgcgagaaatgtggtcgcgctttcatccacgactttcagctacagaagcaccagattatccacactggggagaaaccctttaagtgtgagatttgtggcaagtcattctgtctccggtccagtttaaatcggcactgtatggtccacacagccgagaagctgtataagagcgaagagtgcgggaagggcttcactgactcgctcgatctgcataagcaccagattattcacactggacagaaaccctataactgcaaggagtgtggcaaatcatttcgatggtcttcctatctcctcattcaccagcgcatacacagcggagagaagccctaccgttgcgaggagtgtggaaagggttatatctctaagagcggcctcaatctgcaccagcgagtacatactggagagcgaccgtataactgtaaggaatgcggaaaatccttcagccgcgcttcctccatcttaaaccataaaaagcttcactgcaggaaaaagccgtttaaatgcgaagattgtggcaagcgactcgtgcaccgctctttctgtaaagatcagcagggagaccacaatggagaaaacagctccaagtgcgaagactgtggaaaacgctataagcggagattgaacctggacatcattctaagtctgttccttaacgacatgtag

SEQ ID NO: 319988 - DNA, 4132 bp, Artificial Sequence
  derived and/or modified sequence
agacgctctgtggagacgcgagcacttccggtgtgtgagcctgcggttgctacataaccgcgtagtttgagccatttctgcgtctggcgggtccttctgaacttgtcaccttcgcttggggtcgcaacgacccgatgatcgatgatccaagcaagggaaaagaagccttggcggagagcggaggcacaattccaccttcctttgtgctccattactcaagacactgaagactccaaaaagtagtaggaaaaatgaccacattcaaggaggcagtgaccttcaaggatgtggctgtgttcttcactgaggaggaactggggctactggaccctgcccagaggaagctgtaccaagacgtgatgcttgagaacttcacgaacctgctgtcagtggggcatcaaccattccaccctttccacttcctaagggaagaaaagttttggatgatggagacagcaacccaaagagaaggaaattcaggcggcaagactattgcggaagcaggaccacatgaagactgcccttgccagcaaatctgggaacaaactgcaagtgacttaacccagtctcaagactccatcataaataattctcacttctttgaacaaggtgatgtcccctcccaggttgaggcaggactatctataattcatacaggacagaaaccttcacagaatgggaagtgtaaacagtccttcagtgatgttgccatctttgatcctcctcagcagttccactcaggagagaagtctcatacatgcaatgagtgtggaaaaagcttctgttacatctcagctcttcgtattcaccagagagttcacttgagagagaaactctctaagtgtgacatgcgtggtaaggaattcagtcagagctcatgtctgcaaactcgtgagagagtccacactggagagaaaccattcaaatgtgagcaatgtgggaaaggcttcagatgtagagcgatacttcaagttcactgcaaattacacacaggagagaaaccttatatttgtgagaaatgtgggagggccttcattcacgatttccagcttcagaaacatcagataattcatactggggagaagccgttcaaatgtgaaatatgtggtaagagcttctgccttaggtcaagtcttaataggcattgcatggtccacacagcagagaaactgtacaaatctgaggagtgtggaaaaggcttcactgatagcctagatttgcataagcatcagataattcacacaggacagaaaccgtacaattgtaaagaatgtgggaagagcttcagatggtcctcatatcttttgatccatcagcgaatccacagtggagaaaaaccatacagatgtgaggagtgtgggaagggctacattagtaagtcaggtcttaacttgcaccagagggtccatactggagagagaccttataattgtaaggaatgtgggaagagctttagccgggcttcaagtattttgaatcataagaaactccactgccggaaaaaacccttcaaatgtgaggattgtggaaagaggcttgtacaccggtctttctgtaaagaccaacaaggagaccacaatggagaaaactcatccaaatgtgaggactgtgggaagcgctacaagaggcgcttgaatctggatataattttatcattatttttaaatgatatgtaagttgtacatatatatgggatatggtatgaaattttaatatgtgtatataatacgtaatgatcaaattgatgtaattagtgtattaccttaaacaattaacatttctttgttttgggaaaattcaaaatccattgttctagcgatttgaaaagaaacaataaattattgttgattatagtcacctttggtgctttagaacactagaatgtatttctcctatctagcagtacttatgtatcttgttacccaatctttggctatctcacctaacccctacacttccctgcttctagaaccactgttttactcactaattctatgaaatcaacttttttagcttccatatgtgtgtgaggacagttagtatttatcttaccttgcttagcttatattgtttaacatgtcctccaaagctcatctatgttgccacaaatgacacaattttgttttctttttatgcccaaagagtattctattgtgtatatatgccaccttttcttcatttatctattgatggacacataggtgggttccatatcttaactattgtgaagaatagtgctccaatgaacatggtagtgtagatatctgatccacatactgatttcctttgctttggatatactcaatagtgggattgctagatcactcgaatcttatgcctcagaggcttgacacaagagcaaaactatggaagtgtggctagggtgatatggcttcataccacctcaggcctcaagtcctcaactgcaccagagtgtccacgttggacagaatccttagtaatgaggtgtgtgataaagtctctgctcagttgtctataatctcatttgagagttcacaaaggggcaaaacattaaaaagaggcatatggtaagcacttcagtgtgtgtttatatcataatttatcacagtccatactgataatatatttcatccaggcttgtaggacagaaaacatttgtttaagttaaattcagtgtttcaccatagctcagcattctcccatcatcctaggaccatcgtagtagagaactcttgtaaattgtgcagtagggttgcaaacagaacttacgcttgtcattcaggagacaggccttagaataagagtttgttcacacatttacaaaaccctaatgatgaacatgtcaaaagtggtgaccactagaatgtcaactacaggtaccttgttttctgcatcctcaggaccttaacactgattagcacttacatgtttagtatgtgttaaatgactcaaaaggagaaaatatgatattttaaaattgcatctaggagagaaaatctacaaaaaataattcagggacacgagttaaaatgcagaatacactcagttctgcaatccaaagcattattttgggtaatcttaccctgttgcacttggctgctggcttcccctcatcctctgttctgaagtttactactagtggctttgtctaatgctccattggttgcatacaatataaattcaacaatcatttgtaactcttctcacactacaggctgaaaatggtttgttaacttgtcaataacagtccactgcatatatcacaattacatttttttcaacagtgttaaggcaaaatttatagtaatactttttacgtggcagatgtagttacgttggaaaaaacttccttagttctgaattctcatgattgcttctgtatttccatgcaggccttgatataatggccttctaattgtggtagcatttattttatcaaacaactcaggtagaagctatgccaatttgacaatttttggaaacctaacctaatattctcttcctatctctatgaaataccaagagaaacctatcggagtttggtaatttcatgaaatgtatccatgattggggtaggagtgacatttacatgctcttctttattgttggcagtaaaaataagtcttttgtaagcagtgtatatcagaatgtataaggtacaagtgttttacctggaaatgatgggataggaaattatgattatgatgttaaaactgtgaaaagtagaaaaccacatggatgatatcaccccattttaaaatggaataagtattcaacaagaatttgtgtgaaatgcatttattcctataacataagaccaataaaatgagggaaccagacatacagtaaaaggagaaaaacataatgtgagctttgtgaaatctgactgtaaccttcataacataatcaaatatctttgtgtgtttctgggactttttaatgtgtatatacgtaatttgtgaacaactattctttcctctggcaatgaatatttgctggtatttttccattttataattttatgcattttttctcagtgaacatcagttttatcaaagcagtaaatttagtgcaataaatttgcaaacttattaacgttaatcacttacctaccaggactcagaatctcagaataaaattgctctatatt

SEQ ID NO: 319989 - protein, 304 aa, Artificial Sequence
  derived and/or modified sequence
MTLRTSVCCTRRRATISSSPWCASWSAGSRSRSSGAAAGPVTAWWCASRPTWASGSHSAARRPSSRRSSPRPETSCATPSTPAGTRTPRTSSASRSMATAGSTRYRSWSGCSRGVSAWLRPVGAVWTPPSSASMCFAGRSGGRSPPPLLFESSRNPWTRPCFSAHLGPPRDLETVLGSSACVYLAVGMRPRVRLEGPKLAQRAPGSQVSWQQNVGCWRHACRRTVDATQRYSGGISAASSPSPSASQPGAASSEAPGPVGAGLEEPSAATSEELFIPLHAGQTLAGLLASERWLIFQYLKWMQP

SEQ ID NO: 319990 - DNA, 899 bp, Artificial Sequence
  derived and/or modified sequence
gggctcagagaactccacacctgcacacctccctctcacctgctcctctacctgctccaccctcaacccaccagaaccatgggctgctctggctgctctggaggctgtggctccagctgtgggggctgtggctccagctgtgggggctgtggctccggctatgggggctgtggctccggctgctgtgtacctgtctgctgctgcaagcccgtgtgctgctgtgtgccagcctgttcctgctccagctgtggctcctgtgggggctccaagggggtctgtggctcttgtgggggctgcaaggggggctgtggctcctgtggaggctccaaggggggctgtggctccagctgctgtgtgcccgtctgctgctcctccagctgtggctcctgtgggggttccaagggggtctgtggatttcgtgggggctccaaggggggctgcggttcttgtggctgctcccagtgcagctgctataagccctgctgctgctcctcaggctgtgggtcatcctgctgccagtccagctgctgcaagcccagctgctcccagtccagctgctgtaagccctgctgttcccagtccagctgctgtaagccctgctgctgctcctcaggctgtgggtcatcctgctgccagtccagctgctgcaaaccctgctgttcccagtccagctgctgtaagccctgctgctgctcctcaggctgtgggtcatcctgctgccagtccagctgctgcaagccctgctcctcccagtccagctgctgtgtcccaatttgctgccagtgcaagatctgaggctctgcccacaaacctcagtgggtcctacagatccgggctctccaggaatgattgcagctgtgtcctgaattcctgaagcacgtctctgaatctgtcctcct

SEQ ID NO: 319991 - DNA, 372 bp, Artificial Sequence
  derived and/or modified sequence
atgctgggccccaacgcccaggtgaccgtggtggtggcccagcccggccccgaccacctggaccacctgctgctggacacccagcactgccagcacagcagctgcggcagcgccgcctgcacccagctgacctgggtgccctgcctgggcggcagccacaaggccagcatcaagatgagcgcccaggccgtggtgagcaccgaggccccctgggagagaccctgcttccaggcccacctgggctgcctgcagaacagcgtgctgtgcagctgcagaatggagggcttcagcctgttcctggccatgctgtggggcggcgtgggcgagctgcccagcgaccccagaggccacctgcagttcctggccacctag

SEQ ID NO: 319992 - DNA, 915 bp, Artificial Sequence
  derived and/or modified sequence
atgaccctgagaaccagcgtgtgctgcaccagaagaagagccaccatcagcagcagcccctggtgcgccagctggagcgccggcagcagaagcagaagcagcggcgccgccgccggccccgtgaccgcctggtggtgcgccagcagacccacctgggccagcggcagccacagcgccgccagaagacccagcagcagaagaagcagccccagacccgagaccagctgcgccacccccagcacccccgccggcaccagaacccccagaaccagcagcgccagcagaagcatggccaccgccggcagcaccagatacagaagctggagcggctgcagcagaggcgtgagcgcctggctgagacccgtgggcgccgtgtggaccccccccagcagcgccagcatgtgcttcgccggcagaagcggcggcagaagccccccccccctgctgttcgagagcagcagaaacccctggaccagaccctgcttcagcgcccacctgggcccccccagagacctggagaccgtgctgggcagcagcgcctgcgtgtacctggccgtgggcatgagacccagagtgagactggagggccccaagctggcccagagagcccccggcagccaggtgagctggcagcagaacgtgggctgctggagacacgcctgcagaagaaccgtggacgccacccagagatacagcggcggcatcagcgccgccagcagccccagccccagcgccagccagcccggcgccgccagcagcgaggcccccggccccgtgggcgccggcctggaggagcccagcgccgccaccagcgaggagctgttcatccccctgcacgccggccagaccctggccggcctgctggccagcgagagatggctgatcttccagtacctgaagtggatgcagccctag

SEQ ID NO: 319993 - DNA, 372 bp, Artificial Sequence
  derived and/or modified sequence
atgctggggccgaacgctcaggtaaccgtggttgtggcgcagcccggtcctgatcacttggaccacctgttactcgatacacagcactgccagcactccagctgcggatctgccgcgtgtacacagctaacctgggttccgtgcctcggtggctcccacaaggccagcattaagatgtcggcacaggcagtcgttagcactgaagctccttgggaacgaccctgtttccaggctcacttgggatgtctgcagaacagtgttctgtgtagctgccggatggaggggttttccttgttcctagcgatgctctggggcggggttggtgagctgccttcggatcccaggggccacctgcagtttcttgctacatag

SEQ ID NO: 319994 - DNA, 915 bp, Artificial Sequence
  derived and/or modified sequence
atgacactccgaacctccgtctgctgtaccagacgaagggcaacaataagttcatctccatggtgcgccagttggtcagcaggctcccggagtcgctccagcggagccgccgcagggccggtgacagcctggtggtgcgcaagccgacccacttgggccagcggctcccacagtgccgcccgacgtcccagttcaaggagatcctctcctagaccagagacaagctgcgccactccgagcactccggcaggaactaggacaccacgtacttccagcgcttcgaggtcaatggccaccgctggatccacccgctaccgttcatggtctggttgttcgagaggcgtttcagcctggttacggccagtgggcgctgtatggacacccccaagttccgcctctatgtgttttgccggaagatcaggagggcggtctccccctcccctgctgttcgagtcttcccgcaatccttggacgcggccttgcttttcagcacatctcgggcctccccgtgatctcgagaccgttttaggctcttcagcctgcgtataccttgccgtgggcatgcggccacgtgtgagacttgaggggcctaaactggcacagagagctcctggcagccaggtgagctggcagcaaaacgtgggctgctggcgacatgcatgtcggagaaccgtggacgccacacagagatactccgggggcatttctgccgcttctagtccatccccctctgcgtctcagcctggagccgcgtccagcgaggcaccaggaccagtcggagccggattagaggaacccagtgccgccacttcagaggagctatttatccctttgcatgccggtcagaccttagcgggacttctggcctccgaacgctggctgatctttcagtaccttaagtggatgcaaccatag

SEQ ID NO: 319995 - DNA, 372 bp, Artificial Sequence
  derived and/or modified sequence
atgctgggccccaatgcccaggtgacagtggtggtggcccagcccggccctgaccacctggaccacctgctgctggacacccagcactgccagcacagcagctgtggcagcgctgcctgcacccagctgacctgggtgccctgcctgggcggcagccacaaggccagcatcaagatgtctgcccaggccgtggtgtccacagaggccccctgggagcggccctgcttccaggcccacctgggctgcctgcagaacagcgtgctgtgcagctgcaggatggagggcttcagcctcttcctggccatgctgtggggcggcgtgggggagctgcccagcgacccccggggccacctgcagttcctggccacctag

SEQ ID NO: 319996 - DNA, 915 bp, Artificial Sequence
  derived and/or modified sequence
atgaccctgcggacctctgtgtgctgcacccggcggcgggccaccatcagcagcagcccctggtgtgcctcctggagcgctggcagccgcagccgcagcagcggggctgctgctggccctgtgacagcctggtggtgtgccagccggcccacctgggccagcggcagccacagcgctgcccggcggcccagcagccgccgcagcagccccaggcctgagaccagctgtgccacccccagcaccccagctggcaccaggacccccaggaccagcagcgccagccgctccatggccacagctggcagcacccgctaccgctcctggagcggctgcagccggggcgtgtctgcctggctgcggcctgtgggcgctgtgtggaccccacccagcagcgcctccatgtgctttgctggccgcagcggcggccgcagccccccacccctgctgtttgagagcagcaggaacccctggacccggccctgcttcagcgcccacctgggccccccccgggacctggagaccgtgctgggcagcagcgcctgtgtgtacctggccgtgggcatgaggccccgggtgcggctggagggccccaagctggcccagagggcccctggcagccaggtgtcctggcagcagaatgtgggctgctggaggcatgcctgcagaagaacagtggatgccacccagcgctacagcggcggcatctctgctgccagcagccccagccccagcgccagccagcccggggccgccagcagcgaggcccctggccctgtgggcgccggcctggaggagcccagcgctgccaccagcgaggagctgttcatccccctgcacgccggccagaccctggccggcctgctggccagcgagcgctggctgatcttccagtacctgaagtggatgcagccctag

SEQ ID NO: 319997 - DNA, 915 bp, Artificial Sequence
  derived and/or modified sequence
atgaccctgcggaccagcgtgtgctgcacccggcggcgggccaccatctcatcctcaccatggtgtgcttcatggtccgcggggtcgcgaagtaggagttctggggcagcagcgggcccggtgactgcctggtggtgcgcatctagacctacttgggcctccgggtcacactctgccgcacgcagaccatctagcagacgtagcagcccccgccccgagacctcctgcgctacaccaagtacacccgccggcacccggactcctcgtacgtcaagcgcatccagatctatggctacagcggggagcactcggtaccggtcctggtccggctgctccagaggagtctcagcatggcttagaccagtcggggcagtgtggacaccaccatcatccgcaagtatgtgttttgctggtaggtcaggggggagaagcccccctcccttgcttttcgagagcagtcgaaacccttggacacgcccctgcttttccgcccatctggggcctcctcgggacctggaaacagtcctgggaagctccgcttgtgtgtatctggcggtgggaatgcgacctcgagttaggctggaggggcccaagcttgcccaacgcgctcccgggagtcaggtgagttggcaacagaacgttgggtgctggcggcacgcctgtcgacggacagtagatgctacccagaggtacagcggtggaatcagcgccgcatctagtccgagcccatcagcctctcagcccggcgcagcctcttctgaggccccaggtcccgtgggggctgggctggaagaacccagcgccgctacaagcgaggagttgtttatcccactccatgcaggtcaaactttagcaggcttgctggcctccgaacgttggcttatctttcagtatctgaaatggatgcagccctag

SEQ ID NO: 319998 - DNA, 372 bp, Artificial Sequence
  derived and/or modified sequence
atgctgggcccaaatgcacaggtgactgtggttgtcgctcagcccggacccgaccatctcgatcatctgttgttggatacccagcactgccaacactcctcctgcggatccgccgcatgtacacagttgacctgggtgccgtgtcttggaggctcacacaaagcttctataaagatgtccgctcaggcggttgtgagcacagaagcaccttgggagcgtccctgtttccaggcacacctgggatgtctgcagaactctgtactgtgcagctgccgaatggagggtttctccctattcctggcgatgctgtgggggggagtgggcgaactcccctcagaccctagggggcatttgcagttcctcgccacctag

SEQ ID NO: 319999 - DNA, 372 bp, Artificial Sequence
  derived and/or modified sequence
atgcttgggccaaatgcacaggtgactgtcgtggtagcccagccaggtcctgaccatctggatcatttgctgttggacactcagcactgccagcattcatcttgcggctccgctgcctgcacacagctgacatgggttccctgcttggggggtagccacaaagcaagtatcaagatgtccgcccaggcagttgtttcaacggaagccccatgggaacgtccatgttttcaagcacacctgggatgccttcagaactctgtcctttgcagctgtaggatggaagggttttccctattcctagctatgctttgggggggagtgggcgagctgcccagcgacccccgagggcacctccagttccttgccacttag

SEQ ID NO: 320000 - DNA, 915 bp, Artificial Sequence
  derived and/or modified sequence
atgactctacgaacatctgtgtgctgcacccgtaggcgtgccacaatttcaagttcaccttggtgcgcttcttggtctgcaggctctcggtctcgcagctcgggagccgcagccggaccagtgaccgcttggtggtgcgcatcaagaccaacttgggcgagcggtagtcacagtgcagccaggagaccaagttcacggcgaagcagtccacggcctgaaaccagctgtgccaccccatccacgcccgcaggaaccaggacaccaagaacttcgtcagccagccgatccatggcaaccgcagggtcaacacggtatcgcagctggtctggctgcagtcggggtgtgagcgcttggctccgacccgtaggcgcagtctggacgccacctagttcagcgtccatgtgcttcgcgggacggtccggagggcgaagccctccaccattgctgttcgagtcatctcgaaatccttggactaggccctgcttctccgctcacctgggtcctcctagagacctggaaacagtgcttgggtctagcgcttgtgtgtacctagccgtgggcatgaggcccagggtacggctcgaaggacccaagctggcccagcgggctcccggttcccaggtgagttggcagcagaacgtgggctgttggcggcacgcctgtcggaggacagtcgatgctacacaacgatactccggcggaatctctgccgcttctagtcccagcccgtccgcctctcaacctggcgctgcatccagcgaggcgccaggcccagtaggagcagggctggaagagccttcggccgcaacctcagaagagttgttcattcccctgcatgcaggtcagacattggccggacttctcgcttcagaacggtggctaatattccagtatctcaagtggatgcagccatag

SEQ ID NO: 320001 - protein, 286 aa, Artificial Sequence
  derived and/or modified sequence
DAQMPHRKERPSGSSLHTHGSTGTAEGGNMSRLSLTRSPVSPLAAQGIPLPAQLTKSNAPVHIDVGGHMYTSSLATLTKYPDSRISRLFNGTEPIVLDSLKQHYFIDRDGEIFRYVLSFLRTSKLLLPDDFKDFSLLYEEARYYQLQPMVRELERWQQEQEQRRRSRACDCLVVRVTPDLGERIALSGEKALIEEVFPETGDVMCNSVNAGWNQDPTHVIRFPLNGYCRLNSVQVLERLFQRGFSVAASCGGGVDSSQFSEYVLCREERRPQPTPTAVRIKQEPLD

SEQ ID NO: 320002 - protein, 283 aa, Artificial Sequence
  derived and/or modified sequence
MPHRKERPSGSSLHTHGSTGTAEGGNMSRLSLTRSPVSPLAAQGIPLPAQLTKSNAPVHIDVGGHMYTSSLATLTKYPDSRISRLFNGTEPIVLDSLKQHYFIDRDGEIFRYVLSFLRTSKLLLPDDFKDFSLLYEEARYYQLQPMVRELERWQQEQEQRRRSRACDCLVVRVTPDLGERIALSGEKALIEEVFPETGDVMCNSVNAGWNQDPTHVIRFPLNGYCRLNSVQVLERLFQRGFSVAASCGGGVDSSQFSEYVLCREERRPQPTPTAVRIKQEPLD

SEQ ID NO: 320003 - DNA, 861 bp, Artificial Sequence
  derived and/or modified sequence
gacgcccagatgccccacagaaaggagagacccagcggcagcagcctgcacacccacggcagcaccggcaccgccgagggcggcaacatgagcagactgagcctgaccagaagccccgtgagccccctggccgcccagggcatccccctgcccgcccagctgaccaagagcaacgcccccgtgcacatcgacgtgggcggccacatgtacaccagcagcctggccaccctgaccaagtaccccgacagcagaatcagcagactgttcaacggcaccgagcccatcgtgctggacagcctgaagcagcactacttcatcgacagagacggcgagatcttcagatacgtgctgagcttcctgagaaccagcaagctgctgctgcccgacgacttcaaggacttcagcctgctgtacgaggaggccagatactaccagctgcagcccatggtgagagagctggagagatggcagcaggagcaggagcagagaagaagaagcagagcctgcgactgcctggtggtgagagtgacccccgacctgggcgagagaatcgccctgagcggcgagaaggccctgatcgaggaggtgttccccgagaccggcgacgtgatgtgcaacagcgtgaacgccggctggaaccaggaccccacccacgtgatcagattccccctgaacggctactgcagactgaacagcgtgcaggtgctggagagactgttccagagaggcttcagcgtggccgccagctgcggcggcggcgtggacagcagccagttcagcgagtacgtgctgtgcagagaggagagaagaccccagcccacccccaccgccgtgagaatcaagcaggagcccctggactag

SEQ ID NO: 320004 - DNA, 852 bp, Artificial Sequence
  derived and/or modified sequence
atgccccacagaaaggagagacccagcggcagcagcctgcacacccacggcagcaccggcaccgccgagggcggcaacatgagcagactgagcctgaccagaagccccgtgagccccctggccgcccagggcatccccctgcccgcccagctgaccaagagcaacgcccccgtgcacatcgacgtgggcggccacatgtacaccagcagcctggccaccctgaccaagtaccccgacagcagaatcagcagactgttcaacggcaccgagcccatcgtgctggacagcctgaagcagcactacttcatcgacagagacggcgagatcttcagatacgtgctgagcttcctgagaaccagcaagctgctgctgcccgacgacttcaaggacttcagcctgctgtacgaggaggccagatactaccagctgcagcccatggtgagagagctggagagatggcagcaggagcaggagcagagaagaagaagcagagcctgcgactgcctggtggtgagagtgacccccgacctgggcgagagaatcgccctgagcggcgagaaggccctgatcgaggaggtgttccccgagaccggcgacgtgatgtgcaacagcgtgaacgccggctggaaccaggaccccacccacgtgatcagattccccctgaacggctactgcagactgaacagcgtgcaggtgctggagagactgttccagagaggcttcagcgtggccgccagctgcggcggcggcgtggacagcagccagttcagcgagtacgtgctgtgcagagaggagagaagaccccagcccacccccaccgccgtgagaatcaagcaggagcccctggactag

SEQ ID NO: 320005 - DNA, 861 bp, Artificial Sequence
  derived and/or modified sequence
gacgcccagatgccacatcggaaagaacgacccagtggttcttctttacatactcatggatccactggaaccgcggaaggcggaaacatgagcaggctgtcccttacccggagcccagtgtcacctctcgctgcacagggaatccctctcccagcccagttgactaagtcaaacgcacctgtgcacattgatgtgggcggtcacatgtatacatcctctctcgcaacccttactaagtaccctgactctcggatatctcggctattcaatggtactgagcctatagtattggactccttaaaacagcactacttcatcgatcgcgacggagagatctttcgttatgtgttgagcttcctgcgaactagcaagctgctgctgcccgacgatttcaaggattttagcctcttgtatgaagaagcaaggtattatcagttgcagcccatggtacgagagcttgagcgatggcagcaggagcaggagcagcggcggaggagtagagcctgtgactgtctggtcgtgcgagtgacaccagatctgggggagaggatcgccctatccggagagaaagccctcatcgaggaggtgtttcctgagacgggagatgtgatgtgtaattctgttaacgcagggtggaaccaggaccccacccatgtaatcaggttcccactcaacggttattgcagacttaactccgtgcaggttctggaacggctgttccagcggggcttttcagtggccgcctcctgcggcggcggcgtggactcctcgcagttcagcgagtacgtgttgtgtcgcgaagaacggaggccgcagcccacccctacagctgtgaggatcaagcaggaacctctggactag

SEQ ID NO: 320006 - DNA, 852 bp, Artificial Sequence
  derived and/or modified sequence
atgccccacaggaaggaaagaccttccggttcatctcttcatacccacggctccactggtaccgcagaagggggcaatatgtcccgtctgtctctgactagaagccccgtgtccccgctcgccgctcagggcatccccctccccgcccagctgacaaagagcaacgctcccgtgcacattgatgttggcggtcatatgtacacgtcttccctggccaccctaaccaagtacccagactcgcgaatcagtcgactgtttaacggcaccgagccaattgtcctggattccctgaaacagcactacttcatagaccgggacggagaaatctttcgttatgtgctgagttttctaaggacttctaagttgcttctccctgacgactttaaagattttagcctgctgtatgaagaagctaggtattaccaactccagccaatggttagagaacttgaacggtggcagcaggaacaggaacagcggcgtaggagccgcgcctgtgactgtctagtcgtcagggtgacacctgacctgggagaaaggatagcactgtctggtgagaaggccttgattgaggaagtctttccagaaactggcgacgtgatgtgtaacagcgtcaatgccggttggaatcaggatccgactcacgttattagatttcctcttaatggatactgcaggttgaattccgtacaggtgctcgagagactgtttcaacgtgggttctctgtcgcggcatcttgtggaggaggggtggactcaagtcagttcagcgaatatgtgctgtgtagggaggagcggagacctcagcctaccccaacagccgtgaggattaagcaggagcccctggattag

SEQ ID NO: 320007 - DNA, 861 bp, Artificial Sequence
  derived and/or modified sequence
gatgcccagatgccccacaggaaggagcggcccagcggcagcagcctgcacacccacggcagcactggaacagctgagggcggcaacatgagccggctgagcctgaccaggagccctgtgagccccctggccgcccagggcatccccctgcctgcccagctgaccaagagcaatgcccctgtgcacattgatgtgggcggccacatgtacaccagcagcctggccaccctgaccaagtacccagacagccgcatcagccgcctcttcaacggcacagagcccatcgtgctggacagcctgaagcagcactacttcatcgacagagatggagagatcttccgctacgtgctgtccttcctgcggaccagcaagctgctgctgcctgatgacttcaaggacttcagcctgctgtatgaggaggcccgctactaccagctgcagcccatggtgcgggagctggagcgctggcagcaggagcaggagcagaggcggcgcagccgggcctgtgactgcctggtggtgcgggtgaccccagacctgggggagcgcatcgccctgtctggagagaaggccctgattgaggaggtgtttcctgagactggagatgtgatgtgcaacagcgtgaatgccggctggaaccaggaccccacccacgtgatccgcttccccctgaatggctactgccgcctgaacagcgtgcaggtgctggagcggctcttccagaggggcttctctgtggccgccagctgtggcggcggcgtggacagcagccagttctctgaatatgtgctgtgccgggaggagcggcggccccagcccacccccacagctgtgcgcatcaagcaggagcccctggactag

SEQ ID NO: 320008 - DNA, 852 bp, Artificial Sequence
  derived and/or modified sequence
atgccccacaggaaggagcggcccagcggcagcagcctgcacacccacggcagcactggaacagctgagggcggcaacatgagccggctgagcctgaccaggagccctgtgagccccctggccgcccagggcatccccctgcctgcccagctgaccaagagcaatgcccctgtgcacattgatgtgggcggccacatgtacaccagcagcctggccaccctgaccaagtacccagacagccgcatcagccgcctcttcaatggaacagagcccatcgtgctggacagcctgaagcagcactacttcatcgacagagatggagagatcttccgctacgtgctgtccttcctgcggaccagcaagctgctgctgcctgatgacttcaaggacttcagcctgctgtatgaggaggcccgctactaccagctgcagcccatggtgcgggagctggagcgctggcagcaggagcaggagcagaggagaagaagccgggcctgtgactgcctggtggtgcgggtgaccccagacctgggggagagaattgccctgagcggggagaaggccctgattgaggaggtgtttcctgagactggagatgtgatgtgcaacagcgtgaatgccggctggaaccaggaccccacccacgtgatccgcttccccctgaatggctactgccgcctgaacagcgtgcaggtgctggagcggctcttccagaggggcttctctgtggccgccagctgtggcggcggcgtggacagcagccagttctctgaatatgtgctgtgccgggaggagcggcggccccagcccacccccacagctgtgcgcatcaagcaggagcccctggactag

SEQ ID NO: 320009 - DNA, 861 bp, Artificial Sequence
  derived and/or modified sequence
gacgcccagatgccccaccggaaggagcggcccagcggcagcagcctccatacacacgggagtaccggtaccgccgaagggggtaacatgtctcgattgagtctaacacgttcgccagtcagtcctctggcagcccagggaattccgttgcccgcacaattgacaaagtctaacgctccagtgcacattgatgtgggtggtcacatgtatacaagctccttggcaactctgactaagtacccagattccagaatcagtcgcctgttcaacgggactgagcccatcgtgctagactcattgaagcagcactatttcattgatcgggacggtgaaatcttccggtacgttcttagcttcctgagaaccagcaagctgctgttaccagacgacttcaaagatttttctctactctacgaagaggccagatactatcagctgcagcccatggtccgtgaactcgagcggtggcaacaagagcaagagcagagaagacgcagccgggcttgcgactgtctcgtggtcagggtgacgcctgacttgggcgagcggatcgcactctctggtgagaaagccctgatagaggaagtgttcccagaaactggcgacgtgatgtgcaactcagtcaatgcaggatggaatcaagaccctacccacgtgattaggtttccattgaatggctactgtagactgaattccgtgcaggtgctggagaggctcttccagcgaggcttttctgtcgccgcctcctgcggcggaggcgttgatagctcacaatttagtgagtatgtgctctgtcgtgaagaacggcggccacaacccacccccacagcggtaagaatcaaacaggagccactggattag

SEQ ID NO: 320010 - DNA, 852 bp, Artificial Sequence
  derived and/or modified sequence
atgccccaccggaaggagcggcccagcggcagcagcctgcacacccatgggtctaccggcacagctgagggaggtaatatgtcgcggctgagcctcacacgctctcccgtaagtcccctagccgcccagggaatccccctgcccgcccagcttacaaaaagcaatgcacctgtccacattgatgtgggagggcatatgtacacgtcctcccttgccaccctaacaaagtaccccgattctagaatctctagactttttaatggtacggagcctattgtactagattccttaaagcagcactatttcatagaccgagatggtgaaatattccggtatgtgctatccttccttcgcacatcaaagctgctgttgcccgacgatttcaaggattttagtctgctttatgaggaggctagatattaccagcttcagccgatggtgagagagctggaacgatggcaacaagagcaagaacaaagacgccgatcccgcgcttgtgattgtctcgtggtcagggtgaccccagaccttggcgagaggatcgccctgtccggggaaaaagcgctgatcgaagaggtgttcccagagaccggtgacgtcatgtgtaactctgtcaatgcgggctggaatcaggacccgacccacgtgatccgctttcctctgaatgggtattgcaggctgaactcggtccaagtactcgagcgactcttccagaggggattctccgtggccgcttcatgcgggggaggcgtggattcttctcaattcagcgagtacgtgctctgcagggaagagagacgaccccagcctacccccactgccgtgagaatcaagcaggaacccttagattag

SEQ ID NO: 320011 - DNA, 3676 bp, Artificial Sequence
  derived and/or modified sequence
gatgcacaaatgcctcaccgcaaggagcggccgagcgggtcctcgcttcacacacacggcagcaccggcaccgcggagggaggaaacatgtcccggctgtctctcacccggtcgcctgtgtctcccctggctgcccagggcatccccctgccagcccagctcaccaagtccaatgcacctgtgcacatcgatgtgggcggccacatgtacaccagcagcctggccacgctcaccaagtaccctgactccaggataagccgcctcttcaatggcactgaacccatcgtcctggacagtttgaagcaacattatttcattgaccgggatggggagattttccgctacgtcctgagcttcctgcggacgtccaagctgctgcttccggatgactttaaggacttcagtctgctgtacgaggaggcgcgctactatcagctccagcccatggtgcgcgagctggagcgctggcagcaggagcaggagcagcggcgccgcagccgggcctgtgactgcctggtggtgcgcgtcacgcccgacttgggcgagcggatcgcactcagcggcgagaaggccctcatcgaggaggtcttccccgagaccggagacgtcatgtgcaactccgtcaacgccggctggaaccaggaccccacgcacgtcatccgcttcccgctcaatggctactgccggctcaactcggtacaggtcctggagcggctgttccagaggggtttcagcgtggctgcgtcctgtgggggcggtgtggactcctcccagttcagcgagtatgtgctttgccgggaggagcggcggccgcagcccacccccactgctgttcgaatcaagcaggaacccctggactaggccctgcttcagtgcccacctgggcccccccagggacctggaaacagtgctggggagttctgcctgtgtatacttggccgtgggcatgagaccgagggtgaggctggagggtccaaagctggcccagcgagcaccagggtcccaggtgtcatggcaacagaacgtgggatgctggaggcatgcctgcagaaggactgttgatgcgacccaaagatacagcggtgggatctctgctgccagctctcccagcccctcagcttcgcagcctggcgcagcatcctctgaggccccggggcctgttggggcggggttggaagagccgtctgcagctacttcagaggagctgtttatccctctccacgcggggcagactctggcgggtctcctagcgtccgagagatggcttattttctacagtatttaaaatggatgcagccctaactgcaaaagtcagagaggctgacaaggaccaatgcttctttatctggtgctcagttctcagtcagacgtgcagcatggctgcagggtggaccagctgcctggcattcaggcccagatgcctgcagggctggggctctcgggacagatgcagggatgtgtgctgcagggctgctgggaggagagtggtgggggcctgagggctgagtgattctgtaaccacctgagaccttcacgtttgctgccgttgggggctcaggctgcactccccgggtcacctgacctgctgcccaggggcttccagtcctgtctgtgtggactggcacctgggctgctggagaagtctcctcccgttcggaccagcctcagggctgcacgttacctcaggaatgggccccaccatgaaggggcccatctgtcagcagcgtcttctaggtccccagctcagggagccatccccagctccagttttctcatgcgaatatgcacagttttaattcacgttgttacactagcctgccgatgagacccagacacaggcagacctggcgctcttgacccctgattccagtgaggactggccctgaggagtccttgcagacctgctgcctcccccacgacaggcccaaagatggaccccccctggccttgtgacagctccccaagtgttctccggtggagaaactgcagaggactggtgggcggggctccccagccatcaccatcctgtgtacaatggctgtagacttgtatatggctcctttaatattgtaaagatgctgatgtacaattgtcgtgcatttgtgtgaacacattgcgttcccagtccatgccataaatgatgctctcaagcaaaagactggaggctctgtcctgtgcagaagcagcagccagactcccgcattcgatgttgtgcagggaggtttgggggcggaacggattcctcccttggatccttcagttcccatcgaggaataacccgcagcagtggtggaggaaggtcagtggctgggtcctgagcttggtgttatttattgcatttgggtgcctgtcccctcagggcagcacagattctgaattctgattcacagtccctagccagatgggaactgggaaagagacagaaggcgtctgggtgcttttgaaccctgtctcaaatgtttgggattttctctctcactattctttggttggggatgatgtcctctttagacccccacgtaatggtatgagaaggtggcaggcagtggctcagccagccagggggcaccaagtcatgcagccagcgtgagacctgcagttcacctaagcacagaacgagatctcagtatgcctccatgtaaacagattcacataggcctccaatttcaatgagaccttttgcattttttctcaaagcccttatgttctaacccatgagaaccattttacctgccctctaagggccaccagcttcgacctgcctcaggggacagcagcacagaccagtggctccctgtccaaggccgcagagcagacgccatcccactgtacaatcgaatttgctggacaaacttgataggtttctctgcttagcaacgagcctatagttagttggcacatctgcgttttggcatctgaggctcccatctgagtggaggagaaagtgttgtgtttattagcaggaagtcttgtgaaaacagctcgctgctgtgtatgtttatggatttttctgatataacagccagcatggttaccgagtggtagagattctcgaacattctcaaactctctttttgggtaaatgattgtgctaaaaataaaatttattaataaagaaggggaaaaaggagtaactctacctgactaaatgttactctaatttatttatttctttactaattaagtaaaaccaggaagtatgattttacatcaaccagagaatttctgaatttatagggaaacactatgtccccataatgatgctataattctaatatatctagtccccataaacagtaagtacaaattatcattcctttaaagcatttttacacttcctggaatgagtatattatcagcaatcttttgtcaaatgccagccgtataaatgttacttctgctctttgtaaacctcaaaactcattattcttgattataagcaactggacagaaccatgccaaagcttccccgtttcccaccaaacccctgccagtgagtgcagagaactcgcaaagccacagcaggcggtctcagccaccgtcccgctcacaggggcccaatgccaggtcacaacactaagaatatctttcaaaaaatgtgtcttttttttttttttttttaaagctactgcttgactgttccttagaataaataaaggatattttataaattaca

SEQ ID NO: 320012 - DNA, 3932 bp, Artificial Sequence
  derived and/or modified sequence
gggggcgagagagaaagtaactccaggacgagaccggagcgacccgcgcagcgagcataggcggcgaagctgcgcccggcgcccgagaccggcagctgcgtggggcgggggctgcgcccgagcccgatctgccggctccgagtggtctcggaaagagggtcgtggtcccgcacggatgcgcttgttgggagaaaccttggagattcacggcaaggcgtaaagcctggggcttccaacgatactctgggcagggatggaagcctagatgcctcaccgcaaggagcggccgagcgggtcctcgcttcacacacacggcagcaccggcaccgcggagggaggaaacatgtcccggctgtctctcacccggtcgcctgtgtctcccctggctgcccagggcatccccctgccagcccagctcaccaagtccaatgcacctgtgcacatcgatgtgggcggccacatgtacaccagcagcctggccacgctcaccaagtaccctgactccaggataagccgcctcttcaatggcactgaacccatcgtcctggacagtttgaagcaacattatttcattgaccgggatggggagattttccgctacgtcctgagcttcctgcggacgtccaagctgctgcttccggatgactttaaggacttcagtctgctgtacgaggaggcgcgctactatcagctccagcccatggtgcgcgagctggagcgctggcagcaggagcaggagcagcggcgccgcagccgggcctgtgactgcctggtggtgcgcgtcacgcccgacttgggcgagcggatcgcactcagcggcgagaaggccctcatcgaggaggtcttccccgagaccggagacgtcatgtgcaactccgtcaacgccggctggaaccaggaccccacgcacgtcatccgcttcccgctcaatggctactgccggctcaactcggtacaggtcctggagcggctgttccagaggggtttcagcgtggctgcgtcctgtgggggcggtgtggactcctcccagttcagcgagtatgtgctttgccgggaggagcggcggccgcagcccacccccactgctgttcgaatcaagcaggaacccctggactaggccctgcttcagtgcccacctgggcccccccagggacctggaaacagtgctggggagttctgcctgtgtatacttggccgtgggcatgagaccgagggtgaggctggagggtccaaagctggcccagcgagcaccagggtcccaggtgtcatggcaacagaacgtgggatgctggaggcatgcctgcagaaggactgttgatgcgacccaaagatacagcggtgggatctctgctgccagctctcccagcccctcagcttcgcagcctggcgcagcatcctctgaggccccggggcctgttggggcggggttggaagagccgtctgcagctacttcagaggagctgtttatccctctccacgcggggcagactctggcgggtctcctagcgtccgagagatggcttattttctacagtatttaaaatggatgcagccctaactgcaaaagtcagagaggctgacaaggaccaatgcttctttatctggtgctcagttctcagtcagacgtgcagcatggctgcagggtggaccagctgcctggcattcaggcccagatgcctgcagggctggggctctcgggacagatgcagggatgtgtgctgcagggctgctgggaggagagtggtgggggcctgagggctgagtgattctgtaaccacctgagaccttcacgtttgctgccgttgggggctcaggctgcactccccgggtcacctgacctgctgcccaggggcttccagtcctgtctgtgtggactggcacctgggctgctggagaagtctcctcccgttcggaccagcctcagggctgcacgttacctcaggaatgggccccaccatgaaggggcccatctgtcagcagcgtcttctaggtccccagctcagggagccatccccagctccagttttctcatgcgaatatgcacagttttaattcacgttgttacactagcctgccgatgagacccagacacaggcagacctggcgctcttgacccctgattccagtgaggactggccctgaggagtccttgcagacctgctgcctcccccacgacaggcccaaagatggaccccccctggccttgtgacagctccccaagtgttctccggtggagaaactgcagaggactggtgggcggggctccccagccatcaccatcctgtgtacaatggctgtagacttgtatatggctcctttaatattgtaaagatgctgatgtacaattgtcgtgcatttgtgtgaacacattgcgttcccagtccatgccataaatgatgctctcaagcaaaagactggaggctctgtcctgtgcagaagcagcagccagactcccgcattcgatgttgtgcagggaggtttgggggcggaacggattcctcccttggatccttcagttcccatcgaggaataacccgcagcagtggtggaggaaggtcagtggctgggtcctgagcttggtgttatttattgcatttgggtgcctgtcccctcagggcagcacagattctgaattctgattcacagtccctagccagatgggaactgggaaagagacagaaggcgtctgggtgcttttgaaccctgtctcaaatgtttgggattttctctctcactattctttggttggggatgatgtcctctttagacccccacgtaatggtatgagaaggtggcaggcagtggctcagccagccagggggcaccaagtcatgcagccagcgtgagacctgcagttcacctaagcacagaacgagatctcagtatgcctccatgtaaacagattcacataggcctccaatttcaatgagaccttttgcattttttctcaaagcccttatgttctaacccatgagaaccattttacctgccctctaagggccaccagcttcgacctgcctcaggggacagcagcacagaccagtggctccctgtccaaggccgcagagcagacgccatcccactgtacaatcgaatttgctggacaaacttgataggtttctctgcttagcaacgagcctatagttagttggcacatctgcgttttggcatctgaggctcccatctgagtggaggagaaagtgttgtgtttattagcaggaagtcttgtgaaaacagctcgctgctgtgtatgtttatggatttttctgatataacagccagcatggttaccgagtggtagagattctcgaacattctcaaactctctttttgggtaaatgattgtgctaaaaataaaatttattaataaagaaggggaaaaaggagtaactctacctgactaaatgttactctaatttatttatttctttactaattaagtaaaaccaggaagtatgattttacatcaaccagagaatttctgaatttatagggaaacactatgtccccataatgatgctataattctaatatatctagtccccataaacagtaagtacaaattatcattcctttaaagcatttttacacttcctggaatgagtatattatcagcaatcttttgtcaaatgccagccgtataaatgttacttctgctctttgtaaacctcaaaactcattattcttgattataagcaactggacagaaccatgccaaagcttccccgtttcccaccaaacccctgccagtgagtgcagagaactcgcaaagccacagcaggcggtctcagccaccgtcccgctcacaggggcccaatgccaggtcacaacactaagaatatctttcaaaaaatgtgtcttttttttttttttttttaaagctactgcttgactgttccttagaataaataaaggatattttataaattaca

SEQ ID NO: 320013 - DNA, 861 bp, Artificial Sequence
  derived and/or modified sequence
gacgcccagatgccccacagaaaggagcgcccatctgggtcatccctccatactcacggatcgactggaaccgccgaaggagggaacatgtcacgactaagcctgacaaggagccctgtctctccattagctgcacagggaatccccctgcccgcacagttgactaaaagtaacgcgcctgtccacattgacgtgggaggacatatgtacacctcctcccttgcaactctgaccaagtatcctgactcacgtatcagtcggttgtttaacgggacagagcccatcgtgctggactcactgaagcagcattactttattgaccgggacggagaaattttcagatacgtcctgagcttcctccgaacctccaaactgctcctgccagatgattttaaagacttcagcctgctatacgaggaggctaggtactaccagctccagccaatggtgagagaattagagagatggcaacaggagcaagaacagagacgcaggtcgagggcctgcgattgcctagtagtgagagttacacctgatctaggtgaacgtattgccctgtcgggggaaaaggccctcattgaggaagtgttccccgaaactggcgacgtgatgtgcaactctgtaaatgccggatggaatcaggaccccacccatgtgatacggtttcctctgaacggctattgtcgcctgaactctgtccaggtgctggaaaggctgttccagcgaggcttttcggtggccgcaagctgcggcggtggcgtggatagttctcagttttcagagtatgtgctgtgccgggaggagcgcaggccccaaccgaccccgactgccgttaggatcaaacaggagccactggactag

SEQ ID NO: 320014 - DNA, 852 bp, Artificial Sequence
  derived and/or modified sequence
atgccccataggaaggagaggccgtccggatcctcactccatactcacggttcaacagggacagccgagggtgggaatatgtcaagactgtctcttacccgctcacccgtgtcccccctggctgcccaggggatacccttaccagctcagctgacgaaatctaatgcccctgttcacattgacgtgggaggccatatgtataccagcagtctcgcaaccctaaccaagtatccagactctcgaatatccaggctcttcaatggaacagaaccaatcgtgctcgacagtcttaaacagcattattttattgaccgggatggagagatattccggtacgtgctgtcattcctaaggacctcaaagcttctattgccagacgatttcaaagactttagtctgctgtatgaagaagctagatattatcaactgcagcccatggttagggagctggagcgatggcagcaggagcaggaacagcgtcgcaggagtcgggcttgtgattgtcttgtggtgcgcgtgacccccgacctcggtgagcgaattgccctttccggagagaaagcccttattgaggaagtgtttccggagacaggggatgtgatgtgcaactctgtcaatgcagggtggaatcaggaccccacccacgtcatcaggtttcctcttaacgggtattgtcgcctcaacagcgtacaagtgttggagcgactcttccagaggggatttagcgttgccgcaagctgtgggggaggggtggattcctcccagtttagcgagtacgtcctatgccgtgaggaaagaaggcctcagcctaccccaaccgctgtgcgtattaagcaggagccgcttgactag

SEQ ID NO: 320015 - DNA, 2338 bp, Artificial Sequence
  derived and/or modified sequence
gaaagtaactccaggacgagaccggagcgacccgcgcagcgagcataggcggcgaagctgcgcccggcgcccgagaccggcagctgcgtggggcgggggctgcgcccgagcccgatctgccggctccgagcttaagcagtggtctcggaaagagggtcgtggtcccgcacggatgcgcttgttgggagaaaccttggagattcacggcaaggcgtaaagcctggggcttccaacgatactctgggcagggatggaagcctagatgcctcaccgcaaggagcggccgagcgggtcctcgcttcacacacacggcagcaccggcaccgcggagggaggaaacatgtcccggctgtctctcacccggtcgcctgtgtctcccctggctgcccagggcatccccctgccagcccagctcaccaagtccaatgcacctgtgcacatcgatgtgggcggccacatgtacaccagcagcctggccacgctcaccaagtaccctgactccaggataagccgcctcttcaatggcactgaacccatcgtcctggacagtttgaagcaacattatttcattgaccgggatggggagattttccgctacgtcctgagcttcctgcggacgtccaagctgctgcttccggatgactttaaggacttcagtctgctgtacgaggaggcgcgctactatcagctccagcccatggtgcgcgagctggagcgctggcagcaggagcaggagcagcggcgccgcagccgggcctgtgactgcctggtggtgcgcgtcacgcccgacttgggcgagcggatcgcactcagcggcgagaaggccctcatcgaggaggtcttccccgagaccggagacgtcatgtgcaactccgtcaacgccggctggaaccaggaccccacgcacgtcatccgcttcccgctcaatggctactgccggctcaactcggtacaggtcctggagcggctgttccagaggggtttcagcgtggctgcgtcctgtgggggcggtgtggactcctcccagttcagcgagtatgtgctttgccgggaggagcggcggccgcagcccacccccactgctgttcgaatcaagcaggaacccctggactaggccctgcttcagtgcccacctgggcccccccagggacctggaaacagtgctggggagttctgcctgtgtatacttggccgtgggcatgagaccgagggtgaggctggagggtccaaagctggcccagcgagcaccagggtcccaggtgtcatggcaacagaacgtgggatgctggaggcatgcctgcagaaggactgttgatgcgacccaaagatacagcggtgggatctctgctgccagctctcccagcccctcagcttcgcagcctggcgcagcatcctctgaggccccggggcctgttggggcggggttggaagagccgtctgcagctacttcagaggagctgtttatccctctccacgcggggcagactctggcgggtctcctagcgtccgagagatggcttattttccagtatttaaaatggatgcagccctaactgcaaaagtcagagaggctgacaaggaccaatgcttctttatctggtgctcagttctcagtcagacgtgcagcatggctgcagggtggaccagctgcctggcattcaggcccagatgcctgcagggctggggctctcgggacagatgcagggatgtgtgctgcagggctgctgggaggagagtggtgggggcctgagggctgagtgattctgtaaccacctgagaccttcacgtttgctgccgttgggggctcaggctgcactccccgggtcacctgacctgctgcccaggggcttccagtcctgtctgtgtggactggcacctgggctgctggagaagtctcctcccgttcggaccagcctcagggctgcacgttacctcaggaatgggccccaccatgaaggggcccatctgtcagcagcgtcttctaggtccccagctcagggagccatccccagctccagttttctcatgcgaatatgcacagttttaattcacgttgttacactagcctgccgatgagacccagacacaggcagacctggcgctcttgacccctgattccagtgaggactggccctgaggagtccttgcagacctgctgcctcccccacgacaggcccaaagatggaccccccctggccttgtgacagctccccaagtgttctccggtggagaaactgcagaggactggtgggcggggctccccagccatcaccatcctgtgtacaatggctgtagacttgtatatggctcctttaatattgtaaagatgctgatgtac

SEQ ID NO: 320016 - protein, 495 aa, Artificial Sequence
  derived and/or modified sequence
MRLTRCQAALAAAITLNLLVLFYVSWLQHQPRNSRARGPRRASAAGPRVTVLVREFEAFDNAVPELVDSFLQQDPAQPVVVAADTLPYPPLALPRIPNVRLALLQPALDRPAAASRPETYVATEFVALVPDGARAEAPGLLERMVEALRAGSARLVAAPVATANPARCLALNVSLREWTARYGAAPAAPRCDALDGDAVVLLRARDLFNLSAPLARPVGTSLFLQTALRGWAVQLLDLTFAAARQPPLATAHARWKAEREGRARRAALLRALGIRLVSWEGGRLEWFGCNKETTRCFGTVVGDTPAYLYEERWTPPCCLRALRETARYVVGVLEAAGVRYWLEGGSLLGAARHGDIIPWDYDVDLGIYLEDVGNCEQLRGAEAGSVVDERGFVWEKAVEGDFFRVQYSESNHLHVDLWPFYPRNGVMTKDTWLDHRQDVEFPEHFLQPLVPLPFAGFVAQAPNNYRRFLELKFGPGVIENPQYPNPALLSLTGSG

SEQ ID NO: 320017 - DNA, 3422 bp, Artificial Sequence
  derived and/or modified sequence
gtcccggcggccattgctccaagatggcggcggcggcggcagcgggagcgcagctcagctgggctggaactgccctcctggaactcccccagcctacaacctaggaggtgcagggactgaggctcaggccaaatcgcaactcagacccagtgaacccaaggcctgaagagaatttggattcatttaccttgttttgtggggactggagagacaagtaaactctcagagtaactgtcccctctgactaccatttctaaggatgccccggaggcccagctagccccagacttcggccccatgcggctcacccgctgccaggctgccctggcggccgccatcaccctcaaccttctggtcctcttctatgtctcgtggctgcagcaccagcctaggaattcccgggcccgggggccccgtcgtgcctctgctgccggcccccgtgtcaccgtcctggtgcgggagttcgaggcatttgacaacgcggtgcccgagctggtagactccttcctgcagcaagacccagcccagcccgtggtggtggcagccgacacgctcccctacccgcccctggccctgccccgcatccccaacgtgcgtctggcgctgctccagcccgccctggaccggccagccgcagcctcgcgcccggagacctacgtggccaccgagtttgtggccctagtacctgatggggcgcgggctgaggcacctggcctgctggagcgcatggtggaggcgctccgcgcaggaagcgcacgtctggtggccgccccggttgccacggccaaccctgccaggtgcctggccctgaacgtcagcctgcgagagtggaccgcccgctatggcgcagcccccgccgcgccccgctgcgacgccctggacggagatgctgtggtgctcctgcgcgcccgcgacctcttcaacctctcggcgcccctggcccggccggtgggcaccagcctctttctgcagaccgcccttcgcggctgggcggtgcagctgctggacttgaccttcgccgcggcgcgccagcccccgctggccacggcccacgcgcgctggaaggctgagcgcgagggacgcgctcggcgggcggcgctgctccgcgcgctgggcatccgcctagtgagctgggaaggcgggcggctggagtggttcggctgcaacaaggagaccacgcgctgcttcggaaccgtggtgggcgacacgcccgcctacctctacgaggagcgctggacgcccccctgctgcctgcgcgcgctgcgcgagaccgcccgctatgtggtgggcgtgctggaggctgcgggcgtgcgctactggctcgagggcggctcactgctgggggccgcccgccacggggacatcatcccatgggactacgacgtggacctgggcatctacttggaggacgtgggcaactgcgagcagctgcggggggcagaggccggctcggtggtggatgagcgcggcttcgtatgggagaaggcggtcgagggcgactttttccgcgtgcagtacagcgaaagcaaccacttgcacgtggacctgtggcccttctacccccgcaatggcgtcatgaccaaggacacgtggctggaccaccggcaggatgtggagtttcccgagcacttcctgcagccgctggtgcccctgccctttgccggcttcgtggcgcaggcgcctaacaactaccgccgcttcctggagctcaagttcgggcccggggtcatcgagaacccccagtaccccaacccggcactgctgagtctgacgggaagcggctgaagccctgataacctcgcctttgtttttcgggggtctgtctggatgtggagaagctctgtgtgagcggtgaggggtggagggatgtcgcggagaggggaagggggaaactgaccaagaaagaaattctaaggagagcatgagagaaggctggcattggcaggaggagagcaccaggacgaggatgggaagcgacctccagatttatcaaatggtcatgcccactgggagccgtggatatgcgtggggacatcctgggtcatctcagtcatggagggagacggggatgtcacgccgtcccgcagggcccagcacagccccagacccgaaaaaagtgttctgcccaagattccgagagccctgcgctctagggcaggggcagagttttggaaacagtgcaggctctggagccagactggcgagattcaaatcctggctctatcgcttcggagccaggtgggcctgggggggcgtcgcagtctctctgtgcctcagttgcttccaggatgcgggacccttggctgcaggggttgcttccgccactagagggcgcgccggtcccgctcctggtggcccactgtggctgcccgggcgacagtacgcccagggcctgtgttccatagccatctactctcttgagcctttggacttctctccaagcccctgtgggaggcggacagcagtgaccacctccccttcttttggactgcgacctccttccctcctgggagagccctgtgacctgcatgctactcttaactgttctattcaagactgaatagaagtatttcagtcttgcagaggaggaaatgctcagagctccgaggtgcggctgtggtcgagaaccgggtgctgggccgggcgcgggggctcacgcctgtaatcccagcactttgggaggccgaggtgggaggatcgcttgagcccaggagtctgagaccagcctcggcaacatgccaagaccccgtctctatttttaaaaaagaaaaagaaccgacttctgaatcgcagctccactcatgactaatacctcattatttcagctgtctgcacctaattccccacttgcacggcagtgtagacaataaccatagctcacactcactgagcacctactgggtaccaggcaccattctcagtgtttcacctggatcaactaatgcgtccctcacctcagccctctgaagtgacagctgctattattttcattacacagatgaaaaagctgaggccagaatcgtgaagtcacttgctcaaggtcaggcagcttaggaaggggcagatcgggggcttgaacccaggtggtcaggctctggagcccacaattgtcttacccactatgcccctctctagtcatggtccccaagaggggcttggagacccacttagcaggtgaaagcaatggcagccttccttatttgattatgcacctaagaataaatggtatttgggcatgtattcccaatatgtgtatatttatttataaatatatacagatactattatctgtatgttagtaataaagcttaaattattccattttaaaattatgaatatgaatagggttttttttatgtttcttgcctcatcccaatgacttttgcacacccaggtgtgagcacccagcattcaagaccacg

SEQ ID NO: 320018 - DNA, 3474 bp, Artificial Sequence
  derived and/or modified sequence
gtcccggcggccattgctccaagatggcggcggcggcggcagcgggagcgcagctcagctgggctggaactgccctcctggaactcccccagcctacaacctaggaggtgcagggactgaggctcaggccaaatcgcaactcagacccagtgaacccaaggcctgaagagaatttggattcatttaccttgttttgtggggactggagagacaagtaaactctcagagtaactgtcccctctgactaccatttctaaggcaagccccctgtttctactcttgcgccccctgctggtttcctgccctgtctgatgccccggaggcccagctagccccagacttcggccccatgcggctcacccgctgccaggctgccctggcggccgccatcaccctcaaccttctggtcctcttctatgtctcgtggctgcagcaccagcctaggaattcccgggcccgggggccccgtcgtgcctctgctgccggcccccgtgtcaccgtcctggtgcgggagttcgaggcatttgacaacgcggtgcccgagctggtagactccttcctgcagcaagacccagcccagcccgtggtggtggcagccgacacgctcccctacccgcccctggccctgccccgcatccccaacgtgcgtctggcgctgctccagcccgccctggaccggccagccgcagcctcgcgcccggagacctacgtggccaccgagtttgtggccctagtacctgatggggcgcgggctgaggcacctggcctgctggagcgcatggtggaggcgctccgcgcaggaagcgcacgtctggtggccgccccggttgccacggccaaccctgccaggtgcctggccctgaacgtcagcctgcgagagtggaccgcccgctatggcgcagcccccgccgcgccccgctgcgacgccctggacggagatgctgtggtgctcctgcgcgcccgcgacctcttcaacctctcggcgcccctggcccggccggtgggcaccagcctctttctgcagaccgcccttcgcggctgggcggtgcagctgctggacttgaccttcgccgcggcgcgccagcccccgctggccacggcccacgcgcgctggaaggctgagcgcgagggacgcgctcggcgggcggcgctgctccgcgcgctgggcatccgcctagtgagctgggaaggcgggcggctggagtggttcggctgcaacaaggagaccacgcgctgcttcggaaccgtggtgggcgacacgcccgcctacctctacgaggagcgctggacgcccccctgctgcctgcgcgcgctgcgcgagaccgcccgctatgtggtgggcgtgctggaggctgcgggcgtgcgctactggctcgagggcggctcactgctgggggccgcccgccacggggacatcatcccatgggactacgacgtggacctgggcatctacttggaggacgtgggcaactgcgagcagctgcggggggcagaggccggctcggtggtggatgagcgcggcttcgtatgggagaaggcggtcgagggcgactttttccgcgtgcagtacagcgaaagcaaccacttgcacgtggacctgtggcccttctacccccgcaatggcgtcatgaccaaggacacgtggctggaccaccggcaggatgtggagtttcccgagcacttcctgcagccgctggtgcccctgccctttgccggcttcgtggcgcaggcgcctaacaactaccgccgcttcctggagctcaagttcgggcccggggtcatcgagaacccccagtaccccaacccggcactgctgagtctgacgggaagcggctgaagccctgataacctcgcctttgtttttcgggggtctgtctggatgtggagaagctctgtgtgagcggtgaggggtggagggatgtcgcggagaggggaagggggaaactgaccaagaaagaaattctaaggagagcatgagagaaggctggcattggcaggaggagagcaccaggacgaggatgggaagcgacctccagatttatcaaatggtcatgcccactgggagccgtggatatgcgtggggacatcctgggtcatctcagtcatggagggagacggggatgtcacgccgtcccgcagggcccagcacagccccagacccgaaaaaagtgttctgcccaagattccgagagccctgcgctctagggcaggggcagagttttggaaacagtgcaggctctggagccagactggcgagattcaaatcctggctctatcgcttcggagccaggtgggcctgggggggcgtcgcagtctctctgtgcctcagttgcttccaggatgcgggacccttggctgcaggggttgcttccgccactagagggcgcgccggtcccgctcctggtggcccactgtggctgcccgggcgacagtacgcccagggcctgtgttccatagccatctactctcttgagcctttggacttctctccaagcccctgtgggaggcggacagcagtgaccacctccccttcttttggactgcgacctccttccctcctgggagagccctgtgacctgcatgctactcttaactgttctattcaagactgaatagaagtatttcagtcttgcagaggaggaaatgctcagagctccgaggtgcggctgtggtcgagaaccgggtgctgggccgggcgcgggggctcacgcctgtaatcccagcactttgggaggccgaggtgggaggatcgcttgagcccaggagtctgagaccagcctcggcaacatgccaagaccccgtctctatttttaaaaaagaaaaagaaccgacttctgaatcgcagctccactcatgactaatacctcattatttcagctgtctgcacctaattccccacttgcacggcagtgtagacaataaccatagctcacactcactgagcacctactgggtaccaggcaccattctcagtgtttcacctggatcaactaatgcgtccctcacctcagccctctgaagtgacagctgctattattttcattacacagatgaaaaagctgaggccagaatcgtgaagtcacttgctcaaggtcaggcagcttaggaaggggcagatcgggggcttgaacccaggtggtcaggctctggagcccacaattgtcttacccactatgcccctctctagtcatggtccccaagaggggcttggagacccacttagcaggtgaaagcaatggcagccttccttatttgattatgcacctaagaataaatggtatttgggcatgtattcccaatatgtgtatatttatttataaatatatacagatactattatctgtatgttagtaataaagcttaaattattccattttaaaattatgaatatgaatagggttttttttatgtttcttgcctcatcccaatgacttttgcacacccaggtgtgagcacccagcattcaagaccacg

SEQ ID NO: 320019 - DNA, 1488 bp, Artificial Sequence
  derived and/or modified sequence
atgcgactgactaggtgtcaagccgcactagccgcagctattactctgaacttactcgttttgttctacgtgtcgtggctccagcaccaaccgcggaactctcgggctcgggggcctagacgcgctagcgccgcaggaccacgcgtgacggtgctggtgagggagttcgaggcttttgacaacgccgtgcccgagctggtagatagctttcttcagcaggatcctgctcagcctgtcgtagtcgccgccgacacactaccttatccgcccctggcactgccccgaattcctaatgtccgccttgctctcctccagcccgctttggataggcccgctgctgccagccgacccgagacttacgtagccaccgaatttgtcgcgctggtaccagacggggctcgagccgaggcacccgggctcctggagcgcatggtagaagctttgcgagccggttccgccaggctggttgcggcgccagttgccacagccaatcccgccagatgtctcgctttgaacgtgtctctgcgagagtggactgctaggtatggagctgcccctgcggcaccccgctgtgatgccctcgatggcgatgcagtcgtccttctccgggcacgggacctgttcaatctaagcgctccactggcacgccctgtcggaacttcactttttctgcaaactgctctgcgcggatgggcagtgcaactgttagaccttacatttgccgctgcacggcagcccccattagcgaccgctcacgcaaggtggaaagccgagcgcgagggaagggcaagaagggctgccctcctgagagctctgggaatccgcctcgtgtcatgggagggcgggcgcttggagtggtttggctgcaacaaggagacgacacggtgctttggtaccgtagtcggggatacccccgcctacctgtatgaagagagatggacacctccctgctgcctgcgagccttgcgggagacagcccgttatgttgtgggcgtcttagaagctgccggggtgcggtactggctggaagggggctccctcctgggagctgcacggcatggcgatattattccctgggattacgacgtggacctgggaatctacctggaggatgtcggcaactgtgaacagttgaggggggccgaggcgggatccgtggttgacgaacggggatttgtctgggagaaagcagtggaaggagacttcttccgcgtacaatattcagaatccaaccatctccacgtcgacctgtggcccttttacccccgcaatggcgtcatgaccaaggatacctggctggatcaccgccaagatgtggaatttcccgagcatttcttacagcccctggtgcctctgcccttcgcgggattcgtggctcaggctcctaataattaccgtaggttcctcgaactgaagtttggacccggcgttatagagaaccctcagtaccctaaccccgcactgctcagcctcacagggtccgggtag

SEQ ID NO: 320020 - DNA, 1488 bp, Artificial Sequence
  derived and/or modified sequence
atgagactgacacgctgccaggcagctctcgcagcagcaataactctcaacctgttggtcctcttttatgtgagctggttgcagcatcagcctagaaacagtagagccagggggcccaggcgtgcctctgccgccggaccccgtgtcaccgtcctggtgcgcgaattcgaggccttcgataatgccgttcccgagctagtggatagctttctccagcaggacccagcgcagcccgtggtggtggctgccgataccttaccgtatccccctctggccttgccgcgcatacccaacgttaggctcgcactgctgcagcctgccctggaccggcctgccgccgcctctaggcccgagacatacgtggccactgagtttgttgccctagtacctgatggtgcccgagctgaggcacccgggctccttgaaagaatggtcgaggcattacgcgccggcagcgctcggctggtcgcggcaccagtcgcaacagctaacccagctaggtgcctggctctgaacgtctcattacgcgagtggactgcacggtatggggcggctcccgcagcacctcggtgcgacgccttagatggagacgctgtcgtgctactccgagcacgggacttgtttaacctgagcgcccccttggccagaccggtaggcacaagtctcttcctccagactgccctgcgggggtgggccgttcagcttctggacctcactttcgccgccgcaagacaaccccctctagccactgcgcacgcgcgctggaaggccgaaagagagggacgggcgcgccgggccgctctcctccgggctctgggcattaggctggtctcctgggagggcggtcggctcgagtggtttgggtgcaacaaggaaaccaccagatgttttgggaccgtcgtgggtgatactccagcgtacctttatgaggagcgctggaccccgccctgctgccttcgggctctccgggagaccgcccggtacgtggtcggcgtgctggaagctgccggggtgaggtactggctggagggtggatctctgcttggcgctgcccgacacggcgacatcatcccttgggattatgacgtggacctggggatctatcttgaagacgtgggcaactgtgaacaactgcgaggcgccgaagcagggagcgtggtggatgaacgaggctttgtgtgggagaaggctgtagaaggggacttctttcgcgtccagtacagcgagtccaatcatcttcatgttgatctgtggcccttctatcccagaaacggtgtcatgaccaaagacacgtggctcgatcaccgtcaggacgttgagtttccagagcattttctacagcccttagttccattaccattcgcagggtttgtggcgcaggccccaaacaattaccggaggttcctagagctaaaatttggtccaggggttatagagaacccgcagtatcccaaccctgccctgctatctctgacaggcagcggctag

SEQ ID NO: 320021 - DNA, 1488 bp, Artificial Sequence
  derived and/or modified sequence
atgaggctgacccgctgccaggccgccctggccgccgccatcaccctgaacctgctggtgctcttctacgtgtcctggctgcagcaccagcccaggaacagccgggcccggggcccccggcgggccagcgctgctggcccccgggtgacagtgctggtgcgggagtttgaggcctttgacaatgctgtgcctgagctggtggacagcttcctgcagcaggaccctgcccagcctgtggtggtggccgctgacaccctgccctacccacccctggccctgccccgcatccccaacgtgcggctggccctgctgcagcctgccctggacaggcctgctgctgccagcaggcctgagacctacgtggccacagaatttgtggccctggtgcctgatggagcccgggcagaggcccctggcctgctggagaggatggtggaggccctgcgggccggcagcgcccggctggtggccgcccctgtggccacagccaacccagcccgctgcctggccctgaatgtgtccctgcgggagtggacagcccgctacggggccgccccagctgccccccgctgtgatgccctggatggagatgctgtggtgctgctgcgggcccgggacctcttcaacctgagcgcccccctggcccggcctgtgggcaccagcctcttcctgcagacagccctgcggggctgggccgtgcagctgctggacctgacctttgctgctgcccggcagccccccctggccacagcccacgcccgctggaaggccgagcgggagggccgggcccggcgggccgccctgctgcgggccctgggcatccggctggtgtcctgggagggcggccgcctggagtggtttggctgcaacaaggagaccacccgctgctttggaacagtggtgggggacaccccagcctacctgtatgaggagcgctggaccccaccctgctgcctgcgggccctgcgggagacagcccgctacgtggtgggcgtgctggaggccgccggcgtgcgctactggctggagggcggcagcctgctgggcgccgcccggcatggagacatcatcccctgggactatgatgtggacctgggcatctacctggaggatgtgggcaactgtgagcagctgcggggagctgaggccggctctgtggtggatgagcggggctttgtgtgggagaaggctgtggagggggacttcttccgggtgcagtacagcgagagcaaccacctgcacgtggacctgtggcccttctaccccagaaatggagtgatgaccaaggacacctggctggaccaccggcaggatgtggagttccctgagcacttcctgcagcccctggtgcccctgccctttgctggctttgtggcccaggcccccaacaactaccgccgcttcctggagctgaagtttggacctggggtgattgagaacccccagtaccccaacccagccctgctgagcctgaccggcagcggctag

SEQ ID NO: 320022 - DNA, 1488 bp, Artificial Sequence
  derived and/or modified sequence
atgcggctgacccggtgccaggccgccctggccgccgccatcaccctgaatttgttagtcctgttttatgtctcatggctacagcaccaaccccgtaatagcagggctcggggcccccgaagggcatcagcagcaggaccaagggtgactgtccttgtcagggaatttgaggctttcgataacgccgtgcctgaattggtcgattcattcctacaacaggaccctgctcagcccgttgtcgttgcagctgacactctcccctatccacccctggccctgccgcgtattcccaacgtacggctagcacttctgcagcccgccttggaccgtccagcagctgcttccaggcctgagacatatgtggctacggaattcgtcgcgttggtcccggacggggctcgcgccgaagcccccgggttgctagagcggatggtggaagcccttagagctggctcagcccgccttgtcgccgccccagtcgcaaccgccaaccctgcacgatgcttggcactaaacgtgagcctcagagagtggaccgcccgctacggggccgcaccagctgctcccaggtgtgatgctctagacggagacgcagtcgtcctgctgagggcgcgcgatctgtttaatttatccgcgccgctggcacggccggtgggcaccagcctgtttctccagaccgcccttaggggttgggccgttcagctgctggacctgacttttgccgccgcacggcagcccccactggctaccgctcacgccaggtggaaggctgaacgtgagggtagggctagaagggccgccttactgcgagccttgggcatcagattagtgtcttgggagggcggcaggctagagtggtttggctgtaataaagagacgacacgctgcttcgggaccgtggttggcgacaccccggcctacttatacgaggagcggtggacccccccatgttgcctcagagcccttcgagagaccgccaggtacgtcgtgggagtgcttgaggcagcaggcgtaagatattggctggagggcgggtcgctcctcggagctgcacgacatggtgacattataccatgggattacgatgtcgatttgggcatttatttggaggatgtgggaaattgtgagcagctgaggggagctgaggctggcagtgtggttgatgaacgtggctttgtgtgggagaaggctgtggagggggacttcttcagagtccagtatagcgaaagtaaccacctgcatgtggatctgtggcccttttacccaagaaatggcgtgatgactaaggacacatggctcgatcaccggcaggacgtggagttccctgaacacttcctgcagcccctagttccactgccctttgctggcttcgtggcccaagctccgaacaattaccggcggtttctcgagttgaagttcgggcccggagtgatcgagaacccacagtacccaaaccccgcgttgctgagcctgaccggttcagggtag

SEQ ID NO: 320023 - DNA, 1488 bp, Artificial Sequence
  derived and/or modified sequence
atgcggctgacccggtgccaggccgccctggccgccgccatcacccttaatctgttggtcttattttatgtttcatggctccagcaccaacctcggaactcccgggccagggggccccggagagccagcgccgcaggtccacgtgttactgtgctcgttagagagtttgaagccttcgacaacgctgtgcccgaactggtagacagtttcctccaacaggaccctgctcagccagttgtggtggctgcagatacgctgccatacccccctctggcccttccccggatcccaaatgtgaggcttgcactgcttcagcccgctctcgacaggcccgctgctgcttcccggccggagacttacgtggccacagagtttgtcgcattggtcccagacggggcccgggctgaggcacccgggttattggaacggatggttgaggccctgcgtgccggctctgcgcggttggtggctgcccccgtcgctacagccaatcccgccaggtgcctcgccctgaatgtgtcgctgcgggagtggacagctagatacggagccgccccagcggctccgcggtgcgacgctctggatggagacgccgtggtgctgcttcgggctagagatttgttcaatctatccgccccactggctagacctgtgggcacaagcctgttcctacagactgccctacgcggatgggctgtccagctgttggatctgacatttgccgctgctcggcagccccctctggcaaccgcccacgcacgatggaaggcagaaagagaaggccgcgctaggcgtgctgctcttcttcgtgctcttggcatcaggctggttagctgggaaggcgggaggctagaatggttcggctgcaacaaagaaactaccaggtgtttcgggactgtggtgggggacacccccgcttacctttatgaggaacgttggactccaccatgttgcctgagggcactccgcgagacagcaagatacgtcgtcggcgtgttagaggccgcgggcgtgagatattggttggaggggggcagcctactcggagcggctcggcatggggacattatcccctgggactatgacgtggatcttgggatctaccttgaagacgtcggcaactgcgaacaactaagaggagccgaggcagggagcgtggtggacgagagaggctttgtgtgggaaaaagcggtcgaaggcgacttcttcagagtgcagtactcagagtctaatcacctccatgttgacctgtggcctttctatcccagaaatggtgtgatgaccaaggatacctggctggaccaccggcaagacgtcgaattccctgaacacttcttgcagcccctcgttccactcccttttgccggattcgtagcacaggcacccaacaactatagaagatttcttgaattgaagttcggccctggcgtaatagaaaacccacagtaccccaatccagccctgctgtctctcaccgggagcggctag

SEQ ID NO: 320024 - DNA, 1488 bp, Artificial Sequence
  derived and/or modified sequence
atgcgcctcacccggtgtcaggccgcattggccgctgccattaccctgaacctgctcgttcttttttatgtgtcttggctccagcaccaacctcggaattcgagagcaagaggcccaagacgagccagcgccgcagggccaagagtgactgtgctcgttagagaattcgaggcattcgataatgctgtgccagaacttgtcgattctttcctgcaacaggatccagctcagcccgtggtcgtggcagcggacaccctgccgtatccaccactcgctctgcctagaataccgaatgtgaggttagctctcctgcagcctgcgctggatagacccgcagcagcctcaagaccggaaacatatgttgccaccgagttcgtcgcacttgtgccggatggtgcccgagcagaggctcctggtctcttagagcggatggttgaggccttgcgagctggctcagccaggttggtcgccgcacctgttgccaccgctaatcccgctcgatgccttgcactgaatgtcagcctgcgggaatggacagccaggtatggcgcagcccctgccgcaccaaggtgcgacgcgctggacggtgatgcagttgtgttgctgcgggctagggacttgtttaacctgtcggctcctctggcccgacccgtgggcacttccctgttcctgcagaccgccctaagaggctgggctgttcagctgctcgaccttactttcgccgcagccagacagccccctctggcaaccgcacacgcgagatggaaagcggagcgcgagggccgtgccagacgcgctgcgctgttgagggccttagggattcgcctggtatcatgggaggggggaaggctcgagtggttcggatgcaacaaagagaccaccaggtgtttcggaaccgtcgtcggcgacacacctgcctacttgtatgaggagaggtggaccccgccttgttgtctccgggcactcagagagacagctcggtacgtagtgggggtgctggaagcggctggggtgcgatattggcttgagggcggttcactcttgggggcagcaagacacggggacatcattccttgggattacgacgttgacttagggatctatttagaagacgtgggcaattgtgagcagctgaggggcgcagaagctggttctgtcgtcgacgaacggggttttgtgtgggagaaggcagtagagggcgatttcttcagagtacaatattcagagtcaaatcacttgcacgtggacctttggccattctaccctcgaaatggcgtcatgacgaaggacacctggttggatcaccgccaggatgtcgagttccccgagcactttctgcagcctctggtgcccttacctttcgccggatttgtggctcaagccccaaacaactaccgcagatttctcgaattaaaatttggacctggggtcatcgagaacccccagtaccccaaccctgccctgctttctctgaccggatccggatag

SEQ ID NO: 320025 - DNA, 1488 bp, Artificial Sequence
  derived and/or modified sequence
atgcgactgactcgatgtcaggcggctctggccgctgcaatcaccttgaacttacttgttttgttctatgtgtcatggttgcagcatcagcctagaaattcccgcgctagaggaccaagacgggcaagcgccgcagggccaagagttacagtactggtccgcgaatttgaagccttcgacaacgcagtccccgagctggtcgattcattcctgcagcaggaccccgctcaacctgtggttgtagccgcagataccttaccctacccaccactggcactgcccagaattccaaacgtgagactagctctcctccagccagcactggatagaccggcagcagcttcacggcctgagacgtacgtagccacggaatttgtcgcgctggtgcctgatggagctagagccgaagccccaggtcttcttgagcggatggtcgaagccctgcgggctgggagcgccaggctagttgccgctccggtggcaacagccaacccagccaggtgtttggcccttaatgtctccctgcgcgagtggactgcccgttacggagcagcccctgcggctccccgatgtgatgctcttgacggtgacgccgttgtgttactgagagccagggacttattcaacttgtctgctcccctggcaaggccggttgggacatcactctttttacaaactgctttaagaggatgggccgttcagctcctggatcttacctttgcagctgccagacagcctccactggccactgcacacgctcgctggaaagccgagcgggagggaagggctaggcgcgcagccttgctacgcgctttagggatacggctagtaagttgggaagggggacgcctggagtggttcgggtgcaacaaagagactacccgctgtttcggtactgtggtcggcgatacccccgcttacctctacgaagagcggtggacgcctccttgctgcctgagagcactgagagagacggcacggtacgtggtgggagtcctggaagctgccggagttcgctactggctcgagggaggatctttgttgggggcagcgaggcatggcgatattattccttgggactacgacgtcgacttggggatctacctggaggacgtgggcaactgcgaacagttgagaggcgcagaggcagggtctgtagtggatgagcggggattcgtgtgggaaaaggccgtcgagggagacttcttccgggtacagtactccgagtcgaaccacttacatgtggacctatggccattttacccaagaaacggggtaatgaccaaggatacctggctggatcaccggcaggacgtagagttccccgagcattttcttcagccgctcgttcccctccccttcgcaggctttgtcgcccaggcccctaacaactataggcgtttcctggaactgaaatttggtcccggagtcatcgagaacccccagtatcccaatccggcactacttagcttgaccggatctgggtag

SEQ ID NO: 320026 - DNA, 1485 bp, Artificial Sequence
  derived and/or modified sequence
atgcgcctgacccgctgccaggccgccctggccgccgccatcaccctgaacctgctggtgctgttctacgtgagctggctgcagcaccagccccgcaacagccgcgcccgcggcccccgccgcgccagcgccgccggcccccgcgtgaccgtgctggtgcgcgagttcgaggccttcgacaacgccgtgcccgagctggtggacagcttcctgcagcaggaccccgcccagcccgtggtggtggccgccgacaccctgccctacccccccctggccctgccccgcatccccaacgtgcgcctggccctgctgcagcccgccctggaccgccccgccgccgccagccgccccgagacctacgtggccaccgagttcgtggccctggtgcccgacggcgcccgcgccgaggcccccggcctgctggagcgcatggtggaggccctgcgcgccggcagcgcccgcctggtggccgcccccgtggccaccgccaaccccgcccgctgcctggccctgaacgtgagcctgcgcgagtggaccgcccgctacggcgccgcccccgccgccccccgctgcgacgccctggacggcgacgccgtggtgctgctgcgcgcccgcgacctgttcaacctgagcgcccccctggcccgccccgtgggcaccagcctgttcctgcagaccgccctgcgcggctgggccgtgcagctgctggacctgaccttcgccgccgcccgccagccccccctggccaccgcccacgcccgctggaaggccgagcgcgagggccgcgcccgccgcgccgccctgctgcgcgccctgggcatccgcctggtgagctgggagggcggccgcctggagtggttcggctgcaacaaggagaccacccgctgcttcggcaccgtggtgggcgacacccccgcctacctgtacgaggagcgctggacccccccctgctgcctgcgcgccctgcgcgagaccgcccgctacgtggtgggcgtgctggaggccgccggcgtgcgctactggctggagggcggcagcctgctgggcgccgcccgccacggcgacatcatcccctgggactacgacgtggacctgggcatctacctggaggacgtgggcaactgcgagcagctgcgcggcgccgaggccggcagcgtggtggacgagcgcggcttcgtgtgggagaaggccgtggagggcgacttcttccgcgtgcagtacagcgagagcaaccacctgcacgtggacctgtggcccttctacccccgcaacggcgtgatgaccaaggacacctggctggaccaccgccaggacgtggagttccccgagcacttcctgcagcccctggtgcccctgcccttcgccggcttcgtggcccaggcccccaacaactaccgccgcttcctggagctgaagttcggccccggcgtgatcgagaacccccagtaccccaaccccgccctgctgagcctgaccggcagcggc

SEQ ID NO: 320027 - DNA, 1488 bp, Artificial Sequence
  derived and/or modified sequence
atgagactgaccagatgccaggccgccctggccgccgccatcaccctgaacctgctggtgctgttctacgtgagctggctgcagcaccagcccagaaacagcagagccagaggccccagaagagccagcgccgccggccccagagtgaccgtgctggtgagagagttcgaggccttcgacaacgccgtgcccgagctggtggacagcttcctgcagcaggaccccgcccagcccgtggtggtggccgccgacaccctgccctacccccccctggccctgcccagaatccccaacgtgagactggccctgctgcagcccgccctggacagacccgccgccgccagcagacccgagacctacgtggccaccgagttcgtggccctggtgcccgacggcgccagagccgaggcccccggcctgctggagagaatggtggaggccctgagagccggcagcgccagactggtggccgcccccgtggccaccgccaaccccgccagatgcctggccctgaacgtgagcctgagagagtggaccgccagatacggcgccgcccccgccgcccccagatgcgacgccctggacggcgacgccgtggtgctgctgagagccagagacctgttcaacctgagcgcccccctggccagacccgtgggcaccagcctgttcctgcagaccgccctgagaggctgggccgtgcagctgctggacctgaccttcgccgccgccagacagccccccctggccaccgcccacgccagatggaaggccgagagagagggcagagccagaagagccgccctgctgagagccctgggcatcagactggtgagctgggagggcggcagactggagtggttcggctgcaacaaggagaccaccagatgcttcggcaccgtggtgggcgacacccccgcctacctgtacgaggagagatggacccccccctgctgcctgagagccctgagagagaccgccagatacgtggtgggcgtgctggaggccgccggcgtgagatactggctggagggcggcagcctgctgggcgccgccagacacggcgacatcatcccctgggactacgacgtggacctgggcatctacctggaggacgtgggcaactgcgagcagctgagaggcgccgaggccggcagcgtggtggacgagagaggcttcgtgtgggagaaggccgtggagggcgacttcttcagagtgcagtacagcgagagcaaccacctgcacgtggacctgtggcccttctaccccagaaacggcgtgatgaccaaggacacctggctggaccacagacaggacgtggagttccccgagcacttcctgcagcccctggtgcccctgcccttcgccggcttcgtggcccaggcccccaacaactacagaagattcctggagctgaagttcggccccggcgtgatcgagaacccccagtaccccaaccccgccctgctgagcctgaccggcagcggctag

SEQ ID NO: 320028 - DNA, 6811 bp, Artificial Sequence
  derived and/or modified sequence
ctctttctccccaggccgaagcctcgggacggccctggaagccgaccatggcagccgtgaccatgtcggtgcccgggcggaaggcgccccccaggccgggcccagtgcccgaggcggcccagccgttcctgttcacgccccgcgggcccagcgcgggtggcgggcctggctcgggcacctccccgcaggtggagtggacggcccggcgtctcgtgtgggtgccttcggagcttcacgggttcgaggcggcggcgctgcgggacgaaggcgaggaggaggcggaggtggagctggcggagagcgggaggcggctgcgactgccgcgggaccagatccagcgcatgaacccgcccaagttcagcaaggccgaggacatggccgagctgacctgcctcaacgaggcctcggtcctgcacaacctccgggagcggtactactccggcctcatctacacgtactccggccttttctgtgtggtcatcaacccgtacaagcagcttcccatctacacagaagccattgtggagatgtaccggggcaagaagcgccacgaggtgccaccccacgtgtacgcagtgaccgagggggcctatcggagcatgctgcaggatcgtgaggaccagtccattctctgcactggagagtctggagctgggaagacggaaaacaccaagaaggtcatccagtacctcgcccacgtggcgtcgtctccaaagggcaggaaggagccgggtgtccccgcctccgtcagcaccgtgtcttatggtgagctggagcggcagctgcttcaggccaaccccatcctagaggcctttggcaatgccaagacagtgaagaatgacaactcctcccgattcggcaaattcatccgcatcaactttgatgttgccgggtacatcgtgggcgccaacattgagacctacctgctggagaagtcgcgggccatccgccaggccaaggacgagtgcagcttccacatcttctaccagctgctggggggcgctggagagcagctcaaagccgacctcctcctcgagccctgctcccactaccggttcctgaccaacgggccgtcatcctctcccggccaggagcgggaactcttccaggagacgctggagtcgctgcgggtcctgggattcagccacgaggaaatcatctccatgctgcggatggtctcagcagttctccagtttggcaacattgccttgaagagagaacggaacaccgatcaagccaccatgcctgacaacacagctgcacagaagctctgccgcctcttgggactgggggtgacggatttctcccgagccttgctcacccctcgcatcaaagttggccgagactatgtgcagaaagcccagactaaggaacaggctgacttcgcgctggaggccctggccaaggccacctacgagcgcctcttccgctggctggttctgcgcctcaaccgggccttggaccgcagcccccgccaaggcgcctccttcctgggcatcctggacatcgcgggctttgagatcttccagctgaactccttcgagcagctctgcatcaactacaccaacgagaagctgcagcagctcttcaaccacaccatgttcgtgctggagcaggaggagtaccagcgtgagggcatcccctggaccttcctcgactttggcctcgacctgcagccctgcatcgacctcatcgagcggccggccaacccccctggactcctggccctgctggatgaggagtgctggttcccgaaggccacagacaagtcgtttgtggagaaggtagcccaggagcagggcggccaccccaagttccagcggccgaggcacctgcgggatcaggccgacttcagtgttctccactacgcgggcaaggtcgactacaaggccaacgagtggctgatgaaaaacatggaccctctgaatgacaacgtcgcagccttgctccaccagagcacagaccggctgacggcagagatctggaaagacgtggagggcatcgtggggctggaacaggtgagcagcctgggcgacggcccaccaggtggccgcccccgtcggggtatgttccggacagtgggacagctctacaaggagtccctgagccgcctcatggccacactcagcaacaccaaccccagttttgtccgctgcattgtccccaaccacgagaagagggccgggaagctggagccacggctggtgctggaccagcttcgctgcaacggggtcctggagggcatccgcatctgtcgccagggcttccccaaccgcatcctcttccaggagttccggcagcgatacgagatcctgacacccaatgccatccccaagggcttcatggatgggaagcaggcctgtgaaaagatgatccaggcgctggaactggaccccaacctctaccgcgtgggacagagcaagatcttcttccgggctggggtcctggcccagctggaagaggagcgagacctgaaggtcaccgacatcatcgtctccttccaggcagctgcccggggatacctggctcgcagggccttccagaagcgccagcagcagcagagcgccctgagggtgatgcagcggaactgcgcggcctacctcaagctgagacactggcagtggtggcggctgtttaccaaggtgaagccactgctgcaggtgacgcggcaggatgaggtgctgcaggcacgggcccaggagctgcagaaagtgcaggagctacagcagcagagcgcccgcgaagttggggagctccagggccgagtggcacagctggaagaggagcgcgcccgcctggcagagcaattgcgagcagaggcagaactgtgtgcagaggccgaggagacgcgggggaggctggcagcccgcaagcaggagctggagctggtggtgtcagagctggaggctcgcgtgggcgaggaggaggagtgcagccgtcaaatgcaaaccgagaagaagaggctgcagcagcacatacaggagctagaggcccaccttgaggctgaggagggtgcgcggcagaagctgcagctggagaaggtgacgacagaggcaaaaatgaagaaatttgaagaggacctgctgctcctggaagaccagaattccaagctgagcaaggagcggaagctgctggaagatcgtctggccgagttctcatcccaggcagctgaggaggaggagaaggtcaagagcctcaataagctacggctcaaatatgaggccacaatcgcagacatggaggaccgcctacggaaggaggagaagggtcgccaggagctggagaagctgaagcggaggctggatggggagagctcagagctgcaggagcagatggtggagcagcaacagcgggcagaggagctgcgggcccagctgggccggaaggaggaggagctgcaggctgccctggccagggcagaagacgagggtggggcccgggcccagctgctgaaatccctgcgggaggctcaagcagccctggccgaggcccaggaggacctggagtctgagcgtgtggccaggaccaaggcggagaagcagcgccgggacctgggcgaggagctggaggcgctgcggggcgagctggaggacacgctggactccaccaacgcacagcaggagctccggtccaagagggaacaggaggtgacggagctgaagaagactctggaggaggagactcgcatccacgaggcggcagtgcaggagctgaggcagcgccacggccaggccctgggggagctggcggagcagctggagcaggcccggaggggcaaaggtgcatgggagaagacccggctggccctggaggccgaggtgtccgagctgcgggcagaactgagcagcctgcagactgcacgtcaggagggtgagcagcggaggcgccgcctggagttacagctgcaggaggtgcagggccgggctggtgatggggagagggcacgagcggaggctgctgagaagctgcagcgagcccaggctgaactggagaatgtgtctggggcgctgaacgaggctgagtccaaaaccatccgtcttagcaaggagctgagcagcacagaagcccagctgcacgatgcccaggagctgctgcaggaggagaccagggcgaaattggccttggggtcccgggtgcgagccatggaggctgaggcagccgggctgcgtgagcagctggaggaggaggcagctgccagggaacgggcgggccgtgaactgcagactgcccaggcccagctttccgagtggcggcggcgccaggaggaggaggcaggggcactggaggcaggggaggaggcacggcgccgggcagcccgggaggccgaggccctgacccagcgcctggcagaaaagacagagaccgtggatcggctggagcggggccgccgccggctgcagcaggagctggacgacgccaccatggacctggagcagcagcggcagcttgtgagcaccctggagaagaagcagcgcaagtttgaccagcttctggcagaggagaaggcagctgtacttcgggcagtggaggaacgtgagcgggccgaggcagagggccgggagcgtgaggctcgggccctgtcactgacacgggcactggaggaggagcaggaggcacgtgaggagctggagcggcagaaccgggccctgcgggctgagctggaggcactgctgagcagcaaggatgacgtcggcaagagcgtgcatgagctggaacgagcctgccgggtagcagaacaggcagccaatgatctgcgagcacaggtgacagaactggaggatgagctgacagcggccgaggatgccaagctgcgtctggaggtgactgtgcaggctctcaagactcagcatgagcgtgacctgcagggccgtgatgaggctggtgaagagaggcggaggcagctggccaagcagctgagagatgcagaggtggagcgggatgaggagcggaagcagcgcactctggccgtggctgcccgcaagaagctggagggagagctggaggagctgaaggctcagatggcctctgccggccagggcaaggaggaggcggtgaagcagcttcgcaagatgcaggcccagatgaaggagctatggcgggaggtggaggagacacgcacctcccgggaggagatcttctcccagaatcgggaaagtgaaaagcgcctcaagggcctggaggctgaggtgctgcggctgcaggaggaactggccgcctcggaccgtgctcggcggcaggcccagcaggaccgggatgagatggcagatgaggtggccaatggtaaccttagcaaggcagccattctggaggagaagcgtcagctggaggggcgcctggggcagttggaggaagagctggaggaggagcagagcaactcggagctgctcaatgaccgctaccgcaagctgctcctgcaggtagagtcactgaccacagagctgtcagctgagcgcagtttctcagccaaggcagagagcgggcggcagcagctggaacggcagatccaggagctacggggacgcctgggtgaggaggatgctggggcccgtgcccgccacaagatgaccattgctgcccttgagtctaagttggcccaggctgaggagcagctagagcaagagaccagagagcgcatcctctctggaaagctggtgcgcagagctgagaagcggcttaaagaggtggtgctccaggtggaggaggagcggagggtggctgaccagctccgggaccagctggagaagggaaaccttcgagtcaagcagctgaagcggcagctggaggaggccgaggaggaggcatcccgggctcaggccggccgccggaggctgcagcgtgagctggaagatgtcacagagtcggccgagtccatgaaccgtgaagtgaccacactgaggaaccggcttcgacgcggccccctcaccttcaccacccgcacggtgcgccaggtcttccgactagaggagggcgtggcatccgacgaggaggcagaggaagcacagcctgggtctgggccatccccggagcctgaggggtccccaccagcccacccccagtgaccctaccctgtccccagatgcactaacagatggggcccagcccccttcctccctggaccccacgggcccctgtcccaggaaccccgccctctgacttcttgccctttggaaatggtgcagcactctggcatttatcacccccacctgggtcccctgcaacctcccatcaaaggatgacccctaaacacagaggagcggggcaggcagggaggcaatgactggagctaccttgcttgttgggggactgggtacagttggcaagctgtgtttccatcagctccctgtcctcctttcttccctcgttattgatctatagacattaggaagggagtgagacggctcctccaccatcctcagccagtgcaacccattccctctgcttctctctctctctctctctctccctccctctccttccctaccctctcaccatctttcttggcctctctgagggtctctctgtgcatctttttaggaatctcgctctcactctctacgtagccactctccttcccccatttctgcgtccacccctgaactcctgagcgacagaagccccaggcctccaccagccttgaacccttgcaaaggggcaggacaaggggacccctctcactcctgctgctgcccatgctctgccctcccttctggttgctctgagggttcggagcttccctctgggactaaaggagtgtcctttaccctcccagcctccaggctctggcagaaataaactccaacccgactggacc

SEQ ID NO: 320029 - protein, 1478 aa, Artificial Sequence
  derived and/or modified sequence
MAAVTMSVPGRKAPPRPGPVPEAAQPFLFTPRGPSAGGGPGSGTSPQVEWTARRLVWVPSELHGFEAAALRDEGEEEAEVELAESGRRLRLPRDQIQRMNPPKFSKAEDMAELTCLNEASVLHNLRERYYSGLIYTYSGLFCVVINPYKQLPIYTEAIVEMYRGKKRHEVPPHVYAVTEGAYRSMLQDREDQSILCTGESGAGKTENTKKVIQYLAHVASSPKGRKEPGVPGELERQLLQANPILEAFGNAKTVKNDNSSRFGKFIRINFDVAGYIVGANIETYLLEKSRAIRQAKDECSFHIFYQLLGGAGEQLKADLLLEPCSHYRFLTNGPSSSPGQERELFQETLESLRVLGFSHEEIISMLRMVSAVLQFGNIALKRERNTDQATMPDNTAAQKLCRLLGLGVTDFSRALLTPRIKVGRDYVQKAQTKEQADFALEALAKATYERLFRWLVLRLNRALDRSPRQGASFLGILDIAGFEIFQLNSFEQLCINYTNEKLQQLFNHTMFVLEQEEYQREGIPWTFLDFGLDLQPCIDLIERPANPPGLLALLDEECWFPKATDKSFVEKVAQEQGGHPKFQRPRHLRDQADFSVLHYAGKVDYKANEWLMKNMDPLNDNVAALLHQSTDRLTAEIWKDVEGIVGLEQVSSLGDGPPGGRPRRGMFRTVGQLYKESLSRLMATLSNTNPSFVRCIVPNHEKRAGKLEPRLVLDQLRCNGVLEGIRICRQGFPNRILFQEFRQRYEILTPNAIPKGFMDGKQACEKMIQALELDPNLYRVGQSKIFFRAGVLAQLEEERDLKVTDIIVSFQAAARGYLARRAFQKRQQQQSALRVMQRNCAAYLKLRHWQWWRLFTKVKPLLQVTRQDEVLQARAQELQKVQELQQQSAREVGELQGRVAQLEEERARLAEQLRAEAELCAEAEETRGRLAARKQELELVVSELEARVGEEEECSRQMQTEKKRLQQHIQELEAHLEAEEGARQKLQLEKVTTEAKMKKFEEDLLLLEDQNSKLSKSGSCWKIVWPSSHPRQLRRRRRSRASISYGSNMRPQSQTWRDRLRKEEKGRQELEKLKRRLDGESSELQEQMVEQQQRAEELRAQLGRKEEELQAALARAEDEGGARAQLLKSLREAQAALAEAQEDLESERVARTKAEKQRRDLGEELEALRGELEDTLDSTNAQQELRSKREQEVTELKKTLEEETRIHEAAVQELRQRHGQALGELAEQLEQARRGKGAWEKTRLALEAEVSELRAELSSLQTARQEGEQRRRRLELQLQEVQGRAGDGERARAEAAEKLQRAQAELENVSGALNEAESKTIRLSKELSSTEAQLHDAQELLQEETRAKLALGSRVRAMEAEAAGLREQLEEEAAARERAGRELQTAQAQLSEWRRRQEEEAGALEAGEEARRRAAREAEALTQRLAEKTETVDRLERGRRRLQQELDDATLSPDALTDGAQPPSSLDPTGPCPRNPAL

SEQ ID NO: 320030 - DNA, 4437 bp, Artificial Sequence
  derived and/or modified sequence
atggctgcggtgactatgagtgtgccaggccgtaaggcccccccacgaccagggcccgtgcctgaagccgcccagcctttcctgtttacaccccgggggccctcagcgggaggcggcccagggtccggtacctcccctcaggtggagtggactgcaaggcgccttgtgtgggtgccaagcgaacttcatggattcgaggccgcagcattgagggatgagggcgaggaagaggcagaggtcgaactggccgagtcaggacggcgtctgcgtctgcctcgggaccaaatacagcgcatgaatccccctaaattttcgaaagctgaagacatggccgagctaacgtgtcttaatgaagcaagcgtgttgcataacctccgcgagcgatattatagtggcttgatatacacatattccgggctgttctgcgttgtgataaatccttacaagcagcttcccatctacactgaagccattgtggaaatgtatcgcggcaagaagaggcacgaagtccctccacatgtgtatgctgtcacggagggcgcctatcgaagtatgttacaggacagggaagatcagagcatcctctgcaccggagaaagtggagccgggaagaccgagaacactaagaaagtgattcagtacctagcccatgtggcttccagccctaaggggaggaaagaacctggggtaccaggcgagttggagagacagttactgcaggcaaaccctattctggaggccttcggtaatgctaaaacagtgaaaaatgacaattcgagccgcttcggtaaattcattcggataaattttgatgtagctggatacatcgtgggggccaatattgaaacatacctgcttgagaagagtagggctatcaggcaagctaaggatgaatgctccttccatatattctatcaacttttgggcggggccggagagcagctgaaagccgatctgctgctagaaccctgttcccattacagatttctgactaatggtcctagcagctcaccaggccaagaacgggagctgttccaggagacactggagtctcttagagtgctgggattcagtcacgaggaaattatctctatgcttcggatggtgtccgccgtcttacagtttggaaacatcgccttaaaacgcgaacgtaacactgatcaggccaccatgcctgacaatacagcggctcagaaactctgtcggctactgggcctgggtgtgaccgatttcagtcgcgcgctgctcaccccgcggatcaaagtcgggagggactatgtgcagaaagcacaaacaaaggaacaggctgacttcgccctcgaagctcttgcaaaagcaacctatgaaaggctttttaggtggttagtgctccgtcttaatcgggcccttgatcgctctcctagacagggcgctagtttccttggaatccttgatatcgctggtttcgagatttttcagttgaactccttcgaacagctatgcattaattacacaaacgagaaactgcaacagctgttcaaccatacaatgtttgtcttggagcaggaggaatatcagcgcgaaggaatcccctggacattcctggactttggactagacctacaaccttgtatagatctgatcgagcggccagcaaatcctcccggtcttctggcgctcctcgacgaggagtgctggttccctaaggcgacggataagtcattcgttgagaaagtggctcaggagcagggtggacacccgaagtttcaacgacctaggcacttacgggaccaagccgacttctcggtactgcattatgctggtaaagtagactacaaagccaatgagtggctgatgaagaacatggatcccctgaatgacaacgtcgcagcactgctgcatcagagcaccgatcgcctcactgccgagatttggaaggatgtcgaaggcatagtagggctggagcaagtcagctcattgggggacggacctcctggcggtcgtccacggcggggaatgttcaggactgtgggtcaactctataaggaatcgctctcacggcttatggccaccctgtctaacaccaacccaagctttgtgcgttgtatagtgccaaatcatgagaagcgggcgggcaagctcgagccacgactggtgttagaccagcttaggtgtaatggggtgttagaaggcattcgaatatgccggcagggattccctaatcggatcctattccaagagttccgccagcggtatgagatcctaacacccaatgctattcctaaagggttcatggatggcaagcaggcttgtgaaaaaatgatccaggcactggagctggaccctaacctataccgcgtggggcagtcaaaaattttctttcgagccggcgtgctggcacagctggaggaagagcgcgacctcaaagttaccgatatcattgtgagcttccaggctgctgcaagaggctacctggctcggcgggctttccagaagaggcaacagcagcagtctgctctccgtgtaatgcagagaaattgtgctgcataccttaaattgaggcactggcaatggtggagattgtttacaaaagtgaagccactcctgcaggtgacaaggcaggacgaagtgttgcaagccagggcccaggagctgcagaaagttcaggaactgcagcagcagtctgcccgtgaagtgggcgaactccagggccgcgtggcacagttggaggaggaacgggcccggttggcggagcaactgcgggccgaagccgagctatgtgcggaagcagaggaaactcgtggccgactggcggctcggaagcaggaattagagctggtggtttcagaactggaagcacgtgtcggggaagaagaagagtgctctcgtcagatgcagacagaaaagaagaggctccagcagcatatccaagagttggaggcgcacctggaggcagaagaaggcgcgagacaaaaactgcaacttgagaaagtcaccactgaggccaagatgaaaaaatttgaagaggaccttttactgctggaggaccagaactccaagctgtctaagagcggctcttgttggaagatagtgtggccaagctcccacccaaggcagttgagaagaaggaggcgctctcgggcaagtatttcatatggtagtaacatgaggccccagtcccagacttggagggaccggttacgaaaggaggagaaaggccggcaggaactcgaaaagctgaagcgacggctggacggagaaagcagcgagcttcaggaacagatggtcgaacagcaacaaagggctgaggagctgagagctcaactcggccgcaaggaagaggagctgcaggctgcgctcgcgcgagcagaggatgaggggggcgctcgtgcccaactgctgaaatcactacgggaggcccaggctgctctggctgaggcacaggaagatctggagtccgagcgggttgccaggacaaaagccgaaaagcagcggagagacctgggcgaagagttagaggcactgaggggagagctcgaggatacactggattctactaacgcccagcaagagctgaggagcaaaagagaacaagaggtcaccgaactcaagaaaaccctagaagaggagactagaatacacgaagctgccgtacaggagctgaggcaaagacacggacaggctctcggcgagctcgctgagcagcttgagcaagcccggaggggaaagggcgcttgggaaaaaacgaggctggccctggaggcggaggtgtccgaattgcgcgccgaactatcaagccttcagactgctcgccaggagggggaacaaaggcggcgcagattggaactgcagctgcaggaagtgcagggcagggcgggagatggagagagagcgcgcgcggaggctgcagagaaactgcagagagcgcaggctgaactagaaaacgtatctggggctctgaacgaggcagaatctaagaccatacgattgtctaaagagttgtcatccaccgaggcccagctgcacgatgcacaggaacttttgcaggaggaaacaagggccaagcttgctttagggtccagagttcgggcgatggaggcagaagccgccggcctgcgagaacagctggaagaggaggcagctgcccgcgaaagagcgggaagggagctgcagaccgctcaggctcaacttagcgagtggaggagacggcaggaagaggaagctggcgctctagaggcgggggaagaagcccgtaggagagccgcacgcgaggctgaggctctcactcaaagactggcggaaaaaacagagaccgtagacagactggagcgcgggcgtcgtagactccagcaggaactggatgatgccacactgtcacctgacgctctgactgacggagctcaacccccgtcctcacttgacccgacaggtccatgccctcgcaatcctgcactttag

SEQ ID NO: 320031 - DNA, 5340 bp, Artificial Sequence
  derived and/or modified sequence
atggctgccgtaaccatgagcgtccccggaagaaaggctccacctcgacccggccctgtcccagaagcagctcagcccttcctattcactccaaggggaccttcggcaggcgggggtccgggttctggaacttccccccaagtagagtggaccgctaggcgtctcgtttgggtcccgagcgaacttcacggatttgaagccgcagccctccgggacgagggcgaagaagaagcagaggtggagttggccgagagcgggcgccgcctgcgattaccccgggaccagatccagaggatgaaccctcctaaatttagtaaggctgaggatatggccgagcttacctgcctgaatgaggcttccgtgctccacaatcttagggaaagatattactccggtctcatttacacttatagcggtctcttctgtgtggtcataaacccctataagcagttaccgatctacaccgaagccattgtggaaatgtataggggcaagaagcggcacgaagtcccccctcacgtctatgccgtaacagagggggcatacaggagtatgctgcaggaccgagaagatcagagcatcctatgcactggagagtccggtgcagggaagactgaaaataccaagaaggtcatccaatatttggcccatgtggcatccagcccaaagggccgtaaagaacccggcgttccgggagaattggaacggcaattgttacaagccaatcctatcctggaggcgttcggaaatgcaaagacagtgaaaaatgacaatagtagccgcttcgggaagttcattcgcattaatttcgacgttgcaggctatattgtaggggctaatattgagacttatttacttgagaagagccgagccatcagacaagccaaggacgagtgcagtttccatatcttctaccagctgctgggtggggccggtgagcagcttaaggccgacctcctgctcgagccatgtagccactaccgatttctgaccaacgggccatcctcaagccccggtcaggagcgcgaactatttcaggagaccttagaaagcctcagagtgctgggcttttcccatgaagagatcatttctatgctgagaatggtgtccgctgtgctacaatttggtaacatcgcattaaaacgtgagcggaacacagaccaggctactatgccagacaataccgcagctcagaagctgtgccggctcttaggtctaggcgtgactgatttttcgagggctctgcttacaccccgaatcaaggtagggagggattatgtgcagaaggcgcagactaaggagcaagccgactttgccctcgaagcgctagctaaagctacttatgagcgtctgtttcgatggctggtcctgagactcaatagagccctcgataggagcccccggcagggtgcctcttttctgggcatactggacattgcaggctttgagatctttcagctgaattcttttgagcaactgtgtataaattacacaaacgagaagctccaacagctctttaaccatacaatgttcgtcttggaacaggaggaataccaacgagaggggataccttggactttcctcgattttgggctggatctgcagccctgtatagatctgattgaacggcccgctaatcccccaggactgctggcactgcttgacgaagagtgctggttcccgaaggccacagataaatccttcgtggagaaggtagctcaggagcaaggcgggcatcccaagttccagcgacccagacacctgcgagaccaggcggatttcagtgtcctacattatgccggaaaagtggactacaaggctaacgagtggttgatgaagaacatggaccctctcaacgacaacgtggcagccttgctccaccagtcaacggaccgattgaccgccgaaatctggaaggacgtggaaggcattgtaggactcgagcaggtctctagcttgggagacggtccaccgggtgggagaccacgacgtggaatgtttcgtactgttggacagctgtataaggagtctctctctcgcctcatggccactcttagcaatacaaatccctcctttgtgaggtgcatcgtgcccaatcacgaaaagcgggctgggaagctcgagccgaggctggtgctggatcagttgaggtgtaacggcgtcctggaaggtatccggatctgtaggcagggatttccgaaccggatcctgtttcaggaatttaggcagagatacgaaatactcactcccaacgcaatcccaaaaggttttatggatggcaaacaagcctgcgagaagatgattcaagcgctagagcttgatcctaacctctaccgagtgggccaaagtaaaattttcttcagagccggcgtattagcccagctggaggaggagagggatttgaaagtgacggacattattgtgtcttttcaagccgccgccagagggtatctggcccggagggctttccagaaacgacagcagcagcaaagcgccctcagagtcatgcagaggaattgcgccgcctacctgaagctcaggcactggcagtggtggcgcctgttcactaaagtcaagccgctgctccaggttacccgccaagacgaagtgctacaagccagagcgcaggaactgcagaaggtccaggagctgcagcagcagagtgcccgcgaagtcggagaactccaaggacgagttgctcagttagaagaagagagagctcgcctggccgaacaactacgggccgaagctgagctgtgcgccgaagctgaagagacacgcgggcgtttagccgcccgaaagcaggaattagagctagtcgtgagcgagctggaagcccgcgtcggagaggaggaagaatgttccaggcagatgcagacagagaagaagcggctgcagcagcacatacaagagctcgaggctcatctagaggccgaggagggtgctcgccagaagctgcagctcgagaaggtaacaaccgaggcaaaaatgaagaagttcgaagaggatttactgcttctagaagaccagaatagtaaactaagcaagtctggtagctgctggaagatcgtgtggccttcttcccacccccgccaacttcgaagacgccggaggagtagggcctcaatttcttacgggtccaacatgaggccccagtcccagacatggcgagacaggttgcgcaaggaggaaaagggtaggcaggagctggaaaagctgaaacggcggctggatggcgagtcttccgaactccaggagcagatggtcgagcagcagcaacgcgccgaagagctaagagcacagctgggcagaaaggaggaagagcttcaggctgccctcgctagagcagaggacgaagggggtgcacgggctcagctgctgaagtccttacgcgaggcccaggcagccctggcagaagcccaagaagatctggagtcagagcgggtggctcggactaaagcggaaaaacagcgaagggacttaggcgaagagttggaagccttacggggagaactggaggatactctcgattcgaccaacgcccagcaggaactccgaagcaagcgcgagcaggaggtgactgagttaaaaaaaacgctcgaagaggaaacgaggatccacgaagctgctgttcaagagctaagacagagacacggccaggccctaggagaactggccgaacagctggagcaggcaaggagaggcaagggagcgtgggagaagactcgactggccctggaagcagaagtttcagagcttcgtgccgaactgagtagtttgcagaccgccaggcaagagggtgagcagagacgccgccggttggaactacagctgcaggaggtgcagggcagggcaggggacggggagagagcacgggccgaagccgccgaaaagctccagcgagctcaagcagagctagaaaatgtgtctggagccctcaacgaggctctgttgtcttcgaaagacgatgtaggaaaaagcgtgcacgagctagagcgcgcttgtagggtggccgagcaggccgctaatgatctgcgcgcccaagtgaccgagctagaagatgagctgaccgctgccgaggatgccaaactccgactggaagtgacagtccaggctctgaaaactcaacatgaaagagatctgcagggacgggacgaggccggtgaggagcggcgcaggcagctagccaaacagctgcgggacgcagaggtggaacgggatgaagaaaggaaacaaaggactctggccgtggccgcccgcaagaaactggagggcgaactggaagaattgaaggcccagatggctagtgccggacagggaaaggaggaggccgtgaagcaactgaggaaaatgcaggctcaaatgaaagagctgtggcgagaggtcgaggaaacccggacatcaagggaagaaatcttctctcaaaaccgcgagagcgaaaagcggctgaaggggttggaggccgaggtccttaggctccaggaagagctcgcagctagtgacagggccaggcggcaggcacagcaagatcgggacgagatggcggacgaggttgccaacgggaacctttctaaagcagctattcttgaggaaaagagacaactggaaggtagactgggacagctcgaggaagagcttgaggaggaacagagcaatagcgaactactgaacgatagatatagaaaactgctccttcaggtggaatccctgactacagagctgagcgctgagcggagcttttccgctaaggcagaaagtggcagacagcaattagaacggcagatccaagagctgagaggacggctgggcgaagaggatgcaggcgctcgcgcccggcataagatgacaatcgcagctctggaatctaagttggcgcaggctgaggagcagctggaacaggaaacccgtgagcgcattctctctggcaaactggtgagacgggccgagaagcgcctgaaggaagtcgtgttacaagtggaagaagaacggcgagttgcagatcagcttcgggatcagcttgagaaggggaacttacgggttaagcagcttaagcggcagctggaggaggctgaggaggaagcgtctagggcacaggcaggacgccgccggctgcagagggagctcgaggacgttaccgaatccgccgagtcaatgaaccgagaggttaccactctccgcaataggctgaggagagggccccttacatttactaccaggactgtgcgacaggtgttcaggctggaagagggggtcgctagtgacgaggaagctgaggaggcacagccagggagtgggccatcgccggaacctgaaggcagtcctcctgctcacccccagtag

SEQ ID NO: 320032 - DNA, 4437 bp, Artificial Sequence
  derived and/or modified sequence
atggctgctgtgaccatgtctgtgcccggcaggaaggccccacccaggcctggccctgtgcctgaggccgcccagcccttcctgttcaccccccggggccccagcgctgggggcggccctggcagcggcaccagcccccaggtggagtggacagcccggcggctggtgtgggtgcccagcgagctgcacggctttgaagctgctgccctgagagatgaaggagaggaggaggccgaggtggagctggccgagagcggccgccgcctgcggctgccccgggaccagatccagaggatgaacccccccaagttcagcaaggccgaggacatggccgagctgacctgcctgaatgaggcctctgtgctgcacaacctgcgggagcgctactacagcggcctcatctacacctacagcggcctcttctgtgtggtgatcaacccctacaagcagctgcccatctacacagaggccatcgtggagatgtaccggggcaagaagagacatgaggtgccccctcatgtgtatgctgtgacagagggcgcctaccgctccatgctgcaggaccgggaggaccagagcatcctgtgcacaggagagagcggggccggcaagacagagaacaccaagaaggtgatccagtacctggcccacgtggccagcagccccaagggcaggaaggagcccggggtgcctggagagctggagcggcagctgctgcaggccaaccccatcctggaggcctttggaaatgccaagacagtgaagaatgacaacagcagcagatttgggaagttcatccgcatcaactttgatgtggccggctacatcgtgggcgccaacatcgagacctacctgctggagaagagccgggccatccggcaggccaaggatgagtgcagcttccacatcttctaccagctgctgggcggggccggggagcagctgaaggctgacctgctgctggagccctgcagccactaccgcttcctgaccaacggccccagcagcagccctggccaggagcgggagctgttccaggagaccctggagagcctgcgggtgctgggcttcagccatgaggagatcatctccatgctgaggatggtgtctgctgtgctgcagtttggaaacatcgccctgaagcgggagaggaacacagaccaggccaccatgccagacaacacagctgcccagaagctgtgccgcctgctgggcctgggcgtgacagacttcagccgggccctgctgaccccccgcatcaaggtgggccgggactatgtgcagaaggcccagaccaaggagcaggccgactttgccctggaggccctggccaaggccacctatgaaagactcttccgctggctggtgctgcggctgaacagagccctggacaggagcccccggcagggcgccagcttcctgggcatcctggacattgctggctttgagatcttccagctgaacagctttgagcagctgtgcatcaactacaccaatgagaagctgcagcagctgttcaaccacaccatgtttgtgctggagcaggaggagtaccagcgggagggcatcccctggaccttcctggactttggcctggacctgcagccctgcatcgacctgattgaaagacctgccaaccccccaggcctgctggccctgctggatgaggagtgctggttccccaaggccacagacaagagctttgtggagaaggtggcccaggagcagggcggccaccccaagttccagaggcccaggcacctgcgggaccaggccgacttctctgtgctgcactacgccggcaaggtggactacaaggccaatgagtggctgatgaagaacatggaccccctgaatgacaacgtggccgccctgctgcaccagagcacagaccggctgacagctgagatctggaaggatgtggagggcatcgtgggcctggagcaggtgagcagcctgggagatggccccccaggcggccggccccggcggggcatgttcagaacagtgggccagctgtacaaggagagcctgagccggctgatggccaccctgagcaacaccaaccccagctttgtgcgctgcatcgtgcccaaccacgagaagagagctgggaagctggagccccggctggtgctggaccagctgcgctgcaatggagtgctggagggcatccgcatctgccggcagggcttccccaaccgcatcctcttccaggagttccggcagagatatgagatcctgaccccaaatgccatccccaagggcttcatggatggcaagcaggcctgtgagaagatgatccaggccctggagctggaccccaacctgtacagagtgggccagagcaagatcttcttccgggccggcgtgctggcccagctggaggaggagcgggacctgaaggtgacagacatcatcgtgtccttccaggccgccgcccggggctacctggcccggcgggccttccagaagaggcagcagcagcagagcgccctgcgggtgatgcagaggaactgtgccgcctacctgaagctgcggcactggcagtggtggaggctcttcaccaaggtgaagcccctgctgcaggtgacccggcaggatgaggtgctgcaggcccgggcccaggagctgcagaaggtgcaggagctgcagcagcagagcgcccgggaggtgggggagctgcagggccgggtggcccagctggaggaggagcgggcccggctggccgagcagctgcgggcagaggccgagctgtgtgccgaggccgaggagacccggggccgcctggccgccaggaagcaggagctggagctggtggtgtctgagctggaggcccgggtgggggaggaggaggagtgcagccggcagatgcagacagagaagaagaggctgcagcagcacatccaggagctggaggcccacctggaggccgaggagggcgcccggcagaagctgcagctggagaaggtgaccacagaggccaagatgaagaagtttgaggaggacctgctgctgctggaggaccagaacagcaagctgagcaagagcggcagctgctggaagatcgtgtggcccagcagccacccccggcagctgcggaggagaagaagaagccgggccagcatctcctatggcagcaacatgaggccccagagccagacctggagggaccggctgaggaaggaggagaagggccggcaggagctggagaagctgaagaggcggctggatggagagagcagcgagctgcaggagcagatggtggagcagcagcagagagctgaggagctgcgggcccagctgggcaggaaggaggaggagctgcaggccgccctggcccgggcagaagatgagggcggggcccgggcccagctgctgaagagcctgcgggaggcccaggccgccctggccgaggcccaggaggacctggagagcgagcgggtggcccggaccaaggccgagaagcagaggcgggacctgggggaggagctggaggccctgcggggggagctggaggacaccctggacagcaccaatgcccagcaggagctgcggagcaagcgggagcaggaggtgacagagctgaagaagaccctggaggaggagacccgcatccatgaagctgctgtgcaggagctgcggcagagacatggccaggccctgggggagctggccgagcagctggagcaggcccggcggggcaagggggcctgggagaagacccggctggccctggaggccgaggtgtctgagctgcgggcagagctgagcagcctgcagacagcccggcaggagggggagcagaggagaagaaggctggagctgcagctgcaggaggtgcagggccgggctggagatggagagcgggcccgggcagaggccgctgagaagctgcagagggcccaggccgagctggagaatgtgtctggggccctgaatgaggccgagagcaagaccatccggctgagcaaggagctgagcagcacagaggcccagctgcatgatgcccaggagctgctgcaggaggagacccgggccaagctggccctgggcagccgggtgcgggccatggaggccgaggccgccggcctgcgggagcagctggaggaggaggccgccgcccgggagagagctggccgggagctgcagacagcccaggcccagctgtctgagtggaggcggcggcaggaggaggaggccggggccctggaggccggggaggaggcccggcggcgggccgcccgggaggccgaggccctgacccagaggctggccgagaagacagaaacagtggaccggctggagcggggcagaagaaggctgcagcaggagctggatgatgccaccctgagcccagatgccctgacagatggagcccagccccccagcagcctggaccccaccggcccctgccccaggaacccagccctgtag

SEQ ID NO: 320033 - DNA, 5340 bp, Artificial Sequence
  derived and/or modified sequence
atggctgctgtgaccatgtctgtgcccggcaggaaggccccacccaggcctggccctgtgcctgaggccgcccagcccttcctgttcaccccccggggccccagcgctgggggcggccctggcagcggcaccagcccccaggtggagtggacagcccggcggctggtgtgggtgcccagcgagctgcacggctttgaagctgctgccctgagagatgaaggagaggaggaggccgaggtggagctggccgagagcggccgccgcctgcggctgccccgggaccagatccagaggatgaacccccccaagttcagcaaggccgaggacatggccgagctgacctgcctgaatgaggcctctgtgctgcacaacctgcgggagcgctactacagcggcctcatctacacctacagcggcctcttctgtgtggtgatcaacccctacaagcagctgcccatctacacagaggccatcgtggagatgtaccggggcaagaagagacatgaggtgccccctcatgtgtatgctgtgacagagggcgcctaccgctccatgctgcaggaccgggaggaccagagcatcctgtgcacaggagagagcggggccggcaagacagagaacaccaagaaggtgatccagtacctggcccacgtggccagcagccccaagggcaggaaggagcccggggtgcctggagagctggagcggcagctgctgcaggccaaccccatcctggaggcctttggaaatgccaagacagtgaagaatgacaacagcagcagatttgggaagttcatccgcatcaactttgatgtggccggctacatcgtgggcgccaacatcgagacctacctgctggagaagagccgggccatccggcaggccaaggatgagtgcagcttccacatcttctaccagctgctgggcggggccggggagcagctgaaggctgacctgctgctggagccctgcagccactaccgcttcctgaccaacggccccagcagcagccctggccaggagcgggagctgttccaggagaccctggagagcctgcgggtgctgggcttcagccatgaggagatcatctccatgctgaggatggtgtctgctgtgctgcagtttggaaacatcgccctgaagcgggagaggaacacagaccaggccaccatgccagacaacacagctgcccagaagctgtgccgcctgctgggcctgggcgtgacagacttcagccgggccctgctgaccccccgcatcaaggtgggccgggactatgtgcagaaggcccagaccaaggagcaggccgactttgccctggaggccctggccaaggccacctatgaaagactcttccgctggctggtgctgcggctgaacagagccctggacaggagcccccggcagggcgccagcttcctgggcatcctggacattgctggctttgagatcttccagctgaacagctttgagcagctgtgcatcaactacaccaatgagaagctgcagcagctgttcaaccacaccatgtttgtgctggagcaggaggagtaccagcgggagggcatcccctggaccttcctggactttggcctggacctgcagccctgcatcgacctgattgaaagacctgccaaccccccaggcctgctggccctgctggatgaggagtgctggttccccaaggccacagacaagagctttgtggagaaggtggcccaggagcagggcggccaccccaagttccagaggcccaggcacctgcgggaccaggccgacttctctgtgctgcactacgccggcaaggtggactacaaggccaatgagtggctgatgaagaacatggaccccctgaatgacaacgtggccgccctgctgcaccagagcacagaccggctgacagctgagatctggaaggatgtggagggcatcgtgggcctggagcaggtgagcagcctgggagatggccccccaggcggccggccccggcggggcatgttcagaacagtgggccagctgtacaaggagagcctgagccggctgatggccaccctgagcaacaccaaccccagctttgtgcgctgcatcgtgcccaaccacgagaagagagctgggaagctggagccccggctggtgctggaccagctgcgctgcaatggagtgctggagggcatccgcatctgccggcagggcttccccaaccgcatcctcttccaggagttccggcagagatatgagatcctgaccccaaatgccatccccaagggcttcatggatggcaagcaggcctgtgagaagatgatccaggccctggagctggaccccaacctgtacagagtgggccagagcaagatcttcttccgggccggcgtgctggcccagctggaggaggagcgggacctgaaggtgacagacatcatcgtgtccttccaggccgccgcccggggctacctggcccggcgggccttccagaagaggcagcagcagcagagcgccctgcgggtgatgcagaggaactgtgccgcctacctgaagctgcggcactggcagtggtggaggctcttcaccaaggtgaagcccctgctgcaggtgacccggcaggatgaggtgctgcaggcccgggcccaggagctgcagaaggtgcaggagctgcagcagcagagcgcccgggaggtgggggagctgcagggccgggtggcccagctggaggaggagcgggcccggctggccgagcagctgcgggcagaggccgagctgtgtgccgaggccgaggagacccggggccgcctggccgccaggaagcaggagctggagctggtggtgtctgagctggaggcccgggtgggggaggaggaggagtgcagccggcagatgcagacagagaagaagaggctgcagcagcacatccaggagctggaggcccacctggaggccgaggagggcgcccggcagaagctgcagctggagaaggtgaccacagaggccaagatgaagaagtttgaggaggacctgctgctgctggaggaccagaacagcaagctgagcaagagcggcagctgctggaagatcgtgtggcccagcagccacccccggcagctgcggaggagaagaagaagccgggccagcatctcctatggcagcaacatgaggccccagagccagacctggagggaccggctgaggaaggaggagaagggccggcaggagctggagaagctgaagaggcggctggatggagagagcagcgagctgcaggagcagatggtggagcagcagcagagagctgaggagctgcgggcccagctgggcaggaaggaggaggagctgcaggccgccctggcccgggcagaagatgagggcggggcccgggcccagctgctgaagagcctgcgggaggcccaggccgccctggccgaggcccaggaggacctggagagcgagcgggtggcccggaccaaggccgagaagcagaggcgggacctgggggaggagctggaggccctgcggggggagctggaggacaccctggacagcaccaatgcccagcaggagctgcggagcaagcgggagcaggaggtgacagagctgaagaagaccctggaggaggagacccgcatccatgaagctgctgtgcaggagctgcggcagagacatggccaggccctgggggagctggccgagcagctggagcaggcccggcggggcaagggggcctgggagaagacccggctggccctggaggccgaggtgtctgagctgcgggcagagctgagcagcctgcagacagcccggcaggagggggagcagaggagaagaaggctggagctgcagctgcaggaggtgcagggccgggctggagatggagagcgggcccgggcagaggccgctgagaagctgcagagggcccaggccgagctggagaatgtgtctggggccctgaatgaggccctgctgagcagcaaggatgatgtgggcaagtctgtgcatgagctggagcgggcctgccgggtggccgagcaggccgccaatgacctgcgggcccaggtgacagagctggaggatgagctgacagctgctgaagatgccaagctgcggctggaggtgacagtgcaggccctgaagacccagcacgagcgggacctgcagggcagagatgaagctggggaggagcggcggcggcagctggccaagcagctgagagatgctgaggtggagagagatgaggagaggaagcagaggaccctggccgtggccgccaggaagaagctggagggggagctggaggagctgaaggcccagatggccagcgctggccagggcaaggaggaggccgtgaagcagctgaggaagatgcaggcccagatgaaggagctgtggagggaggtggaggagaccaggaccagccgggaggagatcttcagccagaaccgggagagcgagaagaggctgaagggcctggaggccgaggtgctgcggctgcaggaggagctggccgccagtgaccgggcccggcggcaggcccagcaggacagagatgagatggctgatgaggtggccaacggcaacctgagcaaggccgccatcctggaggagaagaggcagctggagggccgcctgggccagctggaggaggagctggaggaggagcagagcaacagcgagctgctgaatgaccgctacaggaagctgctgctgcaggtggagagcctgaccacagagctgtctgctgagaggagcttcagcgccaaggccgagagcggccggcagcagctggagcggcagatccaggagctgcggggccgcctgggggaggaggatgctggggcccgggcccggcacaagatgaccatcgccgccctggagagcaagctggcccaggccgaggagcagctggagcaggagacccgggagcgcatcctgagcggcaagctggtgcggcgggcagagaagaggctgaaggaggtggtgctgcaggtggaggaggagaggagagtggccgaccagctgcgggaccagctggagaagggcaacctgcgggtgaagcagctgaagaggcagctggaggaggccgaggaggaggccagccgggcccaggccggcagaagaaggctgcagcgggagctggaggatgtgacagagagcgctgagagcatgaaccgggaggtgaccaccctgaggaaccggctgcggcggggccccctgaccttcaccaccaggacagtgcggcaggtgttccggctggaggagggcgtggccagtgatgaggaggccgaggaggcccagcccggcagcggccccagccctgagcctgagggcagccccccagcccacccccagtag

SEQ ID NO: 320034 - DNA, 4484 bp, Artificial Sequence
  derived and/or modified sequence
ctctttctccccaggccgaagcctcgggacggccctggaagccgaccatggcagccgtgaccatgtcggtgcccgggcggaaggcgccccccaggccgggcccagtgcccgaggcggcccagccgttcctgttcacgccccgcgggcccagcgcgggtggcgggcctggctcgggcacctccccgcaggtggagtggacggcccggcgtctcgtgtgggtgccttcggagcttcacgggttcgaggcggcggcgctgcgggacgaaggcgaggaggaggcggaggtggagctggcggagagcgggaggcggctgcgactgccgcgggaccagatccagcgcatgaacccgcccaagttcagcaaggccgaggacatggccgagctgacctgcctcaacgaggcctcggtcctgcacaacctccgggagcggtactactccggcctcatctacacgtactccggccttttctgtgtggtcatcaacccgtacaagcagcttcccatctacacagaagccattgtggagatgtaccggggcaagaagcgccacgaggtgccaccccacgtgtacgcagtgaccgagggggcctatcggagcatgctgcaggatcgtgaggaccagtccattctctgcactggagagtctggagctgggaagacggaaaacaccaagaaggtcatccagtacctcgcccacgtggcgtcgtctccaaagggcaggaaggagccgggtgtccccggtgagctggagcggcagctgcttcaggccaaccccatcctagaggcctttggcaatgccaagacagtgaagaatgacaactcctcccgattcggcaaattcatccgcatcaactttgatgttgccgggtacatcgtgggcgccaacattgagacctacctgctggagaagtcgcgggccatccgccaggccaaggacgagtgcagcttccacatcttctaccagctgctggggggcgctggagagcagctcaaagccgacctcctcctcgagccctgctcccactaccggttcctgaccaacgggccgtcatcctctcccggccaggagcgggaactcttccaggagacgctggagtcgctgcgggtcctgggattcagccacgaggaaatcatctccatgctgcggatggtctcagcagttctccagtttggcaacattgccttgaagagagaacggaacaccgatcaagccaccatgcctgacaacacagctgcacagaagctctgccgcctcttgggactgggggtgacggatttctcccgagccttgctcacccctcgcatcaaagttggccgagactatgtgcagaaagcccagactaaggaacaggctgacttcgcgctggaggccctggccaaggccacctacgagcgcctcttccgctggctggttctgcgcctcaaccgggccttggaccgcagcccccgccaaggcgcctccttcctgggcatcctggacatcgcgggctttgagatcttccagctgaactccttcgagcagctctgcatcaactacaccaacgagaagctgcagcagctcttcaaccacaccatgttcgtgctggagcaggaggagtaccagcgtgagggcatcccctggaccttcctcgactttggcctcgacctgcagccctgcatcgacctcatcgagcggccggccaacccccctggactcctggccctgctggatgaggagtgctggttcccgaaggccacagacaagtcgtttgtggagaaggtagcccaggagcagggcggccaccccaagttccagcggccgaggcacctgcgggatcaggccgacttcagtgttctccactacgcgggcaaggtcgactacaaggccaacgagtggctgatgaaaaacatggaccctctgaatgacaacgtcgcagccttgctccaccagagcacagaccggctgacggcagagatctggaaagacgtggagggcatcgtggggctggaacaggtgagcagcctgggcgacggcccaccaggtggccgcccccgtcggggtatgttccggacagtgggacagctctacaaggagtccctgagccgcctcatggccacactcagcaacaccaaccccagttttgtccgctgcattgtccccaaccacgagaagagggccgggaagctggagccacggctggtgctggaccagcttcgctgcaacggggtcctggagggcatccgcatctgtcgccagggcttccccaaccgcatcctcttccaggagttccggcagcgatacgagatcctgacacccaatgccatccccaagggcttcatggatgggaagcaggcctgtgaaaagatgatccaggcgctggaactggaccccaacctctaccgcgtgggacagagcaagatcttcttccgggctggggtcctggcccagctggaagaggagcgagacctgaaggtcaccgacatcatcgtctccttccaggcagctgcccggggatacctggctcgcagggccttccagaagcgccagcagcagcagagcgccctgagggtgatgcagcggaactgcgcggcctacctcaagctgagacactggcagtggtggcggctgtttaccaaggtgaagccactgctgcaggtgacgcggcaggatgaggtgctgcaggcacgggcccaggagctgcagaaagtgcaggagctacagcagcagagcgcccgcgaagttggggagctccagggccgagtggcacagctggaagaggagcgcgcccgcctggcagagcaattgcgagcagaggcagaactgtgtgcagaggccgaggagacgcgggggaggctggcagcccgcaagcaggagctggagctggtggtgtcagagctggaggctcgcgtgggcgaggaggaggagtgcagccgtcaaatgcaaaccgagaagaagaggctgcagcagcacatacaggagctagaggcccaccttgaggctgaggagggtgcgcggcagaagctgcagctggagaaggtgacgacagaggcaaaaatgaagaaatttgaagaggacctgctgctcctggaagaccagaattccaagctgagcaagagcggaagctgctggaagatcgtctggccgagttctcatcccaggcagctgaggaggaggagaaggtcaagagcctcaataagctacggctcaaatatgaggccacaatcgcagacatggagggaccgcctacggaaggaggagaagggtcgccaggagctggagaagctgaagcggaggctggatggggagagctcagagctgcaggagcagatggtggagcagcaacagcgggcagaggagctgcgggcccagctgggccggaaggaggaggagctgcaggctgccctggccagggcagaagacgagggtggggcccgggcccagctgctgaaatccctgcgggaggctcaagcagccctggccgaggcccaggaggacctggagtctgagcgtgtggccaggaccaaggcggagaagcagcgccgggacctgggcgaggagctggaggcgctgcggggcgagctggaggacacgctggactccaccaacgcacagcaggagctccggtccaagagggaacaggaggtgacggagctgaagaagactctggaggaggagactcgcatccacgaggcggcagtgcaggagctgaggcagcgccacggccaggccctgggggagctggcggagcagctggagcaggcccggaggggcaaaggtgcatgggagaagacccggctggccctggaggccgaggtgtccgagctgcgggcagaactgagcagcctgcagactgcacgtcaggagggtgagcagcggaggcgccgcctggagttacagctgcaggaggtgcagggccgggctggtgatggggagagggcacgagcggaggctgctgagaagctgcagcgagcccaggctgaactggagaatgtgtctggggcgctgaacgaggctgagtccaaaaccatccgtcttagcaaggagctgagcagcacagaagcccagctgcacgatgcccaggagctgctgcaggaggagaccagggcgaaattggccttggggtcccgggtgcgagccatggaggctgaggcagccgggctgcgtgagcagctggaggaggaggcagctgccagggaacgggcgggccgtgaactgcagactgcccaggcccagctttccgagtggcggcggcgccaggaggaggaggcaggggcactggaggcaggggaggaggcacggcgccgggcagcccgggaggccgaggccctgacccagcgcctggcagaaaagacagagaccgtggatcggctggagcggggccgccgccggctgcagcaggagctggacgacgccaccctgtccccagatgcactaacagatggggcccagcccccttcctccctggaccccacgggcccctgtcccaggaaccccgccctctga

SEQ ID NO: 320035 - DNA, 6139 bp, Artificial Sequence
  derived and/or modified sequence
ctctttctccccaggccgaagcctcgggacggccctggaagccgaccatggcagccgtgaccatgtcggtgcccgggcggaaggcgccccccaggccgggcccagtgcccgaggcggcccagccgttcctgttcacgccccgcgggcccagcgcgggtggcgggcctggctcgggcacctccccgcaggtggagtggacggcccggcgtctcgtgtgggtgccttcggagcttcacgggttcgaggcggcggcgctgcgggacgaaggcgaggaggaggcggaggtggagctggcggagagcgggaggcggctgcgactgccgcgggaccagatccagcgcatgaacccgcccaagttcagcaaggccgaggacatggccgagctgacctgcctcaacgaggcctcggtcctgcacaacctccgggagcggtactactccggcctcatctacacgtactccggccttttctgtgtggtcatcaacccgtacaagcagcttcccatctacacagaagccattgtggagatgtaccggggcaagaagcgccacgaggtgccaccccacgtgtacgcagtgaccgagggggcctatcggagcatgctgcaggatcgtgaggaccagtccattctctgcactggagagtctggagctgggaagacggaaaacaccaagaaggtcatccagtacctcgcccacgtggcgtcgtctccaaagggcaggaaggagccgggtgtccccggtgagctggagcggcagctgcttcaggccaaccccatcctagaggcctttggcaatgccaagacagtgaagaatgacaactcctcccgattcggcaaattcatccgcatcaactttgatgttgccgggtacatcgtgggcgccaacattgagacctacctgctggagaagtcgcgggccatccgccaggccaaggacgagtgcagcttccacatcttctaccagctgctggggggcgctggagagcagctcaaagccgacctcctcctcgagccctgctcccactaccggttcctgaccaacgggccgtcatcctctcccggccaggagcgggaactcttccaggagacgctggagtcgctgcgggtcctgggattcagccacgaggaaatcatctccatgctgcggatggtctcagcagttctccagtttggcaacattgccttgaagagagaacggaacaccgatcaagccaccatgcctgacaacacagctgcacagaagctctgccgcctcttgggactgggggtgacggatttctcccgagccttgctcacccctcgcatcaaagttggccgagactatgtgcagaaagcccagactaaggaacaggctgacttcgcgctggaggccctggccaaggccacctacgagcgcctcttccgctggctggttctgcgcctcaaccgggccttggaccgcagcccccgccaaggcgcctccttcctgggcatcctggacatcgcgggctttgagatcttccagctgaactccttcgagcagctctgcatcaactacaccaacgagaagctgcagcagctcttcaaccacaccatgttcgtgctggagcaggaggagtaccagcgtgagggcatcccctggaccttcctcgactttggcctcgacctgcagccctgcatcgacctcatcgagcggccggccaacccccctggactcctggccctgctggatgaggagtgctggttcccgaaggccacagacaagtcgtttgtggagaaggtagcccaggagcagggcggccaccccaagttccagcggccgaggcacctgcgggatcaggccgacttcagtgttctccactacgcgggcaaggtcgactacaaggccaacgagtggctgatgaaaaacatggaccctctgaatgacaacgtcgcagccttgctccaccagagcacagaccggctgacggcagagatctggaaagacgtggagggcatcgtggggctggaacaggtgagcagcctgggcgacggcccaccaggtggccgcccccgtcggggtatgttccggacagtgggacagctctacaaggagtccctgagccgcctcatggccacactcagcaacaccaaccccagttttgtccgctgcattgtccccaaccacgagaagagggccgggaagctggagccacggctggtgctggaccagcttcgctgcaacggggtcctggagggcatccgcatctgtcgccagggcttccccaaccgcatcctcttccaggagttccggcagcgatacgagatcctgacacccaatgccatccccaagggcttcatggatgggaagcaggcctgtgaaaagatgatccaggcgctggaactggaccccaacctctaccgcgtgggacagagcaagatcttcttccgggctggggtcctggcccagctggaagaggagcgagacctgaaggtcaccgacatcatcgtctccttccaggcagctgcccggggatacctggctcgcagggccttccagaagcgccagcagcagcagagcgccctgagggtgatgcagcggaactgcgcggcctacctcaagctgagacactggcagtggtggcggctgtttaccaaggtgaagccactgctgcaggtgacgcggcaggatgaggtgctgcaggcacgggcccaggagctgcagaaagtgcaggagctacagcagcagagcgcccgcgaagttggggagctccagggccgagtggcacagctggaagaggagcgcgcccgcctggcagagcaattgcgagcagaggcagaactgtgtgcagaggccgaggagacgcgggggaggctggcagcccgcaagcaggagctggagctggtggtgtcagagctggaggctcgcgtgggcgaggaggaggagtgcagccgtcaaatgcaaaccgagaagaagaggctgcagcagcacatacaggagctagaggcccaccttgaggctgaggagggtgcgcggcagaagctgcagctggagaaggtgacgacagaggcaaaaatgaagaaatttgaagaggacctgctgctcctggaagaccagaattccaagctgagcaagagcggaagctgctggaagatcgtctggccgagttctcatcccaggcagctgaggaggaggagaaggtcaagagcctcaataagctacggctcaaatatgaggccacaatcgcagacatggagggaccgcctacggaaggaggagaagggtcgccaggagctggagaagctgaagcggaggctggatggggagagctcagagctgcaggagcagatggtggagcagcaacagcgggcagaggagctgcgggcccagctgggccggaaggaggaggagctgcaggctgccctggccagggcagaagacgagggtggggcccgggcccagctgctgaaatccctgcgggaggctcaagcagccctggccgaggcccaggaggacctggagtctgagcgtgtggccaggaccaaggcggagaagcagcgccgggacctgggcgaggagctggaggcgctgcggggcgagctggaggacacgctggactccaccaacgcacagcaggagctccggtccaagagggaacaggaggtgacggagctgaagaagactctggaggaggagactcgcatccacgaggcggcagtgcaggagctgaggcagcgccacggccaggccctgggggagctggcggagcagctggagcaggcccggaggggcaaaggtgcatgggagaagacccggctggccctggaggccgaggtgtccgagctgcgggcagaactgagcagcctgcagactgcacgtcaggagggtgagcagcggaggcgccgcctggagttacagctgcaggaggtgcagggccgggctggtgatggggagagggcacgagcggaggctgctgagaagctgcagcgagcccaggctgaactggagaatgtgtctggggcgctgaacgaggcactgctgagcagcaaggatgacgtcggcaagagcgtgcatgagctggaacgagcctgccgggtagcagaacaggcagccaatgatctgcgagcacaggtgacagaactggaggatgagctgacagcggccgaggatgccaagctgcgtctggaggtgactgtgcaggctctcaagactcagcatgagcgtgacctgcagggccgtgatgaggctggtgaagagaggcggaggcagctggccaagcagctgagagatgcagaggtggagcgggatgaggagcggaagcagcgcactctggccgtggctgcccgcaagaagctggagggagagctggaggagctgaaggctcagatggcctctgccggccagggcaaggaggaggcggtgaagcagcttcgcaagatgcaggcccagatgaaggagctatggcgggaggtggaggagacacgcacctcccgggaggagatcttctcccagaatcgggaaagtgaaaagcgcctcaagggcctggaggctgaggtgctgcggctgcaggaggaactggccgcctcggaccgtgctcggcggcaggcccagcaggaccgggatgagatggcagatgaggtggccaatggtaaccttagcaaggcagccattctggaggagaagcgtcagctggaggggcgcctggggcagttggaggaagagctggaggaggagcagagcaactcggagctgctcaatgaccgctaccgcaagctgctcctgcaggtagagtcactgaccacagagctgtcagctgagcgcagtttctcagccaaggcagagagcgggcggcagcagctggaacggcagatccaggagctacggggacgcctgggtgaggaggatgctggggcccgtgcccgccacaagatgaccattgctgcccttgagtctaagttggcccaggctgaggagcagctagagcaagagaccagagagcgcatcctctctggaaagctggtgcgcagagctgagaagcggcttaaagaggtggtgctccaggtggaggaggagcggagggtggctgaccagctccgggaccagctggagaagggaaaccttcgagtcaagcagctgaagcggcagctggaggaggccgaggaggaggcatcccgggctcaggccggccgccggaggctgcagcgtgagctggaagatgtcacagagtcggccgagtccatgaaccgtgaagtgaccacactgaggaaccggcttcgacgcggccccctcaccttcaccacccgcacggtgcgccaggtcttccgactagaggagggcgtggcatccgacgaggaggcagaggaagcacagcctgggtctgggccatccccggagcctgaggggtccccaccagcccacccccagtgaccctaccctgtccccagatgcactaacagatggggcccagcccccttcctccctggaccccacgggcccctgtcccaggaaccccgccctctgacttcttgccctttggaaatggtgcagcactctggcatttatcacccccacctgggtcccctgcaacctcccatcaaaggatgacccctaaacacagaggagcggggcaggcagggaggcaatgactggagctaccttgcttgttgggggactgggtacagttggcaagctgtgtttccatcagctccctgtcctcctttcttccctcgttattgatctatagacattaggaagggagtgagacggctcctccaccatcctcagccagtgcaacccattccctctgcttctctctctctctctctctctccctccctctccttccctaccctctcaccatctttcttggcctctctgagggtctctctgtgcatctttttaggaatctcgctctcactctctacgtagccactctccttcccccatttctgcgtccacccctgaactcctgagcgacagaagccccaggcctccaccagccttgaacccttgcaaaggggcaggacaaggggacccctctcactcctgctgctgcccatgctctgccctcccttctggttgctctgagggttcggagcttccctctgggactaaaggagtgtcctttaccctcccagcctccaggctctggcagaaataaactccaacccgactggacc

SEQ ID NO: 320036 - DNA, 4437 bp, Artificial Sequence
  derived and/or modified sequence
atggccgccgtgaccatgagcgtgcccggccggaaggcccccccccggccgggccccgttccagaggctgctcagcctttcctgtttactccaaggggtccgtcggccgggggcggaccagggtccggcacctctcctcaggtggagtggaccgccaggcgcctggtctgggtgccttctgaactgcacggtttcgaagcagcggctctacgagacgaaggtgaggaggaggcagaggtcgagcttgcagagtctggacgccgtctgcggctcccccgtgatcaaatccagcggatgaaccccccaaagttttctaaagccgaagatatggctgagcttacctgcttaaatgaagcctccgtgcttcacaacctgcgtgagcgctactatagcgggcttatttacacgtattctggcttgttctgcgtcgtgattaacccttataagcaacttcccatttatacggaagccatcgttgagatgtaccgtgggaaaaagcgccatgaggtgccccctcatgtgtacgcagtcacagaaggtgcctaccggtctatgttacaggacagagaggatcagtccattctctgtactggcgagtctggagcaggcaagaccgagaatacaaagaaggtgatccagtacctggcccacgtcgcctcatctccgaaagggagaaaagagcctggagtccccggtgaactggagaggcaactccttcaagccaatccaatccttgaggcatttgggaacgcaaagaccgtaaaaaatgacaacagctccagattcgggaaatttattaggatcaatttcgacgtagccgggtacattgtaggcgccaatattgaaacatatctgttggaaaaaagtcgcgccatacggcaagctaaggatgaatgctcgttccatatcttctatcaactgttgggaggggccggggaacaactaaaagctgatctcctactcgaaccctgtagccactaccgctttttgacaaacggtccgtcttcgagtccgggacaggaacgcgagttattccaggaaactctcgaatcgcttcgagttctggggtttagtcacgaggagatcatttcaatgcttagaatggtgtcagctgttctgcagtttggcaacatcgccctcaagagggaacgcaacactgaccaggcgaccatgccagacaatacagctgctcagaaattatgcagacttctgggcttgggggtcacagatttcagccgggccctgcttacacccagaatcaaagtgggaagagactatgtgcagaaggcccagactaaagagcaggcggactttgccctggaggcgttagctaaggccacctacgaaaggctgttccgatggttggttttgcgcctgaacagagcactggaccgatcccctcgtcaaggggccagtttcctaggaatactggatattgctgggtttgagatttttcaactcaactctttcgaacaactctgtattaactatacaaatgaaaaactgcagcagttgtttaatcatactatgtttgtactggagcaggaagagtatcaacgagaaggtattccatggacattccttgacttcggactggacctgcaaccatgcatagacctgatcgagcgacccgccaatcctcctgggctactagcccttctggatgaggaatgttggtttccgaaggcaaccgataaatcattcgtcgagaaggtggcccaggagcagggcggtcacccaaagttccagcggccaagacacttacgggaccaggccgatttttcggtattacactatgctgggaaggtggattacaaggctaacgagtggctaatgaaaaatatggaccctttgaacgacaatgtggccgcactcttacatcagagcaccgaccgcctgacagcagaaatttggaaggacgttgagggaatcgtgggactggagcaggttagctctttgggcgatggacctcctggaggcaggcccaggcggggaatgtttcggactgttggacagctgtacaaagaaagtctgagtaggctgatggcaacattgagtaataccaatccaagctttgtacggtgcattgttcctaaccatgagaagcgggccggtaagctggaacctcgactcgtgcttgatcaactccgctgcaatggggtgttagaaggcattagaatctgcagacagggctttccaaatcggatcctgttccaggagttccgacagaggtatgagattctcacgcccaacgctattcctaaaggctttatggatggcaagcaggcatgcgagaagatgattcaggccctcgaattagatcctaacctgtatcgcgtgggacagtcaaagatcttcttcagggccggggtgcttgcgcagctcgaagaggagagggacttgaaagttactgacattatagtgtccttccaggccgccgctcgagggtatctcgctagacgcgcctttcagaagaggcaacagcagcaaagtgccctgagagtgatgcagaggaactgcgcggcctatctgaaactgcgtcactggcagtggtggcggctattcactaaagttaaacctttactgcaggttacgagacaggatgaggtccttcaggctcgggctcaggaactccaaaaagtacaagaactccagcagcagtccgctagagaagtaggagaactgcaaggcagagtcgcccagctggaagaggagagagctcgcctcgctgagcaactgcgggctgaggcagagctctgcgccgaggctgaggagacacggggccggttagcagcgcgcaagcaggagctcgaattggttgtgagcgaactggaggcacgggtgggggaggaagaggagtgtagtcgccagatgcagactgaaaaaaagaggttacagcagcacattcaggagctcgaggctcatctcgaggctgaggagggagctcgccaaaaactccaactcgagaaagtaacgactgaggcaaagatgaaaaagtttgaagaagacctgctgttgctcgaggatcagaattccaaactcagcaagtccggctcttgttggaaaatcgtatggcccagtagccaccccaggcagctgcgtaggaggaggcgttctcgggcaagtatttcatacgggtctaacatgcggccccaatctcagacctggagagacaggctgagaaaagaagagaagggccgccaagagctggagaaactcaaaagacgtctcgacggggagtcatccgagctccaggaacagatggttgagcagcagcagagagccgaagagcttcgcgcacagcttggaaggaaggaagaagaactccaggctgcactggcccgggctgaggacgaaggcggtgctagggcccagttactaaaatcgctccgagaggcccaggccgccttggccgaggcacaggaggacctcgaaagcgagagggttgccaggacaaaggctgagaagcagcgaagggatcttggagaagagctggaggctcttcggggagaactggaggataccctggactccactaatgcccagcaggaattgagaagcaagcgggagcaggaagtaacggaactgaagaaaactcttgaagaggaaacacggatccatgaagctgcagtgcaagaacttcgacagcgccacgggcaggcacttggtgagttggcagagcagctcgagcaggcaagaaggggcaagggagcatgggagaagacccggttggccctggaagcggaggtatcggaactccgagcagagctcagtagcctgcagaccgcgcggcaagagggtgaacagagaaggaggaggctcgagctacagctccaagaggtccagggaagggcaggcgatggtgagagagcccgggcagaagctgctgagaaactccagcgggctcaagccgagctcgagaacgtgagcggtgccctgaatgaggcagagtcaaagacaatccgcctgtcaaaggagctgagcagcaccgaggcgcaactgcacgacgcccaggaacttctgcaggaggagactcgggccaagctggcactagggtcccgtgtgcgcgcaatggaggctgaggccgccggactaagggagcagctggaagaagaggctgccgcccgcgagcgggccggtcgcgaactgcaaacagcccaagcacagctttccgagtggcgccgacgacaggaggaggaagcaggcgctctggaggctggtgaggaggcccgcaggcgcgctgctcgcgaggctgaggcacttacacagagactggctgagaagacagagaccgtcgatagactggaacgaggacgacgccgcctgcagcaggaactcgatgatgccaccctgtcacctgatgccctcacagatggggcgcagccaccctccagcctggatcccactggaccatgcccacggaatcccgcgttatag

SEQ ID NO: 320037 - DNA, 5340 bp, Artificial Sequence
  derived and/or modified sequence
atggccgccgtgaccatgagcgtgcccggccggaaggccccccccaggcccggaccagtcccggaagctgcccagccattcctgttcaccccaagaggcccatctgcgggcgggggccccggctccggcacatctccgcaggtggagtggacggcccgcaggttggtatgggtgccatctgagcttcatggattcgaggctgccgctctcagagatgagggcgaagaggaagctgaggttgagctggccgagagcggaaggcgcctgaggctgcctcgcgaccagatacagagaatgaacccccctaagttctccaaagcagaagatatggcagaactcacatgtttgaacgaagcatccgtccttcataatctgagggaacggtactacagcgggctcatctacacttatagtggtctgttttgcgtggtcatcaacccttacaagcagctacccatctacacggaagccatcgtggaaatgtatagaggcaagaaaagacatgaggtgcctccccatgtgtacgcagtgaccgagggagcttacagatctatgctgcaggatagggaagatcagtcaatattatgcacgggcgagagtggcgcaggcaagactgagaacacgaaaaaggtgatccagtatctagctcatgttgcttcttcgccaaaaggccgaaaggaacctggggtgcctggggagctcgaaaggcagcttctccaggcgaaccccattttagaggcattcggcaatgccaaaaccgtaaagaacgacaactccagcagatttggcaagtttatccgtatcaacttcgacgtcgcaggatacattgttggggccaatatcgaaacatacctgctggagaaaagccgtgctataaggcaggcaaaggacgagtgctccttccacatcttctatcaactgctggggggcgccggagaacagctgaaggccgacctgctcttggagccctgcagccactacagatttctcacaaatggcccttcatccagtccgggacaagaacgagagctatttcaggaaaccctggaatcacttagagttctcggcttctcacacgaggaaattatctctatgctaaggatggtgtccgcagtcctccagttcggaaatattgccctcaagagggagcggaacacggatcaggccacaatgccggacaacacagctgcccagaagttgtgccggctgctgggattgggtgtgaccgatttctcccgggcattgctcacgccccgtattaaggtgggcagagactacgtgcagaaagctcagacgaaggaacaggcggattttgccctggaggctctggcaaaggccacctatgaaagactgttccgatggttagttctgaggcttaaccgtgctctggacaggtccccacggcagggggcctccttcctgggaatattagacatcgccggatttgaaatcttccagttgaacagcttcgaacagttatgtattaactacaccaacgagaagctccaacagcttttcaatcataccatgtttgtacttgaacaggaggaataccagagagagggcattccctggaccttcttagacttcggtctggacctgcaaccttgtatcgacctcatagaacgccctgccaatccacctggcctccttgcgcttctcgacgaagagtgctggtttcccaaggctacagataagtctttcgttgaaaaggtggctcaggagcaggggggccaccctaagtttcaaaggccacgccacctgcgtgatcaagccgatttctctgtgctccactatgccggaaaggtagactacaaagccaacgagtggttgatgaagaatatggatcctctcaacgataatgtcgctgcactcttacatcaatcgactgaccgactgacggctgaaatatggaaggacgtggaggggatcgtaggactagagcaggtctcttcactgggcgacggaccaccagggggtcgtccgaggcgaggaatgtttcgaacagtggggcagctttataaagagtcattatcaaggctcatggcgactctgagtaacaccaatccctcttttgtccgctgtatcgtgcccaatcatgaaaaacgcgccgggaaactggagcccagattggtactcgaccagctcagatgtaatggcgttcttgaaggaatccgcatctgcagacagggtttcccaaaccgcatactctttcaagagttcaggcagcgttatgagatccttacccccaatgcgattccaaagggcttcatggacggtaaacaagcctgtgagaagatgatccaagctttggagctcgatccaaacctgtaccgtgttgggcagagtaaaatttttttccgcgctggggtactggcacagttggaagaggagagggaccttaaggttaccgatataattgtgagctttcaggcagccgctagagggtaccttgcccgccgcgctttccagaagaggcagcagcagcagtctgccctccgtgtgatgcagagaaattgtgccgcatatctgaagcttaggcactggcagtggtggagattattcacgaaggtgaagcctctgctgcaggtgactaggcaggatgaagtcctgcaggctcgtgctcaagaactccagaaggtgcaggaattgcagcagcagtccgcccgtgaggtcggcgagttgcaggggcgggtggctcagctggaagaggagagggcgcgactcgctgaacagcttagggcagaagccgaattgtgcgctgaagccgaagagaccagaggcaggttggctgctcggaagcaggaacttgaactggtcgtgtcagaattagaggcaagggtaggagaggaggaggagtgctctcgccagatgcagaccgagaagaagaggctacaacagcatattcaggagcttgaagcccacctggaagcggaggagggtgctcgccagaaactgcagctcgaaaaagtgaccacggaggcgaaaatgaagaagttcgaggaagatctgttgctgcttgaggaccagaactcaaaactgtccaaaagtggaagctgttggaagattgtgtggcctagctcccaccctcgacagctgagacggcgcagaagatcacgcgcttccatcagctacggctccaacatgaggccacagagccagacatggcgtgatagactcaggaaagaggaaaaaggccgacaggagttggaaaaactcaaaagacggctggatggagaatcctcagagctccaggagcagatggtggaacagcagcaaagagcagaagaacttagggcccagctggggaggaaggaggaggaactacaggccgctctggctagagctgaggacgagggtggcgctcgggctcagctgcttaagtcacttcgcgaagcacaggcagccttggccgaagcccaggaagacctcgagtcagaacgtgtggcccgcactaaggcagaaaagcaacggcgcgacctaggcgaggaactcgaggccctgcggggggagctagaggatacactggacagtaccaacgcgcagcaagaattacgctcaaaaagggagcaggaggtgacagagttgaaaaaaactctggaggaagagaccaggatccacgaggcagccgtccaggagctgcggcagcgacacgggcaggctttgggagagctggcagagcaacttgaacaggcccgtcgtggcaaaggtgcttgggagaaaaccaggcttgccctagaggcagaagtgtccgagttgcgagctgaattgtcttcactacagacagctaggcaggaaggagagcagaggagaagacgacttgaattacaactgcaggaggtgcagggcagggccggtgatggagaacgagcccgcgcagaggccgctgaaaaacttcagagggctcaggccgaactggaaaacgtgagcggcgcccttaacgaagccctgttatccagtaaggatgatgtgggcaagagtgtccacgagctggagcgagcgtgtagggtggctgaacaggctgctaatgatcttcgggcgcaggtgacggaattggaggatgaactgactgccgccgaagacgccaagttgcggctggaggtgaccgtacaggccctgaaaacccaacatgaaagggaccttcagggccgcgacgaggccggtgaagaaagacgccggcagctggcgaagcagctacgtgacgccgaggtggaaagggacgaagagaggaagcagcgcaccttagctgtcgccgcccgcaagaagttagagggagaattggaggaactgaaagcccagatggctagcgccgggcaggggaaagaggaagcagtgaagcaactccgcaagatgcaagcacagatgaaggaactctggcgcgaagtagaggagactcgaaccagtagagaggaaatcttttcacaaaatcgagagtctgagaagcgcttgaaaggcttggaggcagaagttctcagactgcaagaggagcttgccgcttcagacagagccagacggcaagcccagcaggatcgcgatgagatggctgacgaggtagccaacgggaacctctctaaggccgccattctggaagagaaacggcagctggaggggcgactgggacagctagaggaagaactggaggaggagcagtccaatagtgagctgttgaacgatcggtatagaaagcttctcttacaggtagaatccctcactacggaactgtcagcagagcgttctttctctgccaaagctgagagtggacgacagcagctcgagcggcagattcaggaactgcggggtagacttggagaagaggatgccggcgcacgcgcccgccataagatgaccattgccgccctcgaaagcaagctggcacaggcggaggagcaacttgaacaagagactagggaaaggatcttatcgggtaagctcgtccggcgagcagagaagcgactgaaggaagttgtcctgcaagttgaggaagagaggagggtggcggatcaactgagagatcagctggaaaaaggaaatttacgagttaaacaattgaagcggcagctcgaggaagccgaagaggaggcatcccgggcacaagccgggcgtcgccggctccagcgggaactcgaggatgtaactgaaagtgctgagtcaatgaatcgcgaggttactactctcaggaaccgccttcggcggggtccactcacgttcacaactaggaccgtgaggcaagtctttagactggaggagggcgtcgcaagcgatgaagaagccgaagaagcccagcccggatctggcccctccccagaacctgaagggtccccccccgcccatccccagtag

SEQ ID NO: 320038 - DNA, 4437 bp, Artificial Sequence
  derived and/or modified sequence
atggcagcggtgaccatgtccgttcctggcaggaaggccccaccacgtcctggacccgtgccagaggctgcccaaccttttctctttactccacggggaccatctgctgggggtggaccgggtagcggaactagcccccaggtcgaatggacagccagaagattggtttgggtgcctagtgagctgcacggatttgaggccgcagcacttcgtgacgaaggcgaggaagaggcagaagttgaactggccgagagcggccgaaggctccgtctccccagggatcagatccagcgcatgaaccctcctaaattctctaaggccgaagatatggctgagctcacctgcctaaacgaggcgtcggttttacataaccttcgcgagcgttactactctggtctgatatacacttattctggactgttttgtgttgtcattaacccttacaagcagctcccaatatatacagaggccatcgtggaaatgtataggggcaagaaacgacacgaagtacccccacacgtgtacgctgtgacagagggcgcttacaggagcatgcttcaagatcgggaggatcagtctattctctgtactggggagagcggggcaggaaaaaccgagaacaccaaaaaagttatccaatacctggctcatgtcgcgtcgagccccaaggggaggaaagaacccggagttcctggggaactagaacgccaactccttcaggctaatccaatcctggaggctttcggcaacgcgaaaacagtaaaaaatgataactcaagtagatttggcaagttcatcaggattaatttcgatgttgccggatatattgtcggcgcaaacatcgaaacctatctactcgagaaaagcagggcaataaggcaggcaaaagacgagtgtagtttccacatcttttatcagctgctgggtggagccggagaacagcttaaagctgatcttctactggagccctgctcacactatcggttcctgaccaacggtccctctagtagtcctggccaggagagagaactctttcaggaaactctggagagtctccgcgtgttagggttttcccatgaggaaattatctccatgctgagaatggtcagcgccgtgctgcagtttggcaacatagcgctgaagcgcgagcgcaataccgatcaagccacgatgcctgataacaccgccgctcagaaattatgtcgccttctgggcctgggtgtgacagacttttcacgcgctctgttgacccctcgcattaaggttggcagagactacgtacagaaggctcaaacgaaggagcaggcggatttcgccctggaagctctggctaaggctacttacgagagacttttcaggtggctggttttgagactcaacagggctttggaccgaagccctcgacagggggcatccttcctggggatactggatatagctggcttcgagattttccagcttaactctttcgagcagctgtgcatcaactatactaatgaaaagctgcagcagctgtttaatcacactatgtttgtcctggagcaagaagagtaccagcgcgagggtatcccatggacattcctcgatttcggccttgacctccagccctgtatcgacctgatagagagacccgctaaccccccaggcttgctggcactgctggacgaggagtgttggttcccgaaggccaccgataaaagcttcgtagagaaagtggcacaggagcaggggggtcatcccaagtttcagagaccaaggcatctgcgggatcaggcggacttctccgttctgcactacgccggaaaagtggattataaagctaatgaatggctcatgaaaaacatggaccctcttaatgacaatgtcgcagccctattgcaccagagcaccgaccgcctcactgccgagatctggaaggacgtcgagggcatcgttggtctggagcaggtgagcagcctgggtgatggccctcccggtgggcgacctaggcggggaatgttcagaaccgtcgggcaactctacaaggagtctctaagtcgcctcatggccactttgtcaaacaccaatccaagctttgtcaggtgcattgtcccgaatcatgagaaaagagcgggaaaattggaacccagactggtcctggaccagctgaggtgtaatggcgtgctggaaggaatcaggatatgtcgtcagggtttccctaaccgaattctgttccaagagttccgccaacgctacgaaattctcacccccaacgccatcccgaaaggtttcatggacggaaaacaggcatgcgagaaaatgatacaggcgctggagttagatcctaatctttaccgggttgggcagagcaaaatcttctttcgcgctggagtgctcgcgcagcttgaggaggaacgcgatttgaaggtaactgacattattgttagtttccaggccgcagccagggggtatcttgccagaagagccttccagaagagacagcagcagcagtctgcccttcgtgtcatgcaacgcaattgcgccgcatatcttaaactgcgacattggcaatggtggcgcctgttcaccaaagtgaagcctctgttacaggtaacaagacaggacgaggttcttcaggcacgggctcaggaattgcagaaggtgcaggaactacagcagcagagcgctcgggaggtgggagagttacagggacgagtcgcacagcttgaagaggagcgtgctagactggccgagcagctgagagcggaagccgagctgtgcgccgaagccgaagagactcggggaagactggcggctcggaagcaggaattagaactcgtcgtgtccgaactcgaggctcgggtcggcgaggaggaggagtgttcccgccagatgcaaaccgagaagaagaggctgcagcagcacatccaggaactcgaagcacacctcgaggctgaagagggcgcacgccagaagttgcagttagagaaggtcaccactgaggcaaagatgaagaaatttgaagaggatctgttgctgttggaagaccagaatagcaagctgtcaaagtccggatcatgctggaaaatagtttggccctcctcccaccctagacagctaagaagacggaggcggagcagagcgagcatttcttacgggagcaatatgcggccacagtcccaaacttggcgggatcggctacgcaaagaggagaaagggaggcaggagctggagaaactgaagcgacgcctagacggagagtcttcagagctccaggagcagatggtggaacagcaacagcgagcagaggaacttcgggctcaactaggcaggaaggaggaagagctgcaggccgctctggcgcgtgctgaggacgagggcggagccagggcccaactccttaagagcctgcgcgaagctcaggcggcactcgcagaggctcaggaagatctcgaatcagagcgggtcgcccgtactaaggccgaaaaacagaggcgagatcttggggaggagctagaagccctcagaggcgagctggaggacaccctagattccactaacgctcagcaggagctgaggtcaaagagggagcaggaagtgactgagctgaagaaaaccctggaagaagagacgcggatccacgaagctgccgtacaggagctgagacaacgccacggacaggcactgggagagctagccgagcagctggaacaagcaagacggggaaaaggagcgtgggagaagacaaggttagccttagaagccgaagtctcagagttgcgcgctgagctctcctccctacagacagctagacaggagggagagcaacgtcggcgtcgtctggagctccagctacaggaggtgcagggcagggccggtgacggggagagagcccgagcagaagccgcagaaaaactgcagagggctcaggccgagcttgagaacgtctcaggtgctctgaatgaggcagaaagcaaaactatccggctttcaaaggagctgtcttccacggaggcccagttgcacgacgcccaagagttgttgcaagaggagacgcgtgcgaagctggcgctgggatcccgggtgcgcgctatggaagcagaagcagcgggactccgagagcaactggaggaagaggcggctgcacgcgagagagcagggcgtgagctgcagaccgcacaggcccaactgtccgagtggaggagacggcaggaagaagaggccggtgctcttgaggcaggggaggaagcgaggcggagggccgcacgcgaagcggaggcgctgactcaacgcttagctgagaagactgagaccgtggatcgtctggaaagaggcaggaggaggttacagcaggaactcgacgatgcaacactcagtccggacgctttgaccgatggagcccaacctccaagttctttggacccgacaggtccatgtccacggaaccctgccctgtag

SEQ ID NO: 320039 - DNA, 5339 bp, Artificial Sequence
  derived and/or modified sequence
atggccgcagttacgatgtctgtgcccggacgcaaggcccctccaaggccgggaccagtgccagaagccgctcaaccttttttgtttacccccagaggcccatctgctgggggagggccaggatcaggcacatcacctcaggtggaatggacggcaaggcgcctggtctgggtcccgagcgaactgcatggcttcgaggccgctgcgctgcgggacgagggcgaagaagaggctgaggtcgagctggcagagtcaggcaggcggctcaggctgcccagggaccagatccagcgaatgaacccccctaagtttagcaaggcagaggatatggccgagttgacctgcctgaacgaggcttcggtactgcacaatcttcgggagcggtattacagcggactgatttacacgtattcaggcctcttctgcgttgttattaatccctataaacagttacctatctacacagaggctatcgttgagatgtatagaggtaaaaagcgccatgaagttccacctcacgtgtatgctgtcaccgaaggcgcttataggagtatgttacaggatcgagaggaccagtccattctctgtaccggggaatcgggcgcaggaaaaacagagaacactaagaaagtaatacaatatctcgcccacgtggcttccagcccgaagggtaggaaagagcctggggtacctggcgaactggagaggcagctcctgcaggctaatccgatccttgaagctttcggcaacgccaagactgtgaaaaacgataacagctcaagatttggcaagttcatcaggataaacttcgatgtggctggatatatcgtgggtgctaatattgaaacctaccttttagaaaagagccgggcaattaggcaagctaaggatgagtgctcatttcatatcttttatcagctgctcggtggcgcaggagagcagctcaaagctgatctgcttctggagccatgctcccactatcgctttctgacgaatgggccatctagctcacccggacaggagcgtgaactttttcaggaaactcttgaatcactgagggtcctggggttcagccatgaagagattatctccatgctacggatggtgtcagctgtcctccaattcggcaatatcgcactaaagcgtgagaggaacacagatcaggccacgatgcctgataataccgctgctcagaagctctgtagactccttggactcggcgtgacagacttctcccgcgcactgctaacacccaggattaaggtgggcagagactatgtgcagaaggcacagaccaaggagcaggccgacttcgcactagaggccctggcaaaagcaacatatgaacggctgttccggtggctcgtattgaggttgaaccgcgctttggatcgcagtccaagacagggagccagttttctgggtattctggacatagccggatttgaaatcttccaactcaacagcttcgaacagctctgtataaactataccaacgaaaagttgcagcagctgttcaatcacactatgtttgtgctggagcaggaggagtaccagagagagggcatcccgtggactttccttgactttggcctggaccttcaaccgtgtatcgatctgatagagaggccggctaaccccccaggacttcttgccctgctagacgaagagtgttggtttcccaaggcgaccgataagtcctttgtggaaaaagtggcacaggagcagggcggtcacccgaaatttcagcgaccaaggcatcttagagatcaggctgacttcagtgttcttcattacgcagggaaggtggattacaaagcaaatgagtggctgatgaagaacatggaccccctgaatgacaacgtggctgcactacttcatcagagcacggatcggctgacggcggagatatggaaagatgtggaaggtattgtcgggctggaacaggtgtccagcctgggcgacggtccaccgggaggtcgacctaggcgcggtatgtttcgcaccgttggtcagttgtataaagagtctctgagtaggctgatggctacgctcagtaacacgaatcccagcttcgtcagatgcattgtgccaaaccatgagaagcgcgctggaaaactcgagccacgcttagtgttagatcagttgagatgcaacggagtactggagggtataagaatatgcaggcagggattccctaaccgtattctgtttcaggaatttcggcagcgctacgagattctgacgccgaacgctatcccaaagggcttcatggatggaaagcaggcctgcgaaaagatgatccaggccttggagctggatcccaatctttatcgggtaggtcagtcaaaaatctttttcagggcaggtgtgctcgcgcaacttgaagaagaacgggatttaaaggtcactgatataatcgtgagcttccaggcagctgcccgtggatatctggccagacgcgcatttcaaaagcgacagcagcagcaaagcgcactgcgcgtcatgcaacgcaattgtgccgcttacctcaagctccggcactggcagtggtggaggctgtttacaaaagttaagccccttctacaggtgactcggcaggatgaggtattgcaggcgcgtgcacaggaattgcagaaggtgcaggaactgcaacagcagagcgccagggaggtcggcgaactccaaggccgagtggcacagctggaggaggaaagagcacgcttggcagagcagcttcgtgccgaggcggagttgtgcgccgaagcagaggaaacccgcggaagactggccgcacgtaagcaggagctggaactcgtggtgtccgaactggaggccagagttggtgaagaggaggagtgttcccggcagatgcagactgaaaagaagcgtctgcaacaacatattcaggaattagaggctcacctggaggcggaggaaggagcccgtcagaaactccagttggaaaaagtgactacagaagcaaaaatgaaaaagttcgaggaggatcttctactgttagaggaccagaattccaaactttctaagtctggcagttgttggaaaatcgtatggccaagttcccaccctcggcagctacgaagaaggaggcggagccgggcttctatttcatacgggtcaaatatgagaccacagagccagacctggagagaccgcttgagaaaagaggaaaaaggacgacaggagctagaaaagctgaagcgcagactggatggcgagtcctctgagcttcaggagcaaatggtcgagcagcagcaaagggctgaggagctcagggctcaactgggacgcaaggaagaagaattacaagcagcgttagccagagcagaggacgaagggggagctcgggctcagctgctaaagtcccttcgcgaagcacaggcggctcttgctgaggcccaggaggatctagaatccgagagagtggcacggactaaagccgaaaaacaaaggcgggaccttggcgaagagctggaggcacttagaggagaactggaggacactctggacagtactaacgcccaacaggagttgcgcagtaagcgggaacaggaagtgaccgagcttaaaaagacactggaggaggaaaccaggatccacgaggccgcagtgcaggagctccgacagcgccacggccaagccctcggtgaattggctgagcagctcgagcaggctaggcgcggaaagggagcatgggaaaaaactaggttggcgttggaggccgaagtttccgagttacgcgctgagctcagttcactgcagacagctagacaggaaggtgagcaacggaggcgacgattagagttacagttacaggaggtgcaggggagagccggagacggagagcgagcacgagccgaggctgctgaaaagcttcaaagagcccaagccgagctcgaaaatgtcagcggagccttgaatgaagccttgctctcttccaaggatgacgtgggcaagtccgttcacgaactggagagggcctgtcgggttgccgaacaagcggcaaatgatctacgcgcacaggtaactgaactcgaagatgaactgactgcagccgaggatgccaaattgcgcctggaggtcacagtacaggccttaaagactcagcatgaacgggacctccagggtagggatgaggccggtgaagaacgcagaaggcagctcgcaaagcaactcagggacgcagaggttgagcgagatgaggagcgcaaacagcggactcttgccgtcgctgccaggaagaagttggagggcgagttagaggagctcaaggctcagatggcatcggcaggacaaggcaaggaggaagcagtgaagcagctccgcaagatgcaggcacagatgaaagagctgtggcgggaggtcgaggaaaccaggacctctagagaggaaatatttagtcaaaatcgggagtcagaaaagagactgaaaggtctggaagccgaagttctaagattgcaggaggaattagctgcgtctgaccgggcacgacgccaggcccaacaggatagggatgagatggccgacgaagtggccaatgggaatctgtctaaagcagcaatacttgaggagaagcggcaactggaagggagactaggccaattagaagaagaacttgaggaggagcagtccaattctgagcttctgaatgatcgttaccgcaaattgcttttacaagtagaatctttaactaccgaactgtccgccgagaggtcgttcagcgccaaggcagaatccggcagacaacagctcgagcgacaaatacaagagctccgaggtagacttggtgaggaagacgccggtgccagagcaaggcacaagatgacgatcgcggcactggagtcgaagctggctcaggcagaggaacaactcgaacaggaaacgcgagagcgcatattgagtggcaagctggtgcgcagagccgaaaagaggctgaaggaggtggtgttgcaggtggaggaagaaaggcgcgtcgcagatcagctgagggatcagctggagaagggcaacctgagagtcaaacagctaaagcggcagcttgaggaagccgaagaagaggcttcccgtgctcaagccggtcggaggcgcttgcagcgggaactggaggatgtaacagaatcagcggaatctatgaatagggaagtgaccactctacggaatagactacgacggggtccactgacattcactacccgaactgtgcgacaagttttccgactggaagagggagttgccagcgacgaagaggccgaggaggctcaaccaggaagtggcccttcgcctgagcctgagggaagcccgcctgcccatccccaata

SEQ ID NO: 320040 - DNA, 4437 bp, Artificial Sequence
  derived and/or modified sequence
atggccgccgtgaccatgagcgtgcccggcagaaaggccccccccagacccggccccgtgcccgaggccgcccagcccttcctgttcacccccagaggccccagcgccggcggcggccccggcagcggcaccagcccccaggtggagtggaccgccagaagactggtgtgggtgcccagcgagctgcacggcttcgaggccgccgccctgagagacgagggcgaggaggaggccgaggtggagctggccgagagcggcagaagactgagactgcccagagaccagatccagagaatgaacccccccaagttcagcaaggccgaggacatggccgagctgacctgcctgaacgaggccagcgtgctgcacaacctgagagagagatactacagcggcctgatctacacctacagcggcctgttctgcgtggtgatcaacccctacaagcagctgcccatctacaccgaggccatcgtggagatgtacagaggcaagaagagacacgaggtgcccccccacgtgtacgccgtgaccgagggcgcctacagaagcatgctgcaggacagagaggaccagagcatcctgtgcaccggcgagagcggcgccggcaagaccgagaacaccaagaaggtgatccagtacctggcccacgtggccagcagccccaagggcagaaaggagcccggcgtgcccggcgagctggagagacagctgctgcaggccaaccccatcctggaggccttcggcaacgccaagaccgtgaagaacgacaacagcagcagattcggcaagttcatcagaatcaacttcgacgtggccggctacatcgtgggcgccaacatcgagacctacctgctggagaagagcagagccatcagacaggccaaggacgagtgcagcttccacatcttctaccagctgctgggcggcgccggcgagcagctgaaggccgacctgctgctggagccctgcagccactacagattcctgaccaacggccccagcagcagccccggccaggagagagagctgttccaggagaccctggagagcctgagagtgctgggcttcagccacgaggagatcatcagcatgctgagaatggtgagcgccgtgctgcagttcggcaacatcgccctgaagagagagagaaacaccgaccaggccaccatgcccgacaacaccgccgcccagaagctgtgcagactgctgggcctgggcgtgaccgacttcagcagagccctgctgacccccagaatcaaggtgggcagagactacgtgcagaaggcccagaccaaggagcaggccgacttcgccctggaggccctggccaaggccacctacgagagactgttcagatggctggtgctgagactgaacagagccctggacagaagccccagacagggcgccagcttcctgggcatcctggacatcgccggcttcgagatcttccagctgaacagcttcgagcagctgtgcatcaactacaccaacgagaagctgcagcagctgttcaaccacaccatgttcgtgctggagcaggaggagtaccagagagagggcatcccctggaccttcctggacttcggcctggacctgcagccctgcatcgacctgatcgagagacccgccaacccccccggcctgctggccctgctggacgaggagtgctggttccccaaggccaccgacaagagcttcgtggagaaggtggcccaggagcagggcggccaccccaagttccagagacccagacacctgagagaccaggccgacttcagcgtgctgcactacgccggcaaggtggactacaaggccaacgagtggctgatgaagaacatggaccccctgaacgacaacgtggccgccctgctgcaccagagcaccgacagactgaccgccgagatctggaaggacgtggagggcatcgtgggcctggagcaggtgagcagcctgggcgacggcccccccggcggcagacccagaagaggcatgttcagaaccgtgggccagctgtacaaggagagcctgagcagactgatggccaccctgagcaacaccaaccccagcttcgtgagatgcatcgtgcccaaccacgagaagagagccggcaagctggagcccagactggtgctggaccagctgagatgcaacggcgtgctggagggcatcagaatctgcagacagggcttccccaacagaatcctgttccaggagttcagacagagatacgagatcctgacccccaacgccatccccaagggcttcatggacggcaagcaggcctgcgagaagatgatccaggccctggagctggaccccaacctgtacagagtgggccagagcaagatcttcttcagagccggcgtgctggcccagctggaggaggagagagacctgaaggtgaccgacatcatcgtgagcttccaggccgccgccagaggctacctggccagaagagccttccagaagagacagcagcagcagagcgccctgagagtgatgcagagaaactgcgccgcctacctgaagctgagacactggcagtggtggagactgttcaccaaggtgaagcccctgctgcaggtgaccagacaggacgaggtgctgcaggccagagcccaggagctgcagaaggtgcaggagctgcagcagcagagcgccagagaggtgggcgagctgcagggcagagtggcccagctggaggaggagagagccagactggccgagcagctgagagccgaggccgagctgtgcgccgaggccgaggagaccagaggcagactggccgccagaaagcaggagctggagctggtggtgagcgagctggaggccagagtgggcgaggaggaggagtgcagcagacagatgcagaccgagaagaagagactgcagcagcacatccaggagctggaggcccacctggaggccgaggagggcgccagacagaagctgcagctggagaaggtgaccaccgaggccaagatgaagaagttcgaggaggacctgctgctgctggaggaccagaacagcaagctgagcaagagcggcagctgctggaagatcgtgtggcccagcagccaccccagacagctgagaagaagaagaagaagcagagccagcatcagctacggcagcaacatgagaccccagagccagacctggagagacagactgagaaaggaggagaagggcagacaggagctggagaagctgaagagaagactggacggcgagagcagcgagctgcaggagcagatggtggagcagcagcagagagccgaggagctgagagcccagctgggcagaaaggaggaggagctgcaggccgccctggccagagccgaggacgagggcggcgccagagcccagctgctgaagagcctgagagaggcccaggccgccctggccgaggcccaggaggacctggagagcgagagagtggccagaaccaaggccgagaagcagagaagagacctgggcgaggagctggaggccctgagaggcgagctggaggacaccctggacagcaccaacgcccagcaggagctgagaagcaagagagagcaggaggtgaccgagctgaagaagaccctggaggaggagaccagaatccacgaggccgccgtgcaggagctgagacagagacacggccaggccctgggcgagctggccgagcagctggagcaggccagaagaggcaagggcgcctgggagaagaccagactggccctggaggccgaggtgagcgagctgagagccgagctgagcagcctgcagaccgccagacaggagggcgagcagagaagaagaagactggagctgcagctgcaggaggtgcagggcagagccggcgacggcgagagagccagagccgaggccgccgagaagctgcagagagcccaggccgagctggagaacgtgagcggcgccctgaacgaggccgagagcaagaccatcagactgagcaaggagctgagcagcaccgaggcccagctgcacgacgcccaggagctgctgcaggaggagaccagagccaagctggccctgggcagcagagtgagagccatggaggccgaggccgccggcctgagagagcagctggaggaggaggccgccgccagagagagagccggcagagagctgcagaccgcccaggcccagctgagcgagtggagaagaagacaggaggaggaggccggcgccctggaggccggcgaggaggccagaagaagagccgccagagaggccgaggccctgacccagagactggccgagaagaccgagaccgtggacagactggagagaggcagaagaagactgcagcaggagctggacgacgccaccctgagccccgacgccctgaccgacggcgcccagccccccagcagcctggaccccaccggcccctgccccagaaaccccgccctgtag

SEQ ID NO: 320041 - DNA, 5340 bp, Artificial Sequence
  derived and/or modified sequence
atggccgccgtgaccatgagcgtgcccggcagaaaggccccccccagacccggccccgtgcccgaggccgcccagcccttcctgttcacccccagaggccccagcgccggcggcggccccggcagcggcaccagcccccaggtggagtggaccgccagaagactggtgtgggtgcccagcgagctgcacggcttcgaggccgccgccctgagagacgagggcgaggaggaggccgaggtggagctggccgagagcggcagaagactgagactgcccagagaccagatccagagaatgaacccccccaagttcagcaaggccgaggacatggccgagctgacctgcctgaacgaggccagcgtgctgcacaacctgagagagagatactacagcggcctgatctacacctacagcggcctgttctgcgtggtgatcaacccctacaagcagctgcccatctacaccgaggccatcgtggagatgtacagaggcaagaagagacacgaggtgcccccccacgtgtacgccgtgaccgagggcgcctacagaagcatgctgcaggacagagaggaccagagcatcctgtgcaccggcgagagcggcgccggcaagaccgagaacaccaagaaggtgatccagtacctggcccacgtggccagcagccccaagggcagaaaggagcccggcgtgcccggcgagctggagagacagctgctgcaggccaaccccatcctggaggccttcggcaacgccaagaccgtgaagaacgacaacagcagcagattcggcaagttcatcagaatcaacttcgacgtggccggctacatcgtgggcgccaacatcgagacctacctgctggagaagagcagagccatcagacaggccaaggacgagtgcagcttccacatcttctaccagctgctgggcggcgccggcgagcagctgaaggccgacctgctgctggagccctgcagccactacagattcctgaccaacggccccagcagcagccccggccaggagagagagctgttccaggagaccctggagagcctgagagtgctgggcttcagccacgaggagatcatcagcatgctgagaatggtgagcgccgtgctgcagttcggcaacatcgccctgaagagagagagaaacaccgaccaggccaccatgcccgacaacaccgccgcccagaagctgtgcagactgctgggcctgggcgtgaccgacttcagcagagccctgctgacccccagaatcaaggtgggcagagactacgtgcagaaggcccagaccaaggagcaggccgacttcgccctggaggccctggccaaggccacctacgagagactgttcagatggctggtgctgagactgaacagagccctggacagaagccccagacagggcgccagcttcctgggcatcctggacatcgccggcttcgagatcttccagctgaacagcttcgagcagctgtgcatcaactacaccaacgagaagctgcagcagctgttcaaccacaccatgttcgtgctggagcaggaggagtaccagagagagggcatcccctggaccttcctggacttcggcctggacctgcagccctgcatcgacctgatcgagagacccgccaacccccccggcctgctggccctgctggacgaggagtgctggttccccaaggccaccgacaagagcttcgtggagaaggtggcccaggagcagggcggccaccccaagttccagagacccagacacctgagagaccaggccgacttcagcgtgctgcactacgccggcaaggtggactacaaggccaacgagtggctgatgaagaacatggaccccctgaacgacaacgtggccgccctgctgcaccagagcaccgacagactgaccgccgagatctggaaggacgtggagggcatcgtgggcctggagcaggtgagcagcctgggcgacggcccccccggcggcagacccagaagaggcatgttcagaaccgtgggccagctgtacaaggagagcctgagcagactgatggccaccctgagcaacaccaaccccagcttcgtgagatgcatcgtgcccaaccacgagaagagagccggcaagctggagcccagactggtgctggaccagctgagatgcaacggcgtgctggagggcatcagaatctgcagacagggcttccccaacagaatcctgttccaggagttcagacagagatacgagatcctgacccccaacgccatccccaagggcttcatggacggcaagcaggcctgcgagaagatgatccaggccctggagctggaccccaacctgtacagagtgggccagagcaagatcttcttcagagccggcgtgctggcccagctggaggaggagagagacctgaaggtgaccgacatcatcgtgagcttccaggccgccgccagaggctacctggccagaagagccttccagaagagacagcagcagcagagcgccctgagagtgatgcagagaaactgcgccgcctacctgaagctgagacactggcagtggtggagactgttcaccaaggtgaagcccctgctgcaggtgaccagacaggacgaggtgctgcaggccagagcccaggagctgcagaaggtgcaggagctgcagcagcagagcgccagagaggtgggcgagctgcagggcagagtggcccagctggaggaggagagagccagactggccgagcagctgagagccgaggccgagctgtgcgccgaggccgaggagaccagaggcagactggccgccagaaagcaggagctggagctggtggtgagcgagctggaggccagagtgggcgaggaggaggagtgcagcagacagatgcagaccgagaagaagagactgcagcagcacatccaggagctggaggcccacctggaggccgaggagggcgccagacagaagctgcagctggagaaggtgaccaccgaggccaagatgaagaagttcgaggaggacctgctgctgctggaggaccagaacagcaagctgagcaagagcggcagctgctggaagatcgtgtggcccagcagccaccccagacagctgagaagaagaagaagaagcagagccagcatcagctacggcagcaacatgagaccccagagccagacctggagagacagactgagaaaggaggagaagggcagacaggagctggagaagctgaagagaagactggacggcgagagcagcgagctgcaggagcagatggtggagcagcagcagagagccgaggagctgagagcccagctgggcagaaaggaggaggagctgcaggccgccctggccagagccgaggacgagggcggcgccagagcccagctgctgaagagcctgagagaggcccaggccgccctggccgaggcccaggaggacctggagagcgagagagtggccagaaccaaggccgagaagcagagaagagacctgggcgaggagctggaggccctgagaggcgagctggaggacaccctggacagcaccaacgcccagcaggagctgagaagcaagagagagcaggaggtgaccgagctgaagaagaccctggaggaggagaccagaatccacgaggccgccgtgcaggagctgagacagagacacggccaggccctgggcgagctggccgagcagctggagcaggccagaagaggcaagggcgcctgggagaagaccagactggccctggaggccgaggtgagcgagctgagagccgagctgagcagcctgcagaccgccagacaggagggcgagcagagaagaagaagactggagctgcagctgcaggaggtgcagggcagagccggcgacggcgagagagccagagccgaggccgccgagaagctgcagagagcccaggccgagctggagaacgtgagcggcgccctgaacgaggccctgctgagcagcaaggacgacgtgggcaagagcgtgcacgagctggagagagcctgcagagtggccgagcaggccgccaacgacctgagagcccaggtgaccgagctggaggacgagctgaccgccgccgaggacgccaagctgagactggaggtgaccgtgcaggccctgaagacccagcacgagagagacctgcagggcagagacgaggccggcgaggagagaagaagacagctggccaagcagctgagagacgccgaggtggagagagacgaggagagaaagcagagaaccctggccgtggccgccagaaagaagctggagggcgagctggaggagctgaaggcccagatggccagcgccggccagggcaaggaggaggccgtgaagcagctgagaaagatgcaggcccagatgaaggagctgtggagagaggtggaggagaccagaaccagcagagaggagatcttcagccagaacagagagagcgagaagagactgaagggcctggaggccgaggtgctgagactgcaggaggagctggccgccagcgacagagccagaagacaggcccagcaggacagagacgagatggccgacgaggtggccaacggcaacctgagcaaggccgccatcctggaggagaagagacagctggagggcagactgggccagctggaggaggagctggaggaggagcagagcaacagcgagctgctgaacgacagatacagaaagctgctgctgcaggtggagagcctgaccaccgagctgagcgccgagagaagcttcagcgccaaggccgagagcggcagacagcagctggagagacagatccaggagctgagaggcagactgggcgaggaggacgccggcgccagagccagacacaagatgaccatcgccgccctggagagcaagctggcccaggccgaggagcagctggagcaggagaccagagagagaatcctgagcggcaagctggtgagaagagccgagaagagactgaaggaggtggtgctgcaggtggaggaggagagaagagtggccgaccagctgagagaccagctggagaagggcaacctgagagtgaagcagctgaagagacagctggaggaggccgaggaggaggccagcagagcccaggccggcagaagaagactgcagagagagctggaggacgtgaccgagagcgccgagagcatgaacagagaggtgaccaccctgagaaacagactgagaagaggccccctgaccttcaccaccagaaccgtgagacaggtgttcagactggaggagggcgtggccagcgacgaggaggccgaggaggcccagcccggcagcggccccagccccgagcccgagggcagcccccccgcccacccccagtag

SEQ ID NO: 320042 - protein, 2003 aa, Artificial Sequence
  derived and/or modified sequence
MAAVTMSVPGRKAPPRPGPVPEAAQPFLFTPRGPSAGGGPGSGTSPQVEWTARRLVWVPSELHGFEAAALRDEGEEEAEVELAESGRRLRLPRDQIQRMNPPKFSKAEDMAELTCLNEASVLHNLRERYYSGLIYTYSGLFCVVINPYKQLPIYTEAIVEMYRGKKRHEVPPHVYAVTEGAYRSMLQDREDQSILCTGESGAGKTENTKKVIQYLAHVASSPKGRKEPGVPASVSTVSYGELERQLLQANPILEAFGNAKTVKNDNSSRFGKFIRINFDVAGYIVGANIETYLLEKSRAIRQAKDECSFHIFYQLLGGAGEQLKADLLLEPCSHYRFLTNGPSSSPGQERELFQETLESLRVLGFSHEEIISMLRMVSAVLQFGNIALKRERNTDQATMPDNTAAQKLCRLLGLGVTDFSRALLTPRIKVGRDYVQKAQTKEQADFALEALAKATYERLFRWLVLRLNRALDRSPRQGASFLGILDIAGFEIFQLNSFEQLCINYTNEKLQQLFNHTMFVLEQEEYQREGIPWTFLDFGLDLQPCIDLIERPANPPGLLALLDEECWFPKATDKSFVEKVAQEQGGHPKFQRPRHLRDQADFSVLHYAGKVDYKANEWLMKNMDPLNDNVAALLHQSTDRLTAEIWKDVEGIVGLEQVSSLGDGPPGGRPRRGMFRTVGQLYKESLSRLMATLSNTNPSFVRCIVPNHEKRAGKLEPRLVLDQLRCNGVLEGIRICRQGFPNRILFQEFRQRYEILTPNAIPKGFMDGKQACEKMIQALELDPNLYRVGQSKIFFRAGVLAQLEEERDLKVTDIIVSFQAAARGYLARRAFQKRQQQQSALRVMQRNCAAYLKLRHWQWWRLFTKVKPLLQVTRQDEVLQARAQELQKVQELQQQSAREVGELQGRVAQLEEERARLAEQLRAEAELCAEAEETRGRLAARKQELELVVSELEARVGEEEECSRQMQTEKKRLQQHIQELEAHLEAEEGARQKLQLEKVTTEAKMKKFEEDLLLLEDQNSKLSKERKLLEDRLAEFSSQAAEEEEKVKSLNKLRLKYEATIADMEDRLRKEEKGRQELEKLKRRLDGESSELQEQMVEQQQRAEELRAQLGRKEEELQAALARAEDEGGARAQLLKSLREAQAALAEAQEDLESERVARTKAEKQRRDLGEELEALRGELEDTLDSTNAQQELRSKREQEVTELKKTLEEETRIHEAAVQELRQRHGQALGELAEQLEQARRGKGAWEKTRLALEAEVSELRAELSSLQTARQEGEQRRRRLELQLQEVQGRAGDGERARAEAAEKLQRAQAELENVSGALNEAESKTIRLSKELSSTEAQLHDAQELLQEETRAKLALGSRVRAMEAEAAGLREQLEEEAAARERAGRELQTAQAQLSEWRRRQEEEAGALEAGEEARRRAAREAEALTQRLAEKTETVDRLERGRRRLQQELDDATMDLEQQRQLVSTLEKKQRKFDQLLAEEKAAVLRAVEERERAEAEGREREARALSLTRALEEEQEAREELERQNRALRAELEALLSSKDDVGKSVHELERACRVAEQAANDLRAQVTELEDELTAAEDAKLRLEVTVQALKTQHERDLQGRDEAGEERRRQLAKQLRDAEVERDEERKQRTLAVAARKKLEGELEELKAQMASAGQGKEEAVKQLRKMQAQMKELWREVEETRTSREEIFSQNRESEKRLKGLEAEVLRLQEELAASDRARRQAQQDRDEMADEVANGNLSKAAILEEKRQLEGRLGQLEEELEEEQSNSELLNDRYRKLLLQVESLTTELSAERSFSAKAESGRQQLERQIQELRGRLGEEDAGARARHKMTIAALESKLAQAEEQLEQETRERILSGKLVRRAEKRLKEVVLQVEEERRVADQLRDQLEKGNLRVKQLKRQLEEAEEEASRAQAGRRRLQRELEDVTESAESMNREVTTLRNRLRRGPLTFTTRTVRQVFRLEEGVASDEEAEEAQPGSGPSPEPEGSPPAHPQ

SEQ ID NO: 320043 - DNA, 6012 bp, Artificial Sequence
  derived and/or modified sequence
atggctgctgtcacaatgtcagtccccggccggaaagcaccacctaggcccggcccggttcccgaggcggcccaacctttcctattcaccccccgtggacccagcgcgggcggtgggccaggtagcggcacatctcctcaagtcgagtggaccgccagacggctggtctgggttccaagtgaactccacggatttgaagctgccgctctgcgagatgagggcgaagaggaggccgaagtagagctggccgaatccgggcggcggctccgtctgccgcgggatcagattcagcgcatgaatccccccaagttcagcaaagccgaagacatggccgagctgacttgcctgaacgaagcgtccgtgttgcataatctccgggaaagatactactccggtttaatttacacatacagcggactgttttgcgtggtgatcaacccttataaacagctgcccatctacaccgaagcgatcgtggagatgtatcggggaaaaaagcggcatgaagtgccaccccacgtgtacgcggtgacggagggtgcttatagatccatgctacaggaccgcgaggaccagtcgattttatgcacgggggaatctggcgcgggcaagacagaaaacacaaagaaggtgattcagtacctggcgcacgttgcttccagtccgaagggaaggaaagaaccaggagtaccggcatctgtgagtacagtttcctatggagagcttgagcgccagctgttgcaagctaacccgatcctcgaggcctttggaaacgccaagactgtaaaaaacgacaatagttcccgcttcggcaaatttatacgcatcaattttgatgttgccgggtatatcgtcggggcgaacatcgagacatatctcctggagaaatcacgggcaataaggcaggccaaagacgaatgttcgtttcatatcttctaccagctgctggggggcgcgggagaacaactcaaggcagatctccttctggaaccttgtagtcattaccgcttcctgaccaacggtccaagctcctcccctggccaggaaagggagctgttccaagaaacacttgagagtctgcgcgtactaggcttcagtcatgaggagatcataagtatgctccggatggtgagcgccgtgctgcagttcggtaacatcgccctgaagcgtgagcggaataccgaccaggccaccatgccagacaatacagctgcccaaaagctttgcaggctcttgggtctgggcgtgaccgattttagtagggcccttctgacccctagaatcaaggtcggacgcgactacgtgcagaaagcccaaacaaaagagcaagcagatttcgcattggaggccttggccaaggccacatacgaacgcctgtttcgttggctagtgctgaggttaaatagggcactcgatcgttctcccaggcagggtgcatctttcctgggaatcctggatatcgccggcttcgagatatttcagctgaattcatttgagcagctgtgcatcaactacactaacgagaagctacaacagcttttcaaccatactatgttcgtgctcgagcaagaggagtaccagcgcgaggggatcccttggacctttcttgatttcggattggatctccaaccgtgcatagatttaatagaaagacccgctaatccgcccgggttgctggctctactggatgaggagtgctggttccccaaggctacagacaaatcatttgttgaaaaagtggcgcaagaacagggggggcatcctaagtttcagagaccgagacatttgagagaccaagctgatttttcagtcctgcactacgccgggaaagtagactacaaggctaatgaatggttgatgaagaatatggaccccctgaatgacaacgtggctgctctactgcatcagtctacagaccgccttactgctgaaatttggaaagacgttgaaggcatcgtgggactggaacaggtgagttcactaggcgacggccctccaggggggaggccccgaaggggcatgttcagaaccgtgggccagctctacaaggagagtctctcccgtctgatggccaccctgtcaaataccaacccttcatttgtaaggtgcattgtgccaaaccacgaaaaaagagccgggaagttagagcctcggctggtccttgaccagctacgctgtaacggcgtgctggaagggatccgcatatgtagacaagggtttcccaaccgaatcctttttcaggagtttagacagagatatgagatcctgacccccaacgccatccctaagggattcatggacggaaagcaggcgtgtgagaaaatgatccaggccctggagcttgaccccaatttgtatcgggtagggcagagtaaaatctttttccgggccggcgtattggctcagttagaagaagaaagggatctgaaggtgacagatattatcgtgtcctttcaagctgcagcccggggttatcttgcccgacgcgcttttcagaagagacagcagcagcagtctgctctgagagtaatgcagaggaactgtgctgcatacctcaagttaagacattggcagtggtggcgtttgttcacgaaggtcaaacccctgctgcaagtcaccagacaggatgaggttctacaggcacgcgctcaagagctccagaaggtgcaagagctgcagcagcagagtgcccgagaggtgggcgagctccaaggccgagtggcccagcttgaagaggagcgagcgcgactggcagagcagttgcgcgcagaggccgagttatgtgccgaagctgaggaaacccgcgggcgactcgctgcgaggaagcaagaactcgagctcgtggtcagcgagctcgaggctcgggtcggcgaggaggaggagtgttcccggcaaatgcaaactgaaaagaaaagactgcagcaacacatccaggaacttgaggctcacctcgaagcggaggagggagcccggcaaaagctgcagctggaaaaggtcacgacggaagccaagatgaaaaaatttgaagaggacttgttgcttttggaagaccaaaattcgaagctctccaaggaacggaagctgctcgaagaccgcctggcagagttctccagccaggctgctgaggaggaagaaaaagtaaaaagtctcaataaactgaggcttaaatacgaggctactattgcagatatggaggaccggctgaggaaagaagagaaagggcgtcaggagctagagaaactgaaaaggcgacttgatggcgagtctagtgagctgcaggaacagatggttgagcagcagcaaagagctgaggagctgagggcccaactcggacgaaaagaggaggagctccaagcggcactagcaagggcagaggacgaagggggagctcgtgcgcaactgcttaagtctctgcgtgaagcacaagcagccctggccgaggctcaagaggacttagaatctgaacgggtagcccgcaccaaagccgagaaacagaggcgagacctgggggaggagctggaagctctacgcggggagctggaggatacactagacagtactaacgcccagcaggaactccgatcaaaaagagaacaggaggtgaccgagctgaagaagacattggaagaggaaactagaatccatgaagccgccgttcaggagctcagacagcggcacgggcaagcactcggagaactcgccgaacagctggagcaagctaggcgaggaaagggcgcatgggagaagactcggctggctctggaggcggaagttagcgagctgagggcagaactctccagtttgcagaccgcccgccaggagggcgagcagcgaaggcggagactggagttgcaattgcaggaagtccagggccgcgccggtgacggcgaacgtgcgcgcgctgaggcagctgagaaactgcagcgagcgcaggctgaattagaaaacgtgagtggagccctgaatgaagccgagagcaagacaattcgactatctaaggagctgtcatctacggaagcccaactgcatgatgcacaggagctcctgcaagaagagactcgcgctaaactcgcacttgggtcgcgggtgagagccatggaggcagaggctgcagggttgcgagagcaactcgaagaggaagcggctgccagggagagggcgggcagagagttgcaaacagcccaggctcagttatctgaatggcgacgccgacaagaagaagaagctggcgctctggaggcgggggaggaagctcgccgccgcgcagcccgagaggccgaggcgctgactcagaggttggcagaaaagacggagacagtggatcgactggaacgcggtcgccgcagacttcaacaggagctagatgacgccacaatggaccttgagcagcagcgccagttggtgagcaccctcgagaaaaagcaaaggaaattcgatcagttgctcgctgaggaaaaagcggcggtgctgagggcagtagaggagcgcgagagagctgaggcagagggaagggagcgggaagcaagggccttgagtttgacccgggctctggaggaagagcaagaggcgagggaagagctggagagacaaaatagggctttgcgggctgagctggaagcgctgttgtcctcaaaggatgatgtcgggaagagtgtccacgagctcgagcgggcttgccgcgtcgcggaacaagctgctaacgacttgcgtgcacaagttacagaactggaggacgagctgactgctgctgaggatgcgaaacttaggctagaggttaccgtccaggcactcaagacacagcatgagcgcgacttgcaaggacgggatgaagctggtgaggaaaggaggcggcagttggccaagcagctgcgagacgccgaggttgagcgagacgaggaaagaaagcagcgcaccctcgctgtggccgcccgcaaaaagctggagggggagctcgaggaactgaaggctcagatggccagtgctgggcagggcaaggaagaagcagttaagcagctccgcaagatgcaggcacagatgaaggagctatggcgtgaagtcgaagaaacaaggacttctagagaggagatcttttcgcagaacagagagagcgaaaagagactcaaggggctcgaagccgaagtgttgcgtctgcaggaagagctggcagctagtgatcgcgctagacgccaggcccagcaagatagggatgaaatggctgacgaggtggctaatggcaatttaagcaaagctgcaatcttggaggaaaagaggcaactcgaaggccggctgggccagctcgaagaagagctggaggaagagcagtccaatagtgagctgttaaacgatcgatatcggaagctgctcctacaagttgaatctctgacgaccgagttgagtgccgagcggtctttctcagccaaagccgagtccggtcgacagcagctggagcgccagatccaagaattgcgaggccgtctgggagaagaggatgccggagcccgggccagacataaaatgacgattgcagccttagaaagtaaactggctcaggctgaagagcagctggaacaggagacgcgagagcgtatcctgagtgggaagctggttcgtcgtgctgaaaaaaggcttaaagaggtggtcctccaggtggaagaggaaagacgagtggccgatcaacttagggatcagctggagaagggaaatctgcgtgtcaagcagctgaagcggcagctagaagaggccgaggaggaagcctctagagcccaggctggtcggcgccggctccaacgcgagctcgaggacgtcaccgagagcgcggagtctatgaaccgagaggtaaccacgctaaggaaccgcctaaggaggggacctctgacatttaccacaaggacagtgaggcaggtgttccgtctcgaggagggtgtggcaagtgacgaagaggcagaggaggctcaacccggcagcggcccttcaccagagcctgagggcagcccccctgcccacccccagtag

SEQ ID NO: 320044 - DNA, 6012 bp, Artificial Sequence
  derived and/or modified sequence
atggctgctgtgaccatgtctgtgcccggcaggaaggccccacccaggcctggccctgtgcctgaggccgcccagcccttcctgttcaccccccggggccccagcgctgggggcggccctggcagcggcaccagcccccaggtggagtggacagcccggcggctggtgtgggtgcccagcgagctgcacggctttgaagctgctgccctgagagatgaaggagaggaggaggccgaggtggagctggccgagagcggccgccgcctgcggctgccccgggaccagatccagaggatgaacccccccaagttcagcaaggccgaggacatggccgagctgacctgcctgaatgaggcctctgtgctgcacaacctgcgggagcgctactacagcggcctcatctacacctacagcggcctcttctgtgtggtgatcaacccctacaagcagctgcccatctacacagaggccatcgtggagatgtaccggggcaagaagagacatgaggtgccccctcatgtgtatgctgtgacagagggcgcctaccgctccatgctgcaggaccgggaggaccagagcatcctgtgcacaggagagagcggggccggcaagacagagaacaccaagaaggtgatccagtacctggcccacgtggccagcagccccaagggcaggaaggagcccggggtgcctgcctctgtgtccacagtgtcctatggagagctggagcggcagctgctgcaggccaaccccatcctggaggcctttggaaatgccaagacagtgaagaatgacaacagcagcagatttgggaagttcatccgcatcaactttgatgtggccggctacatcgtgggcgccaacatcgagacctacctgctggagaagagccgggccatccggcaggccaaggatgagtgcagcttccacatcttctaccagctgctgggcggggccggggagcagctgaaggctgacctgctgctggagccctgcagccactaccgcttcctgaccaacggccccagcagcagccctggccaggagcgggagctgttccaggagaccctggagagcctgcgggtgctgggcttcagccatgaggagatcatctccatgctgaggatggtgtctgctgtgctgcagtttggaaacatcgccctgaagcgggagaggaacacagaccaggccaccatgccagacaacacagctgcccagaagctgtgccgcctgctgggcctgggcgtgacagacttcagccgggccctgctgaccccccgcatcaaggtgggccgggactatgtgcagaaggcccagaccaaggagcaggccgactttgccctggaggccctggccaaggccacctatgaaagactcttccgctggctggtgctgcggctgaacagagccctggacaggagcccccggcagggcgccagcttcctgggcatcctggacattgctggctttgagatcttccagctgaacagctttgagcagctgtgcatcaactacaccaatgagaagctgcagcagctgttcaaccacaccatgtttgtgctggagcaggaggagtaccagcgggagggcatcccctggaccttcctggactttggcctggacctgcagccctgcatcgacctgattgaaagacctgccaaccccccaggcctgctggccctgctggatgaggagtgctggttccccaaggccacagacaagagctttgtggagaaggtggcccaggagcagggcggccaccccaagttccagaggcccaggcacctgcgggaccaggccgacttctctgtgctgcactacgccggcaaggtggactacaaggccaatgagtggctgatgaagaacatggaccccctgaatgacaacgtggccgccctgctgcaccagagcacagaccggctgacagctgagatctggaaggatgtggagggcatcgtgggcctggagcaggtgagcagcctgggagatggccccccaggcggccggccccggcggggcatgttcagaacagtgggccagctgtacaaggagagcctgagccggctgatggccaccctgagcaacaccaaccccagctttgtgcgctgcatcgtgcccaaccacgagaagagagctgggaagctggagccccggctggtgctggaccagctgcgctgcaatggagtgctggagggcatccgcatctgccggcagggcttccccaaccgcatcctcttccaggagttccggcagagatatgagatcctgaccccaaatgccatccccaagggcttcatggatggcaagcaggcctgtgagaagatgatccaggccctggagctggaccccaacctgtacagagtgggccagagcaagatcttcttccgggccggcgtgctggcccagctggaggaggagcgggacctgaaggtgacagacatcatcgtgtccttccaggccgccgcccggggctacctggcccggcgggccttccagaagaggcagcagcagcagagcgccctgcgggtgatgcagaggaactgtgccgcctacctgaagctgcggcactggcagtggtggaggctcttcaccaaggtgaagcccctgctgcaggtgacccggcaggatgaggtgctgcaggcccgggcccaggagctgcagaaggtgcaggagctgcagcagcagagcgcccgggaggtgggggagctgcagggccgggtggcccagctggaggaggagcgggcccggctggccgagcagctgcgggcagaggccgagctgtgtgccgaggccgaggagacccggggccgcctggccgccaggaagcaggagctggagctggtggtgtctgagctggaggcccgggtgggggaggaggaggagtgcagccggcagatgcagacagagaagaagaggctgcagcagcacatccaggagctggaggcccacctggaggccgaggagggcgcccggcagaagctgcagctggagaaggtgaccacagaggccaagatgaagaagtttgaggaggacctgctgctgctggaggaccagaacagcaagctgagcaaggagaggaagctgctggaggaccggctggccgagttcagcagccaggccgctgaggaggaggagaaggtgaagagcctgaacaagctgcggctgaagtatgaggccaccatcgctgacatggaggaccggctgaggaaggaggagaagggccggcaggagctggagaagctgaagaggcggctggatggagagagcagcgagctgcaggagcagatggtggagcagcagcagagagctgaggagctgcgggcccagctgggcaggaaggaggaggagctgcaggccgccctggcccgggcagaagatgagggcggggcccgggcccagctgctgaagagcctgcgggaggcccaggccgccctggccgaggcccaggaggacctggagagcgagcgggtggcccggaccaaggccgagaagcagaggcgggacctgggggaggagctggaggccctgcggggggagctggaggacaccctggacagcaccaatgcccagcaggagctgcggagcaagcgggagcaggaggtgacagagctgaagaagaccctggaggaggagacccgcatccatgaagctgctgtgcaggagctgcggcagagacatggccaggccctgggggagctggccgagcagctggagcaggcccggcggggcaagggggcctgggagaagacccggctggccctggaggccgaggtgtctgagctgcgggcagagctgagcagcctgcagacagcccggcaggagggggagcagaggagaagaaggctggagctgcagctgcaggaggtgcagggccgggctggagatggagagcgggcccgggcagaggccgctgagaagctgcagagggcccaggccgagctggagaatgtgtctggggccctgaatgaggccgagagcaagaccatccggctgagcaaggagctgagcagcacagaggcccagctgcatgatgcccaggagctgctgcaggaggagacccgggccaagctggccctgggcagccgggtgcgggccatggaggccgaggccgccggcctgcgggagcagctggaggaggaggccgccgcccgggagagagctggccgggagctgcagacagcccaggcccagctgtctgagtggaggcggcggcaggaggaggaggccggggccctggaggccggggaggaggcccggcggcgggccgcccgggaggccgaggccctgacccagaggctggccgagaagacagaaacagtggaccggctggagcggggcagaagaaggctgcagcaggagctggatgatgccaccatggacctggagcagcagaggcagctggtgtccaccctggagaagaagcagaggaagtttgaccagctgctggccgaggagaaggctgctgtgctgcgggctgtggaggagcgggagagagctgaggccgagggccgggagcgggaggcccgggccctgagcctgacccgggccctggaggaggagcaggaggcccgggaggagctggagcggcagaacagagccctgcgggcagagctggaggccctgctgagcagcaaggatgatgtgggcaagtctgtgcatgagctggagcgggcctgccgggtggccgagcaggccgccaatgacctgcgggcccaggtgacagagctggaggatgagctgacagctgctgaagatgccaagctgcggctggaggtgacagtgcaggccctgaagacccagcacgagcgggacctgcagggcagagatgaagctggggaggagcggcggcggcagctggccaagcagctgagagatgctgaggtggagagagatgaggagaggaagcagaggaccctggccgtggccgccaggaagaagctggagggggagctggaggagctgaaggcccagatggccagcgctggccagggcaaggaggaggccgtgaagcagctgaggaagatgcaggcccagatgaaggagctgtggagggaggtggaggagaccaggaccagccgggaggagatcttcagccagaaccgggagagcgagaagaggctgaagggcctggaggccgaggtgctgcggctgcaggaggagctggccgccagtgaccgggcccggcggcaggcccagcaggacagagatgagatggctgatgaggtggccaacggcaacctgagcaaggccgccatcctggaggagaagaggcagctggagggccgcctgggccagctggaggaggagctggaggaggagcagagcaacagcgagctgctgaatgaccgctacaggaagctgctgctgcaggtggagagcctgaccacagagctgtctgctgagaggagcttcagcgccaaggccgagagcggccggcagcagctggagcggcagatccaggagctgcggggccgcctgggggaggaggatgctggggcccgggcccggcacaagatgaccatcgccgccctggagagcaagctggcccaggccgaggagcagctggagcaggagacccgggagcgcatcctgagcggcaagctggtgcggcgggcagagaagaggctgaaggaggtggtgctgcaggtggaggaggagaggagagtggccgaccagctgcgggaccagctggagaagggcaacctgcgggtgaagcagctgaagaggcagctggaggaggccgaggaggaggccagccgggcccaggccggcagaagaaggctgcagcgggagctggaggatgtgacagagagcgctgagagcatgaaccgggaggtgaccaccctgaggaaccggctgcggcggggccccctgaccttcaccaccaggacagtgcggcaggtgttccggctggaggagggcgtggccagtgatgaggaggccgaggaggcccagcccggcagcggccccagccctgagcctgagggcagccccccagcccacccccagtag

SEQ ID NO: 320045 - DNA, 6012 bp, Artificial Sequence
  derived and/or modified sequence
atggccgccgtgaccatgagcgtgcccggccggaaggcccccccccggccaggccctgtccccgaagctgctcagccttttctgtttacgccccgcggaccttccgctgggggtggccctggttccggcacaagtcctcaggtggaatggactgcccgccgattggtctgggtgccctccgagctgcacgggtttgaggccgcggcactcagggatgagggcgaagaagaagccgaagtcgagctggcggaaagcggacgaagattgagattacccagggatcagatccagcggatgaatccgcccaaattttcaaaggccgaagacatggccgaactaacctgcttaaatgaagccagtgtgctacacaacctgcgtgaaagatattactcaggtctgatatatacttactccggtctgttctgcgtcgtgataaacccatataagcaactgcctatttataccgaggctattgtcgagatgtacaggggtaaaaaacgacatgaggtcccccctcatgtctacgcagtgactgagggtgcataccgcagtatgctccaggacagggaagaccaaagcatcctgtgcaccggtgagtccggcgcaggcaagactgagaacaccaaaaaggtgatccagtatctcgcccatgttgcatcctctccaaaggggaggaaggagccgggcgtgccagcttccgtctccaccgtttcttacggtgaacttgaacgtcagctgttgcaggctaaccctatactcgaggcgttcgggaatgcaaagacagtcaaaaacgacaattctagtcggttcggtaagtttattaggatcaacttcgatgtcgcggggtacatcgtcggggccaatatagaaacttacctgttagaaaagtctcgggcaatcaggcaggcaaaagacgaatgcagttttcacattttctaccagttgctgggtggggcaggagagcaactcaaagcagatctgctcttagaaccatgttctcactacaggtttctgactaacggcccaagcagtagccccggacaggagcgggaactctttcaggaaactctagagtcgcttagggtcctcgggttttcgcatgaggaaatcatctccatgttgcggatggttagtgccgtgctacaatttggcaatattgcccttaaaagagagcgaaacactgaccaggccaccatgcctgacaatacagccgctcagaagttgtgccgattacttggtttgggcgtgactgatttctctcgagcacttctgacccctcggataaaggtgggcagggactacgtgcagaaagcgcaaaccaaggaacaagcagactttgccctcgaggccttagcaaaggctacatatgaacggctttttcgctggttggtactgagactgaatagggctctggacaggtctcctcgccagggggccagtttcctggggattctggacattgcaggttttgagatcttccagcttaactccttcgagcagctgtgcattaactatacaaacgaaaagctccagcaactttttaaccatacaatgtttgttcttgaacaagaggaatatcagagagaaggcatcccttggactttcctcgacttcgggctggatctgcagccctgcattgatttgatagaacgtcctgcaaatcctcctggcctgttagcattgttagatgaagagtgctggttcccgaaagcaacagacaagtcttttgtcgaaaaggttgctcaggaacagggcggccaccccaaattccagagaccccgccacctgagggaccaggccgacttttctgtgcttcactacgctggtaaggttgactacaaagccaacgagtggctaatgaagaatatggatccactgaatgataatgtggccgccttgcttcatcagtcaaccgatcggcttaccgcggaaatttggaaggacgtggagggaattgttgggctggagcaggtctcaagcttgggcgacggaccgcccggtggcaggcccagaaggggaatgttcagaacggtggggcagctctataaggagtccctgtcaaggctgatggcaacactgtcaaataccaacccatcgtttgtccggtgcattgttcccaaccacgagaagagagctggcaaactggaacctcgcttagtgctggaccagcttcgctgtaacggtgtgcttgaaggcatacgcatttgccggcagggcttccctaatcggatcctgtttcaggagttcagacagaggtacgagatcctaaccccgaacgctataccaaagggctttatggatggcaagcaggcctgcgaaaaaatgattcaggcattggagctggacccaaacctgtaccgtgtggggcagagtaaaatattcttccgggccggggtcctagctcagttagaagaagaaagggatctgaaagtaactgacatcatcgtcagtttccaggccgccgctagaggttatcttgctcgaagggccttccagaaacgccagcagcagcagagtgccctgcgagtgatgcagcgcaactgtgccgcctacctcaaactgcgccactggcagtggtggcgtctgttcaccaaagtgaagcctctgttacaggtgacacgtcaggacgaagtgctccaggctagggcacaggagcttcaaaaagttcaagaactgcaacagcagtccgcaagagaggtaggtgagctgcaaggacgggtggctcagctggaggaagagcgggcacgactggcggaacagctgcgggccgaagccgaattgtgtgccgaggccgaagaaacacgtggacggctcgcagcgcggaagcaggaacttgaactggtggtgtccgagttggaagcgcgcgtgggcgaagaagaggaatgcagtcgacagatgcagactgagaagaaacgcctccaacagcatattcaggaactcgaggcccacctggaggcagaagaaggagctaggcagaagctgcagctcgagaaagtgactaccgaagcaaaaatgaagaagtttgaggaggatctgcttttgcttgaagatcagaactcgaagctttctaaagagcgcaagctcttagaggacaggttggccgaattctcaagccaagcagccgaggaagaggagaaggtcaagtcccttaacaaactgcgcctcaaatacgaggctactattgctgacatggaggaccgcctaagaaaagaagagaaaggcaggcaggagcttgagaaactgaagaggagattggacggcgagtcaagcgaactgcaagaacaaatggtagagcagcagcagagggccgaagaactgcgggcgcagttaggacgcaaagaggaagaactccaggctgcgcttgcccgggcagaggatgagggcggcgcccgggctcagttgctaaagagtctgcgcgaggcgcaggccgcccttgccgaggctcaagaagacttggaatcagaacgtgtcgcccgaactaaagcggaaaaacagaggagggatctgggcgaggagctggaagcactccgtggagagctggaagatacccttgactccactaatgcacagcaagagctgcgcagcaagcgagagcaggaagtgaccgagctgaaaaagaccctggaagaagaaactcggatccacgaagccgcagtgcaggagttgaggcagcgacatgggcaggcccttggcgagctggcagagcagctagagcaggctcgcaggggcaagggcgcctgggaaaagacccgattggccctggaagccgaggtgagcgaattgcgcgccgaactgtcttcacttcaaaccgcgcggcaggagggagaacagcgacgccgacgcctggaactgcagttgcaagaagtccaaggcagggcaggagatggcgagcgagcgcgagcggaagccgctgaaaagctgcagagagctcaggccgagctggagaacgtgtcaggcgcactcaatgaagctgagagtaagacaattagactttctaaggagctgtcaagtactgaggctcagttgcacgatgcccaggagcttctgcaggaagaaaccagggcaaaactcgctcttggttcccgcgtcagggcaatggaggcggaagccgctggattgcgcgagcagttggaagaagaagcagccgcccgagagcgagccggacgggagctccagacagcccaagcacagctaagcgaatggcgccgccggcaagaggaggaggccggtgctcttgaagcaggcgaggaagctagacggcgagccgcccgagaagccgaggcattaacccagcggttagccgagaagaccgagaccgtggatcgactcgagagagggcggcgccgcctgcagcaagaactggacgacgcgaccatggatttggagcagcaaagacagttggtcagtacccttgagaaaaagcagagaaagtttgaccagctgcttgcagaggaaaaggctgctgtcctgagagccgtggaggagcgtgagcgggcggaggcagaaggtcgggaaagggaagcgagggcgctgtcgcttactcgtgcccttgaggaagaacaggaggcccgtgaggaactggaaaggcagaaccgggctctgcgtgcagaactggaggcccttctttctagtaaagatgatgtgggcaaatccgtgcatgagcttgagagggcctgcagagtggccgagcaggctgccaatgacctgcgagcccaagtgaccgaactcgaggacgaattaacagctgccgaggatgccaaactgcgactggaggtcaccgtgcaggccttaaaaacacagcatgagagagacctgcagggtagagatgaagccggcgaagagaggcgacgacagctggccaagcagctgagggatgcagaggtggagcgagatgaggagcgcaagcagcgcactctcgccgtggcagctcggaagaagcttgagggcgaactggaggagctaaaagcgcaaatggcctcagccggccagggaaaagaagaggcagtgaaacagctgagaaaaatgcaagcgcagatgaaggagttgtggagagaagtggaagagactaggacatcgagagaggagattttcagtcagaatagagaatcagaaaagagattgaaaggtcttgaggcagaagtgctgcggctgcaggaagagctagctgcaagcgaccgggcccgcagacaggcacagcaggatcgggacgaaatggctgatgaagtggcgaacggcaatctgagcaaggctgccattttagaggaaaagcggcagctggagggcaggctcggccagctagaggaagagctggaagaggagcagagcaattccgagcttctcaatgacagataccggaagcttcttttacaggtggaatcactgaccaccgagctttcagccgaaaggagtttctctgctaaggctgaatctgggcgccagcagctggagaggcagattcaagagctgcgcggacgactcggcgaggaggacgccggggctcgagccaggcataagatgacaatagcggctctcgagagtaaattagctcaagcagaagagcagctggaacaagagacgcgtgaacggatcctttcagggaagctcgtgaggcgggcagaaaagcggctgaaggaggtggtcctgcaggttgaagaagaaagacgggtcgccgaccagcttagagaccagctggagaaaggcaacctgagggtgaagcagttaaaacgccaactcgaggaagccgaggaggaagcctctcgcgcacaggccgggcgccgacgactgcagcgagagttggaagatgtgaccgagtcagccgagagcatgaatcgcgaagttaccactcttcggaatagacttcgccggggtcccttgacttttaccacaaggactgtccgacaggttttccgcctggaggaaggagtggcaagcgatgaggaggccgaggaggcgcagcccggctcaggaccatcacctgagccggagggcagcccgcccgcccaccctcaatag

SEQ ID NO: 320046 - DNA, 6011 bp, Artificial Sequence
  derived and/or modified sequence
atggccgcagtgactatgtccgtccccggaagaaaagccccaccgaggccaggtccggttcctgaggccgctcagccctttctttttactccacggggacccagcgcaggaggcggacccggatctggtacttcacctcaggtagagtggaccgctcgacgcctggtctgggtgccaagtgaactgcatgggttcgaggcggcagcgttgcgcgatgagggtgaggaagaggccgaggtggaactcgccgagtcaggacgtaggctgcggctccctagggaccagatccaacgcatgaatcctcccaagttctcgaaggccgaggacatggccgaattaacctgtctgaacgaggcctcagtgctccacaacttaagagaacgctactactcagggctgatttacacttacagcggcttattctgcgtcgtgatcaacccatacaagcagcttccaatatacaccgaggcaatcgtggaaatgtatagagggaagaagcgccacgaagtccctcctcacgtgtacgccgtaacagagggagcctacaggagcatgcttcaggacagagaggaccaatcgatcctgtgtactggagagtccggcgctgggaaaactgagaacactaagaaagtgatccagtatcttgctcacgtggcaagttctccaaaggggagaaaagaaccgggtgtccccgcttccgtgtcaacagtgtcctatggtgaactcgagaggcaactgctccaggccaatccaattctggaggcctttgggaacgctaagaccgtgaagaatgataatagcagccggttcggaaagttcataaggatcaactttgacgtggccggttacattgttggggctaacattgaaacatacctcttggagaagagcagggcaataaggcaagccaaagatgaatgttcgtttcatatcttctatcagctactcgggggagccggtgagcaactgaaggcagatctcctccttgaaccttgctctcactataggttcctaacaaacggccctagctcatccccagggcaggaacgggagctgtttcaggaaaccctcgagtccctccgtgttcttggtttctcacacgaggagattatctctatgctccggatggtttcagctgtccttcagttcggtaacattgccctgaaacgagagcggaatactgaccaggccaccatgccagataatacagcagctcagaagctgtgcaggctgctagggctgggcgtcaccgacttctctagagcccttctgaccccaaggatcaaggtaggcagagattatgtgcagaaggcccagacaaaggagcaggcggattttgctcttgaggcactggccaaagctacatatgaacggttgttccgttggctcgtactgcggctgaaccgcgctctggaccgcagccctagacaaggagcttcattcctggggatcctcgacattgctggcttcgagatcttccagctcaattcattcgagcagctctgcattaactacaccaatgaaaaactgcaacagttatttaatcatacaatgttcgtgcttgagcaggaggagtaccagagggagggtattccttggacttttttggatttcggcctcgacctccagccatgcatcgaccttatcgagcgtcccgctaaccccccaggactcctggctctgcttgacgaagaatgctggtttccaaaggctaccgacaaatcttttgttgagaaagtggcccaagaacaaggaggccaccccaagttccaaaggccccgtcaccttcgggaccaagccgatttctccgtgcttcattacgccggaaaagttgactacaaagcaaatgaatggctaatgaagaacatggaccctttgaatgataacgtggctgccctactgcaccagtctaccgacagactgactgcggagatctggaaggatgtggaagggatcgtggggttagagcaggttagctccttaggagacgggcctcctggaggaagaccacgccgtgggatgttcagaaccgtcggccaattgtacaaagagtctttatcccgcctgatggccaccttatcgaacactaacccatcttttgtgcggtgcattgtgcctaaccacgaaaaacgcgctggaaaattggagcccaggttggttctggaccagctgagatgtaacggcgtgctggaggggatcaggatttgtcggcagggattccccaacaggattctgtttcaagagttccgccagaggtacgagatcctaactcctaatgcgattccaaaggggtttatggacggaaagcaggcctgtgaaaaaatgattcaggctctagaattagacccgaacctgtatcgagtaggccaatctaaaatcttttttagggcgggtgtcctggcccagcttgaggaggaacgggatctgaaggttactgacatcatcgtcagcttccaggcagctgcacgagggtatcttgctcggcgagcctttcagaagcgccaacagcagcagtcggcactgagagttatgcagcggaattgcgctgcctatcttaaactgcgacattggcaatggtggcgactgtttaccaaggtaaagccactgctccaagtgacaaggcaagatgaggtgctgcaggcgagagctcaggaactgcaaaaagtgcaagaactgcagcagcagtctgcacgtgaagtgggggaactgcagggacgggtggcacagctcgaggaagagagggctaggctggccgaacagctgcgggctgaagccgagctgtgtgccgaggcagaagagaccagaggaagactagctgctaggaaacaggagctggagctagtagtgtcagaactagaggcaagggttggtgaagaggaggagtgttccagacagatgcagaccgagaagaaacggctgcaacagcatatccaggaactggaagcccacttggaagctgaggagggtgctcgtcagaaacttcaacttgaaaaagtgacaacagaggcaaagatgaaaaagttcgaagaggatctgctgctgctcgaagaccagaactcaaaactgagcaaagagcgtaaactattggaggatcgtctggctgagttttcttcccaggcagccgaagaggaagagaaggttaaatctcttaataagctcaggcttaagtatgaggccaccattgccgatatggaggataggttgagaaaggaggagaaggggaggcaagaattggaaaagttgaagagaagactcgacggggagagttctgagctgcaagagcagatggtggaacagcagcagagggcggaagaactgcgcgcacaactggggaggaaggaggaggaactacaggccgcacttgctagggctgaagatgaaggcggtgccagggcacagctgctcaaaagcctgcgggaggcccaagctgcactggccgaggcccaggaagatctggaaagtgaacgcgtagctcgcactaaggccgagaagcagcgtcgggacttaggagaagagctcgaagcattgcggggagaactcgaggatactcttgattctacaaatgcccagcaggagctccgatctaaaagggagcaggaggtgaccgagctcaagaaaactttagaggaggagaccaggatacacgaggcagcggttcaggaattaagacaaaggcacggacaggctctaggggaactcgctgaacagctggagcaggccagacgcggaaagggcgcatgggagaagacccggctggcccttgaggccgaggtgagtgagctgcgcgctgaactttcaagcttacagaccgcccgacaagagggggaacaaaggcgcagacgactggagctccaacttcaggaagtgcagggtcgggctggagacggggagagggcacgggctgaggcagccgagaaactgcaaagggcccaagccgagttagagaacgtcagtggggctttgaacgaggccgagtcaaaaacaattcgactgagcaaggagctctcgtccacggaggctcagctccatgacgcccaggagttgctccaagaggagacgcgcgctaaactggcgctaggctccagggtcagagccatggaagctgaggccgcaggcttacgggaacagctcgaggaggaagcagccgctcgcgaaagagccggacgtgaactccagacggcacaggcccaacttagcgagtggcggaggcgacaggaagaggaagccggtgcccttgaggctggagaggaagctagacgtcgagccgcaagggaagctgaggcccttactcagaggctagcagagaagacggagactgtggaccggctcgaaaggggcagaaggagactgcagcaagaattagatgacgctactatggatctagagcagcagagacagctggtgtcaacacttgaaaagaagcagagaaagtttgatcagcttctggcagaggagaaggcagccgtgctcagagccgtggaggagcgcgaacgagccgaggcagaaggaagagagagggaagcacgcgcactatccctaacccgtgctctggaggaggaacaggaggcccgtgaggagttagagagacagaatagagctctgagagcggagctggaagccctcctctcaagcaaggacgacgtcggtaaaagcgttcatgaattagagcgcgcatgccgggtggcagaacaggctgccaacgacttacgcgcacaggtaactgaattggaggacgagcttacagccgctgaagacgccaagttgaggttggaggtaacagtgcaggcactgaagacacagcacgaacgagaccttcagggcagagacgaggccggagaagagcggcgtagacagctggctaagcaactgagagacgctgaagtggaacgagacgaagaacgcaagcaaagaacactcgccgtagcagcacgcaaaaagttagaaggcgaactggaggagctcaaggcccagatggcctctgcaggccaaggaaaggaagaagctgtcaagcagctgcggaagatgcaggcccaaatgaaggaactctggcgagaagtggaagagacgaggaccagccgtgaagagatcttctcacagaatagagagtccgaaaagcgactgaagggtttggaggcagaggtgctgcggcttcaagaagagttggccgctagcgatcgagccaggagacaggctcagcaagacagggatgaaatggcagatgaggtggccaatggaaacttgagcaaagccgcaatcttggaagaaaagcgtcaactcgagggcagattggggcagctggaggaggagcttgaagaggagcaatccaattcagaactactcaacgaccggtatcggaaacttctcttgcaggtcgagagtctcaccaccgaactaagtgcagagcgctcttttagcgccaaagcagagtctgggaggcagcaactggaacgccagattcaggaactgcggggaagattgggggaagaagatgctggcgctcgtgccagacataagatgactatcgccgctctggagagcaagctggcccaggctgaagaacagttagagcaggagaccagggaaaggattctgagtggtaagctcgttagacgagcagaaaagaggcttaaggaagtcgtgctgcaggtggaggaagaacgcagagtggctgatcagctcagagatcagttggaaaagggaaatctcagagttaagcagctcaagcgccagcttgaggaagcggaggaggaggcttcgcgagcccaggcaggcaggcggcgtctacaaagagaactggaggacgtgacagagagcgccgagagcatgaatcgcgaggtgacaacgctcagaaatcggcttcgcagaggaccattaaccttcactactcggactgttcggcaggtgttcaggctggaagaaggtgttgcttccgatgaggaagctgaggaggcccagcctggctcggggccatccccggagcctgaggggagcccgcctgctcatccacaata

SEQ ID NO: 320047 - DNA, 6012 bp, Artificial Sequence
  derived and/or modified sequence
atggccgccgtgaccatgagcgtgcccggcagaaaggccccccccagacccggccccgtgcccgaggccgcccagcccttcctgttcacccccagaggccccagcgccggcggcggccccggcagcggcaccagcccccaggtggagtggaccgccagaagactggtgtgggtgcccagcgagctgcacggcttcgaggccgccgccctgagagacgagggcgaggaggaggccgaggtggagctggccgagagcggcagaagactgagactgcccagagaccagatccagagaatgaacccccccaagttcagcaaggccgaggacatggccgagctgacctgcctgaacgaggccagcgtgctgcacaacctgagagagagatactacagcggcctgatctacacctacagcggcctgttctgcgtggtgatcaacccctacaagcagctgcccatctacaccgaggccatcgtggagatgtacagaggcaagaagagacacgaggtgcccccccacgtgtacgccgtgaccgagggcgcctacagaagcatgctgcaggacagagaggaccagagcatcctgtgcaccggcgagagcggcgccggcaagaccgagaacaccaagaaggtgatccagtacctggcccacgtggccagcagccccaagggcagaaaggagcccggcgtgcccgccagcgtgagcaccgtgagctacggcgagctggagagacagctgctgcaggccaaccccatcctggaggccttcggcaacgccaagaccgtgaagaacgacaacagcagcagattcggcaagttcatcagaatcaacttcgacgtggccggctacatcgtgggcgccaacatcgagacctacctgctggagaagagcagagccatcagacaggccaaggacgagtgcagcttccacatcttctaccagctgctgggcggcgccggcgagcagctgaaggccgacctgctgctggagccctgcagccactacagattcctgaccaacggccccagcagcagccccggccaggagagagagctgttccaggagaccctggagagcctgagagtgctgggcttcagccacgaggagatcatcagcatgctgagaatggtgagcgccgtgctgcagttcggcaacatcgccctgaagagagagagaaacaccgaccaggccaccatgcccgacaacaccgccgcccagaagctgtgcagactgctgggcctgggcgtgaccgacttcagcagagccctgctgacccccagaatcaaggtgggcagagactacgtgcagaaggcccagaccaaggagcaggccgacttcgccctggaggccctggccaaggccacctacgagagactgttcagatggctggtgctgagactgaacagagccctggacagaagccccagacagggcgccagcttcctgggcatcctggacatcgccggcttcgagatcttccagctgaacagcttcgagcagctgtgcatcaactacaccaacgagaagctgcagcagctgttcaaccacaccatgttcgtgctggagcaggaggagtaccagagagagggcatcccctggaccttcctggacttcggcctggacctgcagccctgcatcgacctgatcgagagacccgccaacccccccggcctgctggccctgctggacgaggagtgctggttccccaaggccaccgacaagagcttcgtggagaaggtggcccaggagcagggcggccaccccaagttccagagacccagacacctgagagaccaggccgacttcagcgtgctgcactacgccggcaaggtggactacaaggccaacgagtggctgatgaagaacatggaccccctgaacgacaacgtggccgccctgctgcaccagagcaccgacagactgaccgccgagatctggaaggacgtggagggcatcgtgggcctggagcaggtgagcagcctgggcgacggcccccccggcggcagacccagaagaggcatgttcagaaccgtgggccagctgtacaaggagagcctgagcagactgatggccaccctgagcaacaccaaccccagcttcgtgagatgcatcgtgcccaaccacgagaagagagccggcaagctggagcccagactggtgctggaccagctgagatgcaacggcgtgctggagggcatcagaatctgcagacagggcttccccaacagaatcctgttccaggagttcagacagagatacgagatcctgacccccaacgccatccccaagggcttcatggacggcaagcaggcctgcgagaagatgatccaggccctggagctggaccccaacctgtacagagtgggccagagcaagatcttcttcagagccggcgtgctggcccagctggaggaggagagagacctgaaggtgaccgacatcatcgtgagcttccaggccgccgccagaggctacctggccagaagagccttccagaagagacagcagcagcagagcgccctgagagtgatgcagagaaactgcgccgcctacctgaagctgagacactggcagtggtggagactgttcaccaaggtgaagcccctgctgcaggtgaccagacaggacgaggtgctgcaggccagagcccaggagctgcagaaggtgcaggagctgcagcagcagagcgccagagaggtgggcgagctgcagggcagagtggcccagctggaggaggagagagccagactggccgagcagctgagagccgaggccgagctgtgcgccgaggccgaggagaccagaggcagactggccgccagaaagcaggagctggagctggtggtgagcgagctggaggccagagtgggcgaggaggaggagtgcagcagacagatgcagaccgagaagaagagactgcagcagcacatccaggagctggaggcccacctggaggccgaggagggcgccagacagaagctgcagctggagaaggtgaccaccgaggccaagatgaagaagttcgaggaggacctgctgctgctggaggaccagaacagcaagctgagcaaggagagaaagctgctggaggacagactggccgagttcagcagccaggccgccgaggaggaggagaaggtgaagagcctgaacaagctgagactgaagtacgaggccaccatcgccgacatggaggacagactgagaaaggaggagaagggcagacaggagctggagaagctgaagagaagactggacggcgagagcagcgagctgcaggagcagatggtggagcagcagcagagagccgaggagctgagagcccagctgggcagaaaggaggaggagctgcaggccgccctggccagagccgaggacgagggcggcgccagagcccagctgctgaagagcctgagagaggcccaggccgccctggccgaggcccaggaggacctggagagcgagagagtggccagaaccaaggccgagaagcagagaagagacctgggcgaggagctggaggccctgagaggcgagctggaggacaccctggacagcaccaacgcccagcaggagctgagaagcaagagagagcaggaggtgaccgagctgaagaagaccctggaggaggagaccagaatccacgaggccgccgtgcaggagctgagacagagacacggccaggccctgggcgagctggccgagcagctggagcaggccagaagaggcaagggcgcctgggagaagaccagactggccctggaggccgaggtgagcgagctgagagccgagctgagcagcctgcagaccgccagacaggagggcgagcagagaagaagaagactggagctgcagctgcaggaggtgcagggcagagccggcgacggcgagagagccagagccgaggccgccgagaagctgcagagagcccaggccgagctggagaacgtgagcggcgccctgaacgaggccgagagcaagaccatcagactgagcaaggagctgagcagcaccgaggcccagctgcacgacgcccaggagctgctgcaggaggagaccagagccaagctggccctgggcagcagagtgagagccatggaggccgaggccgccggcctgagagagcagctggaggaggaggccgccgccagagagagagccggcagagagctgcagaccgcccaggcccagctgagcgagtggagaagaagacaggaggaggaggccggcgccctggaggccggcgaggaggccagaagaagagccgccagagaggccgaggccctgacccagagactggccgagaagaccgagaccgtggacagactggagagaggcagaagaagactgcagcaggagctggacgacgccaccatggacctggagcagcagagacagctggtgagcaccctggagaagaagcagagaaagttcgaccagctgctggccgaggagaaggccgccgtgctgagagccgtggaggagagagagagagccgaggccgagggcagagagagagaggccagagccctgagcctgaccagagccctggaggaggagcaggaggccagagaggagctggagagacagaacagagccctgagagccgagctggaggccctgctgagcagcaaggacgacgtgggcaagagcgtgcacgagctggagagagcctgcagagtggccgagcaggccgccaacgacctgagagcccaggtgaccgagctggaggacgagctgaccgccgccgaggacgccaagctgagactggaggtgaccgtgcaggccctgaagacccagcacgagagagacctgcagggcagagacgaggccggcgaggagagaagaagacagctggccaagcagctgagagacgccgaggtggagagagacgaggagagaaagcagagaaccctggccgtggccgccagaaagaagctggagggcgagctggaggagctgaaggcccagatggccagcgccggccagggcaaggaggaggccgtgaagcagctgagaaagatgcaggcccagatgaaggagctgtggagagaggtggaggagaccagaaccagcagagaggagatcttcagccagaacagagagagcgagaagagactgaagggcctggaggccgaggtgctgagactgcaggaggagctggccgccagcgacagagccagaagacaggcccagcaggacagagacgagatggccgacgaggtggccaacggcaacctgagcaaggccgccatcctggaggagaagagacagctggagggcagactgggccagctggaggaggagctggaggaggagcagagcaacagcgagctgctgaacgacagatacagaaagctgctgctgcaggtggagagcctgaccaccgagctgagcgccgagagaagcttcagcgccaaggccgagagcggcagacagcagctggagagacagatccaggagctgagaggcagactgggcgaggaggacgccggcgccagagccagacacaagatgaccatcgccgccctggagagcaagctggcccaggccgaggagcagctggagcaggagaccagagagagaatcctgagcggcaagctggtgagaagagccgagaagagactgaaggaggtggtgctgcaggtggaggaggagagaagagtggccgaccagctgagagaccagctggagaagggcaacctgagagtgaagcagctgaagagacagctggaggaggccgaggaggaggccagcagagcccaggccggcagaagaagactgcagagagagctggaggacgtgaccgagagcgccgagagcatgaacagagaggtgaccaccctgagaaacagactgagaagaggccccctgaccttcaccaccagaaccgtgagacaggtgttcagactggaggagggcgtggccagcgacgaggaggccgaggaggcccagcccggcagcggccccagccccgagcccgagggcagcccccccgcccacccccagtag

SEQ ID NO: 320048 - protein, 236 aa, Artificial Sequence
  derived and/or modified sequence
MGEEGTGGTVHLLCLAASSGVPLFCRSSRGGAPARQQLPFSVIGSLNGVHMFGQNLEVQLSSARTENTTVVWKSFHDSITLIVLSSEVGISELRLERLLQMVFGAMVLLVGLEELTNIRNVERLKKDLRASYCLIDSFLGDSELIGDLTQCVDCVIPPEGSLLQVLGMLWKLLHLFCWPWLSPHPLSSGPLSQPPPILSASSPIPTWSQKNLFSFFFSFLSLSFLFSFLSLFLFET

SEQ ID NO: 320049 - DNA, 1021 bp, Artificial Sequence
  derived and/or modified sequence
atgggtttgggggaggtgcctgaatagggtttgagggtctgtttgagttgggtgaagaaggcgggaagttaatcctcttccaatcagctccccatctcgccctctggcggctccggaccacaggccgagttactctgattaccgccatgctccaagacccgcactgacagtccccacgtgagggaccgcggtgggagtcctaaatgggggaggaggggacgggcggcactgtgcatctgctgtgcctcgcggcctccagcggggtccccctattctgcaggagcagtcgcggcggcgcccccgcccgtcagcagctcccgttctctgtcatcggttccctcaatggagtccacatgtttgggcagaatctggaggtgcagctgagctctgcgaggaccgagaacacgactgtggtgtggaaaagcttccatgacagcatcaccctcattgttctgtcatctgaggtgggcatctctgagctgaggctggagagactactccaaatggtgtttggagccatggtccttcttgtgggacttgaagaactgaccaatatccgcaacgtggagagactgaagaaggacttgagggccagttattgcctcatcgacagcttcctgggggactcggagctcatcggggacctgacccagtgtgtggactgcgtgattcctccagaggggtccctcttgcaggtactggggatgctatggaaactcttacacctgttctgctggccctggctcagtcctcatcctctttcttctggaccattgtcccaacctcctcctatcctctcagcttccagtcctatccccacctggtcccagaagaatcttttttctttttttttttcttttctttctctttcttttcttttttcttttctttctctctttttatttgagacgtagtttcactcttgttgcccaggctggagtacaatggcaccatctcggctcactgcagcctgcgcctcccgggttcaagtaattctcctgcctcagcttcccgagcagct

SEQ ID NO: 320050 - DNA, 711 bp, Artificial Sequence
  derived and/or modified sequence
atgggggaggagggcactggtggtacagttcacctgctctgtctggcggcttcatccggggtgccgctgttctgtaggagttcccggggcggcgcccccgcccgacagcagctgcccttttctgtgatcggctccctgaatggcgtgcatatgtttggccaaaacctcgaggtgcagctgagctctgcgagaactgaaaacacaaccgtggtgtggaaaagctttcacgattctattactttgattgtactgtcaagtgaagtcggaataagcgaactgcgcctggaacgcctcctacaaatggttttcggggccatggtgctcttggtcggtctcgaggagctgaccaatatccggaacgtagaacggctgaaaaaggacctgcgagccagctattgtctcatcgactcctttctgggtgacagtgagttgattggcgacttgactcaatgcgtggactgtgttattccaccagaaggttccctgttacaggtcctcgggatgctctggaagcttctccacctgttttgctggccctggctaagccctcacccactgtccagcgggccactcagccaacctccgccaattttgtctgcatcctcacccattccaacgtggtcccagaaaaatttgttctccttttttttttccttcctctccctgtctttcctctttagtttcctgtccctcttcctctttgaaacatag

SEQ ID NO: 320051 - DNA, 711 bp, Artificial Sequence
  derived and/or modified sequence
atgggagaggagggcaccggcggcaccgtgcacctgctgtgcctggccgccagcagtggagtgcccctcttctgccgcagcagccggggcggggccccagcccggcagcagctgcccttctctgtgattggcagcctgaatggagtgcacatgtttggccagaacctggaggtgcagctgagcagcgccaggacagagaacaccaccgtggtgtggaagagcttccatgacagcatcaccctcatcgtgctgagcagcgaggtgggcatcagcgagctgcggctggagcggctgctgcagatggtgtttggagccatggtgctgctggtgggcctggaggagctgaccaacatcagaaatgtggagcggctgaagaaggacctgcgggccagctactgcctgattgacagcttcctgggggacagcgagctgattggagacctgacccagtgtgtggactgtgtgattcctcctgagggcagcctgctgcaggtgctgggcatgctgtggaagctgctgcacctgttctgctggccctggctgagcccccaccccctgagcagcggccccctgagccagcccccacccatcctgagcgccagcagccccatccccacctggagccagaagaacctcttctccttcttcttctccttcctgagcctgtccttcctgttctccttcctgagcctcttcctgtttgagacctag

SEQ ID NO: 320052 - DNA, 711 bp, Artificial Sequence
  derived and/or modified sequence
atgggcgaggagggcaccggcggcaccgtgcacctgctgtgcctggccgcaagcagtggagtgccccttttttgccggagcagcagggggggagctcccgcgagacaacagttgcctttcagcgtgatcggaagtttaaacggagtacacatgttcggccagaatctggaagtacagctgtcttctgcaaggacggagaatacgaccgtggtctggaagagctttcacgatagcattaccctgattgtcttgtcctcggaagtggggatcagcgaactgagactcgagcgtctgctgcagatggtctttggtgccatggtgcttctggtggggttggaggagttgaccaatatccggaatgtggaacggctgaaaaaagacctgcgcgcttcttattgtctaattgattctttccttggagatagcgagctgatcggcgatctgacccagtgcgtagactgtgtgatcccacccgagggcagtctcctgcaggtgctgggcatgctgtggaaactgcttcatctgttttgttggccctggctgagcccccacccgctgtcgtctgggccgctgagtcagcccccgcctattctgagcgccagttctcccattcccacttggtctcaaaaaaatttattcagcttcttcttcagcttcctatctttgtcctttctttttagcttcctgtccctttttctctttgaaacttag

SEQ ID NO: 320053 - DNA, 711 bp, Artificial Sequence
  derived and/or modified sequence
atgggcgaagagggcactggcggtacggtccatcttctctgtctcgccgcttcctctggagtgccattattttgtaggtcttcaaggggcggtgccccagccaggcagcagctgccattttctgtcatcggtagtctgaatggagtgcatatgttcgggcaaaacctggaagtacagctgtcctcagcgagaacagaaaacaccaccgtggtttggaagagtttccatgatagtataacattgatagtcctgagctccgaggttgggattagcgagcttaggctggagcgcctactgcagatggtgtttggcgctatggtgttactggtcggcttagaggaacttacaaacatccgaaacgtggagagactgaagaaagacctgcgcgctagttattgcctcattgattcttttttaggcgacagcgagctgattggggacctgacgcagtgcgttgactgtgtaattcccccagaggggtctttattgcaagttctgggaatgttgtggaaactgctgcacctgttctgctggccttggctgtcgcctcacccactgtcaagcggacctctgagccagcctccccctatattgtctgcctcaagcccgattcctacctggagtcagaagaatctattctcattcttcttttcattcctctctttgtctttcctgttctccttcctcagcctctttctgttcgagacttag

SEQ ID NO: 320054 - DNA, 711 bp, Artificial Sequence
  derived and/or modified sequence
atgggcgaggagggcaccggcggcaccgtgcacctgctgtgcctggccgccagcagcggcgtgcccctgttctgcagaagcagcagaggcggcgcccccgccagacagcagctgcccttcagcgtgatcggcagcctgaacggcgtgcacatgttcggccagaacctggaggtgcagctgagcagcgccagaaccgagaacaccaccgtggtgtggaagagcttccacgacagcatcaccctgatcgtgctgagcagcgaggtgggcatcagcgagctgagactggagagactgctgcagatggtgttcggcgccatggtgctgctggtgggcctggaggagctgaccaacatcagaaacgtggagagactgaagaaggacctgagagccagctactgcctgatcgacagcttcctgggcgacagcgagctgatcggcgacctgacccagtgcgtggactgcgtgatcccccccgagggcagcctgctgcaggtgctgggcatgctgtggaagctgctgcacctgttctgctggccctggctgagcccccaccccctgagcagcggccccctgagccagcccccccccatcctgagcgccagcagccccatccccacctggagccagaagaacctgttcagcttcttcttcagcttcctgagcctgagcttcctgttcagcttcctgagcctgttcctgttcgagacctag

SEQ ID NO: 320055 - protein, 755 aa, Artificial Sequence
  derived and/or modified sequence
MVPGSEGPARAGSVVADVVFVIEGTANLGPYFEGLRKHYLLPAIEYFNGGPPAETDFGGDYGGTQYSLVVFNTVDCAPESYVQCHAPTSSAYEFVTWLDGIKFMGGGGESCSLIAEGLSTALQLFDDFKKMREQIGQTHRVCLLICNSPPYLLPAVESTTYSGCTTENLVQQIGERGIHFSIVSPRKLPALRLLFEKAAPPALLEPLQPPTDVSQDPRHMVLVRGLVLPVGGGSAPGPLQSKQPVPLPPAAPSGATLSAAPQQPLPPVPPQYQVPGNLSAAQVAAQNAVEAAKNQKAGLGPRFSPITPLQQAAPGVGPPFSQAPAPQLPPGPPGAPKPPPASQPSLVSTVAPGSGLAPTAQPGAPSMAGTVAPGGVSGPSPAQLGAPALGGQQSVSNKLLAWSGVLEWQEKPKPASVDANTKLTRSLPCQVYVNHGENLKTEQWPQKLIMQLIPQQLLTTLGPLFRNSRMVQFHFTNKDLESLKGLYRIMGNGFAGCVHFPHTAPCEVRVLMLLYSSKKKIFMGLIPYDQSGFVNGIRQVITNHKQVQQQKLEQQQRGMGGQQAPPGLGPILEDQARPSQNLLQLRPPQPQPQGTVGASGATGQPQPQGTAQPPPGAPQGPPGAASGPPPPGPILRPQNPGANPQLRSLLLNPPPPQTGVPPPQASLHHHLPSPGPHNFPLGLHCQVRGPGGGQRSGLSVPAAPGLEHQDRVLLGSKDIGSKNEGSPIRACSPASWRTTSSWISSESPTPNKVPF

SEQ ID NO: 320056 - protein, 782 aa, Artificial Sequence
  derived and/or modified sequence
MVPGSEGPARAGSVVADVVFVIEGTANLGPYFEGLRKHYLLPAIEYFNGGPPAETDFGGDYGGTQYSLVVFNTVDCAPESYVQCHAPTSSAYEFVTWLDGIKFMGGGGESCSLIAEGLSTALQLFDDFKKMREQIGQTHRVCLLICNSPPYLLPAVESTTYSGCTTENLVQQIGERGIHFSIVSPRKLPALRLLFEKAAPPALLEPLQPPTDVSQDPRHMVLVRGLVLPVGGGSAPGPLQSKQPVPLPPAAPSGATLSAAPQQPLPPVPPQYQVPGNLSAAQVAAQNAVEAAKNQKAGLGPRFSPITPLQQAAPGVGPPFSQAPAPQLPPGPPGAPKPPPASQPSLVSTVAPGSGLAPTAQPGAPSMAGTVAPGGVSGPSPAQLGAPALGGQQSVSNKLLAWSGVLEWQEKPKPASVDANTKLTRSLPCQVYVNHGENLKTEQWPQKLIMQLIPQQLLTTLGPLFRNSRMVQFHFTNKDLESLKGLYRIMGNGFAGCVHFPHTAPCEVRVLMLLYSSKKKIFMGLIPYDQSGFVNGIRQVITNHKQVQQQKLEQQQRGMGGQQAPPGLGPILEDQARPSQNLLQLRPPQPQPQGTVGASGATGQPQPQGTAQPPPGAPQGPPGAASGPPPPGPILRPQNPGANPQLRSLLLNPPPPQTGVPPPQASLHHLQPPGAPALLPPPHQGLGQPQLGPPLLHPPPAQSWPAQLPPRAPLPAAKRKREGEGRVFREKWERAYFFVEVKSMPMCLICKQIVSVLKEYNLKRHYESKHSKSYDQYTEQTR

SEQ ID NO: 320057 - protein, 794 aa, Artificial Sequence
  derived and/or modified sequence
MVPGSEGPARAGSVVADVVFVIEGTANLGPYFEGLRKHYLLPAIEYFNGGPPAETDFGGDYGGTQYSLVVFNTVDCAPESYVQCHAPTSSAYEFVTWLDGIKFMGGGGESCSLIAEGLSTALQLFDDFKKMREQIGQTHRVCLLICNSPPYLLPAVESTTYSGCTTENLVQQIGERGIHFSIVSPRKLPALRLLFEKAAPPALLEPLQPPTDVSQDPRHMVLVRGLVLPVGGGSAPGPLQSKQPVPLPPAAPSGATLSAAPQQPLPPVPPQYQVPGNLSAAQVAAQNAVEAAKNQKAGLGPRFSPITPLQQAAPGVGPPFSQAPAPQLPPGPPGAPKPPPASQPSLVSTVAPGSGLAPTAQPGAPSMAGTVAPGGVSGPSPAQLGAPALGGQQSVSNKLLAWSGVLEWQEKPKPASVDANTKLTRSLPCQVYVNHGENLKTEQWPQKLIMQLIPQQLLTTLGPLFRNSRMVQFHFTNKDLESLKGLYRIMGNGFAGCVHFPHTAPCEVRVLMLLYSSKKKIFMGLIPYDQSGFVNGIRQVITNHKQVQQQKLEQQQRGMGGQQAPPGLGPILEDQARPSQNLLQLRPPQPQPQGTVGASGATGQPQPQGTAQPPPGAPQGPPGAASGPPPPGPILRPQNPGANPQLRSLLLNPPPPQTGVPPPQASLHHLQPPGAPALLPPPHQGLGQPQLGPPLLHPPPDGARRSDAAERGSPGPGRSPQSPPLPLGFPVRQRVTAFHVSITSGKTKERRRGPCVSRKMGASLFLCGSEEHAYVFNMQTNRVCVERIQPETPL

SEQ ID NO: 320058 - protein, 724 aa, Artificial Sequence
  derived and/or modified sequence
MVPGSEGPARAGSVVADVVFVIEGTANLGPYFEGLRKHYLLPAIEYFNGGPPAETDFGGDYGGTQYSLVVFNTVDCAPESYVQCHAPTSSAYEFVTWLDGIKFMGGGGESCSLIAEGLSTALQLFDDFKKMREQIGQTHRVCLLICNSPPYLLPAVESTTYSGCTTENLVQQIGERGIHFSIVSPRKLPALRLLFEKAAPPALLEPLQPPTDVSQDPRHMVLVRGLVLPVGGGSAPGPLQSKQPVPLPPAAPSGATLSAAPQQPLPPVPPQYQVPGNLSAAQVAAQNAVEAAKNQKAGLGPRFSPITPLQQAAPGVGPPFSQAPAPQLPPGPPGAPKPPPASQPSLVSTVAPGSGLAPTAQPGAPSMAGTVAPGGVSGPSPAQLGAPALGGQQSVSNKLLAWSGVLEWQEKPKPASVDANTKLTRSLPCQVYVNHGENLKTEQWPQKLIMQLIPQQLLTTLGPLFRNSRMVQFHFTNKDLESLKGLYRIMGNGFAGCVHFPHTAPCEVRVLMLLYSSKKKIFMGLIPYDQSGFVNGIRQVITNHKQVQQQKLEQQQRGMGGQQAPPGLGPILEDQARPSQNLLQLRPPQPQPPPGAPQGPPGAASGPPPPGPILRPQNPGANPQLRSLLLNPPPPQTGVPPPQASLHHLQPPGAPALLPPPHQGLGQPQLGPPLLHPPPAQSWPAQLPPRAPLPGKGTRGRAEVWTECPSSSWARAPRPSAPGK

SEQ ID NO: 320059 - protein, 250 aa, Artificial Sequence
  derived and/or modified sequence
MLLYSSKKKIFMGLIPYDQSGFVNGIRQVITNHKQVQQQKLEQQQRGMGGQQAPPGLGPILEDQARPSQNLLQLRPPQPQPQGTVGASGATGQPQPQGTAQPPPGAPQGPPGAASGPPPPGPIFGPRTLGPTLSCEASSSTHHRRRLGCPHPRPPSTTSSHQGLLRCCLRRQGLGQPQLGPHSCIHHLPSPGPHNFPLGLHCQVRGPGGGQRSGLSVPAAPGLEHQDRVLLGSKDIGSKNEGSPMAFAEL

SEQ ID NO: 320060 - protein, 397 aa, Artificial Sequence
  derived and/or modified sequence
MVPGSEGPARAGSVVADVVFVIEGTANLGPYFEGLRKHYLLPAIEYFNGGPPAETDFGGDYGGTQYSLVVFNTVDCAPESYVQCHAPTSSAYEFVTWLDGIKFMGGGGESCSLIAEGLSTALQLFDDFKKMREQIGQTHRVCLLICNSPPYLLPAVESTTYSGCTTENLVQQIGERGIHFSIVSPRKLPALRLLFEKAAPPALLEPLQPPTDVSQDPRHMVLVRGLVLPVGGGSAPGPLQSKQPVPLPPAAPSGATLSAAPQQPLPPVPPQYQVPGNLSAAQVAAQNAVEAAKNQKAGLGPRFSPITPLQQAAPGVGPPFSQAPAPALLPPPHQGLGQPQLGPPLLHPPPAQSWPAQLPPRAPLPGQMLLSGGPRGPVPQPGLQPSVMEDDILMDLI

SEQ ID NO: 320061 - DNA, 2349 bp, Artificial Sequence
  derived and/or modified sequence
atggtaccaggaagcgagggccctgccagagcaggttcagtcgtcgccgatgtggttttcgtgatcgaaggcacagccaacttaggaccatacttcgaggggctgcggaagcattaccttctccctgcaatcgagtatttcaacggcggccctcccgctgagactgatttcggtggagattatggcggcacgcagtacagcctagtggttttcaacacagttgactgtgctcctgagagctatgttcaatgccacgcaccaacttcctctgcatacgagtttgtgacctggctcgacggcataaaattcatggggggcggaggcgagtcttgcagcctgattgcagaggggctcagcacggcacttcagttgttcgatgacttcaagaaaatgagagagcagatcggccagactcacagggtctgtctgctaatttgtaattcccccccttaccttctacctgcggttgagtctacaacctactccggatgcaccacagagaacctcgtccagcagatcggggagagaggtatccattttagcatcgtgagccctcggaaattgccagccctgcggctcctgttcgagaaagcggccccacctgccctgcttgagccactccagcccccaaccgatgtatcccaggatccaaggcatatggtgctggtgcggggtctcgtcttgccagtcggcgggggctccgcccctgggcccttgcagagcaagcagcccgtccctctgccacctgcagcaccttcaggcgcgaccctcagtgctgctccccaacaacctctgcctcccgtgccacctcagtaccaggtgccagggaatctgtctgccgcacaggtggccgctcaaaacgctgtcgaagcagccaaaaatcagaaggccggactaggacccaggtttagcccaatcacccccttgcagcaggccgccccaggagtgggaccacctttcagtcaagcacctgcacctcagcttcctccagggcctccaggagctcctaagccgcctcctgcatcccaacccagccttgtctccacagtagcaccaggctctggcctcgccccgactgcgcagccaggggcccctagcatggcaggcactgtcgcaccagggggggtcagcggaccttctccagcccagctgggcgcacctgctctgggaggacaacagtccgtgagcaacaagttgctggcttggagcggcgtgttggagtggcaggaaaaacctaaacccgccagcgtcgacgcaaataccaaactcacccgtagtttaccttgtcaagtctacgttaaccacggcgaaaatcttaaaaccgaacagtggccacagaagctgatcatgcagttaattcctcaacaactgctgactacccttggacctctctttcggaactcacggatggtgcaatttcactttaccaacaaggaccttgagtcactcaagggtctgtacaggattatgggaaatggattcgccggttgcgtacacttccctcacactgccccttgtgaagttagggtgttgatgcttttatacagcagtaaaaagaaaatatttatggggttgatcccttacgatcagtccggattcgtcaatggcatccgccaagtgatcacaaaccacaaacaggttcagcagcagaagctggagcagcagcagcggggaatgggagggcagcaagcgccccccgggctgggccccattctcgaagaccaggcaagaccgagccaaaaccttctgcagctgagacctccccaaccccaaccccagggcaccgtgggcgcttctggcgcgactggccaaccacaaccgcaaggcacagcacagcctcctccgggcgctcctcagggtcctcccggggcggccagcggtcctcctccccctggaccaatcttgaggcctcagaatccgggggctaatcctcagttgagatccctgctactcaatcccccccccccgcaaacaggcgtccccccaccccaggctagcctgcaccatctgcaacctccaggagccccggcactgctgccccctcctcaccagggacttggccagcctcaattggggccacccctcctccatccaccacccgctcagagctggccagctcagttgcctccccgggctccgctcccagcagcgaaacggaaacgagaaggagagggaagagttttcagggagaagtgggagcgggcctatttctttgtagaagttaaatcaatgccgatgtgcttgatctgcaagcagattgtgagtgtgcttaaagaatacaacctgaagcgccactacgaatccaagcattcaaagtcttacgatcagtatacagaacaaacgcgatag

SEQ ID NO: 320062 - DNA, 2349 bp, Artificial Sequence
  derived and/or modified sequence
atggtgcccggcagcgagggccctgcccgggccggctctgtggtggctgatgtggtgtttgtgattgagggcacagccaacctgggcccctactttgagggcctgaggaagcactacctgctgcctgccatcgagtacttcaacggcggccccccagctgagacagactttggaggagactatggaggcacccagtacagcctggtggtgttcaacacagtggactgtgcccctgagagctatgtgcagtgccacgcccccaccagcagcgcctatgaatttgtgacctggctggatggcatcaagttcatgggcggcggcggggagagctgcagcctgattgctgagggcctgagcacagccctgcagctgtttgatgacttcaagaagatgagggagcagatcggccagacccaccgggtgtgcctgctgatctgcaacagccccccctacctgctgcctgctgtggagagcaccacctacagcggctgcaccacagagaacctggtgcagcagattggagagcggggcatccacttcagcatcgtgagccccaggaagctgcctgccctgcggctgctgtttgagaaggccgcccccccagccctgctggagcccctgcagcccccaacagatgtgtcccaggaccccaggcacatggtgctggtgcggggcctggtgctgcctgtgggcggcggcagcgcccctggccccctgcagagcaagcagcctgtgcccctgcccccagctgcccccagcggggccaccctgtctgctgccccccagcagcccctgccccctgtgcccccccagtaccaggtgcccggcaacctgtctgctgcccaggtggccgcccagaatgctgtggaggccgccaagaaccagaaggccggcctgggcccccgcttcagccccatcacccccctgcagcaggccgcccctggggtgggcccccccttcagccaggccccagccccccagctgcccccaggccccccaggggcccccaagcccccaccagccagccagcccagcctggtgtccacagtggcccctggcagcggcctggcccccacagcccagcccggggcccccagcatggccggcaccgtggcccctggaggagtgtctggccccagccctgcccagctgggcgccccagccctgggcggccagcagagcgtgagcaacaagctgctggcctggagcggcgtgctggagtggcaggagaagcccaagccagcctctgtggatgccaacaccaagctgaccaggagcctgccctgccaggtgtatgtgaaccacggggagaacctgaagacagagcagtggccccagaagctgatcatgcagctgatcccccagcagctgctgaccaccctgggccccctcttcaggaacagcaggatggtgcagttccacttcaccaacaaggacctggagagcctgaagggcctgtaccgcatcatgggaaatggatttgctggctgtgtgcacttcccccacacagccccctgtgaggtgcgggtgctgatgctgctgtacagcagcaagaagaagatcttcatgggcctcatcccctatgaccagagcggctttgtgaatggcatccggcaggtgatcaccaaccacaagcaggtgcagcagcagaagctggagcagcagcagaggggcatgggcggccagcaggcccctcctggcctgggccccatcctggaggaccaggcccggcccagccagaacctgctgcagctgcggcccccccagccccagccccagggcaccgtgggcgccagcggggccaccggccagccccagccccagggcacagcccagcccccacctggggccccccagggccccccaggggccgccagcggccccccacctcctggccccatcctgcggccccagaaccctggggccaacccccagctgcggagcctgctgctgaaccccccaccaccccagacaggagtgcccccaccccaggccagcctgcaccacctgcagcccccaggggccccagccctgctgcccccaccccaccagggcctgggccagccccagctgggcccccccctgctgcaccccccaccagcccagagctggccagcccagctgcccccccgggcccccctgcctgctgccaagaggaagcgggagggggagggccgggtcttccgggagaagtgggagcgggcctacttctttgtggaggtgaagtccatgcccatgtgcctgatctgcaagcagatcgtgtctgtgctgaaggagtacaacctgaagaggcactatgagagcaagcacagcaagagctatgaccagtacacagagcagaccaggtag

SEQ ID NO: 320063 - DNA, 2409 bp, Artificial Sequence
  derived and/or modified sequence
atttctgctcattccgcggcgtcggctgcggctgcagtggtggtggcgggtaccgcacggggtatggtccccgggtccgagggcccggcccgcgccgggagcgtggtggccgacgtggtgtttgtgattgagggtacggccaacctgggaccctacttcgaggggctccgcaagcactacctgctcccggccatcgagtattttaatggtggtcctcctgctgagacggacttcgggggagactatggggggacccagtacagcctcgtggtgttcaacacagtggactgcgctcccgagtcctacgtacaatgtcacgctcccaccagcagcgcctatgagtttgtcacctggctcgatggcattaagttcatgggcgggggtggtgagagctgcagcctcatcgcggaaggactcagcacagccttgcagctgtttgatgacttcaagaagatgcgcgagcagattggccagacgcaccgggtctgcctcctcatctgcaactcacccccatacttgttgcctgctgttgagagcaccacgtactctggatgcacaactgagaatcttgtgcagcagattggggagcgggggatccacttctccattgtgtctccccggaagctgcctgcgcttcggcttctgtttgagaaggcagcccccccggccttgctggagccgctgcagcctccgacagatgtgagccaggacccgaggcacatggtgctggttcggggactcgtgctgcctgttgggggtggctcagccccaggccccctccagtcaaagcagccagtccccctgcctcccgccgcaccctcaggtgccactctctcagcagccccccagcagcctctgccccccgtccccccgcagtaccaggttcccgggaacctgagtgcagctcaggtggccgcgcagaatgcagtggaggctgccaagaaccagaaggctgggctgggccctcgcttctcgcccatcacccctctccaacaagctgctcccggagtgggtccccccttcagccaggccccagctccccaactacccccaggaccccctggcgcccccaagccaccacctgcttcccagcccagtctggtctccactgtggcccctggctccggcctggctcccacggcacagcccggggcaccgtccatggcaggcactgtggccccaggaggggtgagcggcccttccccagcccagctgggagccccagccctcggtgggcagcagtcagtctccaataagcttctggcctggagcggggtcctggagtggcaagagaaacccaaacctgcctcagtggatgccaacaccaagctgacgcggtcactgccctgccaggtctacgtgaatcatggcgagaacctgaagacggagcagtggccccagaagctgatcatgcagctcatcccccagcagctgctgaccaccctgggccctttgttccggaactcaaggatggtccagttccatttcaccaacaaggacctggagtctctcaaaggcctctaccgcatcatgggcaacggcttcgcgggctgcgtgcacttcccccacacggcgccctgtgaggtgcgcgtgctcatgctcctgtactcgtccaagaagaagatcttcatgggcctcatcccctacgaccagagcggcttcgtcaacggcatccggcaggtcatcaccaaccacaagcaggtccagcagcagaagctggagcagcagcagcgaggaatggggggacagcaggcacccccagggctggggcccattctggaggaccaagccaggccctcacagaatctgctccagctccgcccaccgcagccccagcctcagggtaccgtaggggcctctggggccacggggcagccccagccccaaggtactgcccagcccccgccaggtgcccctcaaggccctcctggagcagcttctggcccaccccctcctggacccatccttcggccccagaaccctggggccaaccctcagctgcgaagcctcctcctcaacccaccaccgccgcagactggggtgcccccaccccaggcctccctccaccacctccagccaccaggggctcctgcgctgctgcctccgccgcaccagggcctggggcagccccagttggggcccccactcctgcatccaccacctgcccagtcctggcccgcacaacttccccctcgggctccactgccagcggcaaaacgaaagagagaaggagagggccgtgtgtttcgagaaaaatgggagcgagcctatttctttgtggaagtgaagagcatgcctatgtgtttaatatgcaaacaaatcgtgtctgtgttgaaagaatacaacctgaaacgccactatgaatcaaagcatagtaagagctacgaccagtacacagaacagactcga

SEQ ID NO: 320064 - DNA, 2349 bp, Artificial Sequence
  derived and/or modified sequence
atggtgcccggcagcgagggccccgcccgggccggcagcgtggtggctgacgttgtgtttgtcatagagggcaccgcaaacctcggcccatatttcgagggcctgaggaaacactatctcctgcccgctattgagtacttcaatgggggacctccggcggaaactgactttggtggcgactacggcggcactcagtactcccttgttgtgtttaataccgtggactgtgcccctgaatcatatgtccagtgtcatgccccaactagctccgcctatgaattcgtgacatggttggatggcatcaagttcatggggggcggaggcgaaagctgtagcctcatcgcagaaggattgtcgaccgcactgcaactgttcgatgactttaagaagatgagggagcagattggacagactcaccgcgtctgcctattgatttgtaactctccaccctacctcctgcctgcagtggagagtacaacgtattcaggatgtaccaccgaaaatctggtgcaacaaatcggcgagcgcggtattcacttttcaattgtttcaccgcgtaaactgcctgctttgcgtttgctgtttgaaaaggccgcaccacctgctctgttagaacctctgcagcctccaaccgacgtttcccaagatcctaggcacatggtgctcgtcagaggtcttgtgctgccagttgggggggggagcgctcccggcccactgcaatccaaacagcctgtgccgcttcctcctgccgccccctctggtgccacattgagcgcagcaccccaacaacccctgcctccggtccctcctcagtatcaagtgccaggtaacctgtcagccgctcaggtcgcggctcagaacgccgtggaagctgcaaaaaaccagaaagctggactgggtccccgtttctcccccattactccactgcagcaggcagctccaggagtcggccctcccttcagccaggctcccgctccacagctcccccccgggcctccgggcgcccccaagccccccccggcctctcagccctctttagtctctacagtcgccccggggtccgggctcgcgcctacggcccagcctggagcgccgtctatggccgggactgtggccccaggcggggtgagtggtcccagccccgctcagttaggggccccagctctcggggggcagcagtccgttagcaacaaattactggcatggtccggcgtgctagagtggcaggaaaagcccaagcctgctagcgtcgatgccaacacaaagctgacccgctctctcccatgtcaggtgtacgttaatcatggcgagaatctcaagaccgaacaatggcctcagaaacttatcatgcagttgatcccccagcaacttctgaccacattgggccctctgttccgtaacagcagaatggttcagttccactttacaaataaagacctcgagtccctgaagggtctgtatcgtatcatgggtaacgggtttgcaggatgcgtgcactttcctcacaccgctccctgtgaggttcgggtccttatgctgctgtatagctcgaagaaaaaaatttttatggggcttattccctatgatcaaagtgggttcgtaaacggaattagacaggtcattacgaatcataagcaggtgcagcagcagaaactcgaacagcagcagcgtgggatgggggggcaacaggctccacctggcctggggcccatcctagaagatcaggcaaggccttcacagaatctgttacaactacgccccccccagcctcaacctcaggggacagtgggagcctccggcgccactgggcagccacaaccacaggggacggcccagcctcccccaggagctccacagggccctcccggtgccgcgagtggcccccccccgccgggccctatactccgcccacagaatccaggagccaatccacaactcagaagcctgttactgaatcctcctccgccacaaacaggtgtgcctccccctcaggccagtctgcatcatctccagcccccaggagcccctgcgctcctgcctcccccacatcagggtcttggccagcctcagctggggcctccattattgcacccaccacctgctcaaagctggcccgcccagctacccccacgcgccccccttcccgccgctaagcggaaacgcgaaggtgagggacgcgttttcagggagaagtgggagagggcttatttcttcgtcgaggttaagagcatgcccatgtgtctgatttgcaagcagatcgtctccgtgttgaaggaatacaacctaaagagacactacgagtctaagcactccaagagctacgatcagtacactgagcagacacgatag

SEQ ID NO: 320065 - DNA, 2349 bp, Artificial Sequence
  derived and/or modified sequence
atggtaccaggctcagaagggcctgccagagccggaagcgtggtcgccgatgtggttttcgttatcgaaggtaccgcgaatctggggccttactttgaaggattgagaaagcactacctgctgccagcaattgaatatttcaatggagggccacccgctgagacagattttggcggtgactatggcggaacacagtacagcctagttgtgttcaatacggtcgattgcgcccctgaatcatatgtacagtgtcacgcccctacatccagtgcgtacgagtttgttacatggttggacggcattaagtttatggggggtggcggagaatcctgtagcctcatagctgagggcctgtccaccgcccttcagttattcgacgatttcaaaaagatgcgagaacaaataggtcagactcaccgcgtgtgtttacttatctgtaatagtccaccatacctactgcctgccgtggagagcacaacctattccgggtgcaccaccgagaatctggtgcagcagatcggcgagcggggaattcatttttcaatcgtctcgccgagaaaattaccagctctcagactgttgttcgaaaaggctgctcctcccgcactgctggaacctcttcagcctccaacagacgtcagtcaggacccacgccacatggtactcgtaaggggacttgttctacctgtgggaggcggttctgcccctggcccacttcagtctaaacagcccgttcccctgccacccgctgcgcctagcggcgctacgttgtcagccgcaccgcagcagcccctccctcctgtacctccccagtatcaggtgcctggcaacctgtccgccgcacaggtagctgcacagaacgctgtggaggcagccaagaaccagaaagccggactaggtcccaggttctcacccattacccctttgcagcaggcagcccctggcgtgggccctccgttctcccaggcacccgctcctcagctcccgccaggaccacctggagcccctaaaccaccgcctgcctctcaacccagcctggtcagcactgtcgcgccaggttcagggctggcacctacagcacagcccggagctccctctatggctggtacagtggcgcctggcggtgtgagtggcccatctcccgctcaacttggggctcccgcacttggtggccagcagagtgtgtctaacaagctgctggcctggtccggcgtcctagaatggcaagaaaagcccaaaccagccagtgtggacgccaatactaagctgactcgctcacttccatgtcaagtatatgtgaaccacggcgagaatctaaagaccgaacagtggccgcagaaactaatcatgcagctgattccccagcagttgttgactacattgggtcccctcttccgaaattccagaatggtgcagttccactttacaaacaaagatctggagagtctgaaggggttataccggatcatgggtaacggatttgctggctgcgtgcatttccctcatacagcaccatgcgaggtccgggtgctgatgttgctgtattcaagcaagaaaaagatcttcatgggcttgataccctatgatcagtcgggcttcgtgaacggtataagacaagtcataacgaaccataagcaagtgcagcagcaaaaactggaacagcagcaaaggggcatgggtggccagcaggcacccccaggactcggccctatattagaggatcaggcacgaccaagccagaatctgctgcagctgcggcctccacagcctcagcctcaaggaacagtcggagccagcggtgcgactggccaacctcaaccccagggaaccgcccagcctcctcccggagcgccacagggtccccctggggctgcgtcaggtccacctcctcctggtcccatccttcggccacagaatcctggagcaaacccccagcttcggtcactactgcttaacccaccgcctccacaaactggtgtcccacctccacaggcctccctacatcacctgcagccccctggagctcccgcattgctgccacccccacatcaggggctgggacaacctcaactggggcctccactcctgcatcccccacccgctcagtcatggcccgcacagctacccccaagggctccattgccagctgctaagagaaagcgggaaggcgaaggacgtgtgttccgcgaaaagtgggagcgtgcctacttttttgttgaggttaagagcatgcccatgtgcctgatatgtaagcagatcgtgtccgtgctgaaagagtacaatctgaaacggcactatgaatccaagcattctaagtcatatgatcagtatactgaacagactcgatag

SEQ ID NO: 320066 - DNA, 2349 bp, Artificial Sequence
  derived and/or modified sequence
atggtgcccggcagcgagggccccgccagagccggcagcgtggtggccgacgtggtgttcgtgatcgagggcaccgccaacctgggcccctacttcgagggcctgagaaagcactacctgctgcccgccatcgagtacttcaacggcggcccccccgccgagaccgacttcggcggcgactacggcggcacccagtacagcctggtggtgttcaacaccgtggactgcgcccccgagagctacgtgcagtgccacgcccccaccagcagcgcctacgagttcgtgacctggctggacggcatcaagttcatgggcggcggcggcgagagctgcagcctgatcgccgagggcctgagcaccgccctgcagctgttcgacgacttcaagaagatgagagagcagatcggccagacccacagagtgtgcctgctgatctgcaacagccccccctacctgctgcccgccgtggagagcaccacctacagcggctgcaccaccgagaacctggtgcagcagatcggcgagagaggcatccacttcagcatcgtgagccccagaaagctgcccgccctgagactgctgttcgagaaggccgccccccccgccctgctggagcccctgcagccccccaccgacgtgagccaggaccccagacacatggtgctggtgagaggcctggtgctgcccgtgggcggcggcagcgcccccggccccctgcagagcaagcagcccgtgcccctgccccccgccgcccccagcggcgccaccctgagcgccgccccccagcagcccctgccccccgtgcccccccagtaccaggtgcccggcaacctgagcgccgcccaggtggccgcccagaacgccgtggaggccgccaagaaccagaaggccggcctgggccccagattcagccccatcacccccctgcagcaggccgcccccggcgtgggcccccccttcagccaggcccccgccccccagctgccccccggcccccccggcgcccccaagcccccccccgccagccagcccagcctggtgagcaccgtggcccccggcagcggcctggcccccaccgcccagcccggcgcccccagcatggccggcaccgtggcccccggcggcgtgagcggccccagccccgcccagctgggcgcccccgccctgggcggccagcagagcgtgagcaacaagctgctggcctggagcggcgtgctggagtggcaggagaagcccaagcccgccagcgtggacgccaacaccaagctgaccagaagcctgccctgccaggtgtacgtgaaccacggcgagaacctgaagaccgagcagtggccccagaagctgatcatgcagctgatcccccagcagctgctgaccaccctgggccccctgttcagaaacagcagaatggtgcagttccacttcaccaacaaggacctggagagcctgaagggcctgtacagaatcatgggcaacggcttcgccggctgcgtgcacttcccccacaccgccccctgcgaggtgagagtgctgatgctgctgtacagcagcaagaagaagatcttcatgggcctgatcccctacgaccagagcggcttcgtgaacggcatcagacaggtgatcaccaaccacaagcaggtgcagcagcagaagctggagcagcagcagagaggcatgggcggccagcaggccccccccggcctgggccccatcctggaggaccaggccagacccagccagaacctgctgcagctgagacccccccagccccagccccagggcaccgtgggcgccagcggcgccaccggccagccccagccccagggcaccgcccagcccccccccggcgccccccagggcccccccggcgccgccagcggcccccccccccccggccccatcctgagaccccagaaccccggcgccaacccccagctgagaagcctgctgctgaaccccccccccccccagaccggcgtgccccccccccaggccagcctgcaccacctgcagccccccggcgcccccgccctgctgccccccccccaccagggcctgggccagccccagctgggcccccccctgctgcaccccccccccgcccagagctggcccgcccagctgccccccagagcccccctgcccgccgccaagagaaagagagagggcgagggcagagtgttcagagagaagtgggagagagcctacttcttcgtggaggtgaagagcatgcccatgtgcctgatctgcaagcagatcgtgagcgtgctgaaggagtacaacctgaagagacactacgagagcaagcacagcaagagctacgaccagtacaccgagcagaccagatag

SEQ ID NO: 320067 - protein, 1274 aa, Artificial Sequence
  derived and/or modified sequence
MASGSGDSVTRRSVASQFFTQEEGPGIDGMTTSERVVDLLNQAALITNDSKITVLKQVQELIINKDPTLLDNFLDEIIAFQADKSIEVRKFVIGFIEEACKRDIELLLKLIANLNMLLRDENVNVVKKAILTMTQLYKVALQWMVKSRVISELQEACWDMVSAMAGDIILLLDSDNDGIRTHAIKFVEGLIVTLSPRMADSEIPRRQEHDISLDRIPRDHPYIQYNVLWEEGKAALEQLLKFMVHPAISSINLTTALGSLANIARQRPMFMSEVIQAYETLHANLPPTLAKSQVSSVRKNLKLHLLSVLKHPASLEFQAQITTLLVDLGTPQAEIARNMPSSKDTRKRPRDDSDSTLKKMKLEPNLGEDDEDKDLEPGPSGTSKASAQISGQSDTDITAEFLQPLLTPDNVANLVLISMVYLPEAMPASFQAIYTPVESAGTEAQIKHLARLMATQMTAAGLGPGVEQTKQCKEEPKEEKVVKTESVLIKRRLSAQGQAISVVGSLSSMSPLEEEAPQAKRRPEPIIPVTQPRLAGAGGRKKIFRLSDVLKPLTDAQVEAMKLGAVKRILRAEKAVACSGAAQVRIKILASLVTQFNSGLKAEVLSFILEDVRARLDLAFAWLYQEYNAYLAAGASGSLDKYEDCLIRLLSGLQEKPDQKDGIFTKVVLEAPLITESALEVVRKYCEDESRTYLGMSTLRDLIFKRPSRQFQYLHVLLDLSSHEKDKVRSQALLFIKRMYEKEQLREYVEKFALNYLQLLVHPNPPSVLFGADKDTEVAAPWTEETVKQCLYLYLALLPQNHKLIHELAAVYTEAIADIKRTVLRVIEQPIRGMGMNSPELLLLVENCPKGAETLVTRCLHSLTDKVPPSPELVKRVRDLYHKRLPDVRFLIPVLNGLEKKEVIQALPKLIKLNPIVVKEVFNRLLGTQHGEGNSALSPLNPGELLIALHNIDSVKCDMKSIIKATNLCFAERNVYTSEVLAVVMQQLMEQSPLPMLLMRTVIQSLTMYPRLGGFVMNILSRLIMKQVWKYPKVWEGFIKCCQRTKPQSFQVILQLPPQQLGAVFDKCPELREPLLAHVRSFTPHQQAHIPNSIMTILEASGKQEPEAKEAPAGPLEEDDLEPLTLAPAPAPRPPQDLIGLRLAQEKALKRQLEEEQKLKPGGVGAPSSSSPSPSPSARPGPPPSEEAMDFREEGPECETPGIFISMDDDSGLTEAALLDSSLEGPLPKETAAGGLTLKEERSPQTLAPVGEDAMKTPSPAAEDAREPEAKGNS

SEQ ID NO: 320068 - protein, 154 aa, Artificial Sequence
  derived and/or modified sequence
LTAAMASGSGDSVTRRSVASQFFTQEEGPGIDGMTTSERVVDLLNQAALITNDSKITVLKQVQELIINKDPTLLDNFLDEIIAFQADKSIEVRKFVIGFIEEACKRDIELLLKLIANLNMLLRDENVNVVKKAILTMTQLPVPVPACPPRPQLP

SEQ ID NO: 320069 - DNA, 3825 bp, Artificial Sequence
  derived and/or modified sequence
atggccagcggcagcggcgacagcgtgaccagaagaagcgtggccagccagttcttcacccaggaggagggccccggcatcgacggcatgaccaccagcgagagagtggtggacctgctgaaccaggccgccctgatcaccaacgacagcaagatcaccgtgctgaagcaggtgcaggagctgatcatcaacaaggaccccaccctgctggacaacttcctggacgagatcatcgccttccaggccgacaagagcatcgaggtgagaaagttcgtgatcggcttcatcgaggaggcctgcaagagagacatcgagctgctgctgaagctgatcgccaacctgaacatgctgctgagagacgagaacgtgaacgtggtgaagaaggccatcctgaccatgacccagctgtacaaggtggccctgcagtggatggtgaagagcagagtgatcagcgagctgcaggaggcctgctgggacatggtgagcgccatggccggcgacatcatcctgctgctggacagcgacaacgacggcatcagaacccacgccatcaagttcgtggagggcctgatcgtgaccctgagccccagaatggccgacagcgagatccccagaagacaggagcacgacatcagcctggacagaatccccagagaccacccctacatccagtacaacgtgctgtgggaggagggcaaggccgccctggagcagctgctgaagttcatggtgcaccccgccatcagcagcatcaacctgaccaccgccctgggcagcctggccaacatcgccagacagagacccatgttcatgagcgaggtgatccaggcctacgagaccctgcacgccaacctgccccccaccctggccaagagccaggtgagcagcgtgagaaagaacctgaagctgcacctgctgagcgtgctgaagcaccccgccagcctggagttccaggcccagatcaccaccctgctggtggacctgggcaccccccaggccgagatcgccagaaacatgcccagcagcaaggacaccagaaagagacccagagacgacagcgacagcaccctgaagaagatgaagctggagcccaacctgggcgaggacgacgaggacaaggacctggagcccggccccagcggcaccagcaaggccagcgcccagatcagcggccagagcgacaccgacatcaccgccgagttcctgcagcccctgctgacccccgacaacgtggccaacctggtgctgatcagcatggtgtacctgcccgaggccatgcccgccagcttccaggccatctacacccccgtggagagcgccggcaccgaggcccagatcaagcacctggccagactgatggccacccagatgaccgccgccggcctgggccccggcgtggagcagaccaagcagtgcaaggaggagcccaaggaggagaaggtggtgaagaccgagagcgtgctgatcaagagaagactgagcgcccagggccaggccatcagcgtggtgggcagcctgagcagcatgagccccctggaggaggaggccccccaggccaagagaagacccgagcccatcatccccgtgacccagcccagactggccggcgccggcggcagaaagaagatcttcagactgagcgacgtgctgaagcccctgaccgacgcccaggtggaggccatgaagctgggcgccgtgaagagaatcctgagagccgagaaggccgtggcctgcagcggcgccgcccaggtgagaatcaagatcctggccagcctggtgacccagttcaacagcggcctgaaggccgaggtgctgagcttcatcctggaggacgtgagagccagactggacctggccttcgcctggctgtaccaggagtacaacgcctacctggccgccggcgccagcggcagcctggacaagtacgaggactgcctgatcagactgctgagcggcctgcaggagaagcccgaccagaaggacggcatcttcaccaaggtggtgctggaggcccccctgatcaccgagagcgccctggaggtggtgagaaagtactgcgaggacgagagcagaacctacctgggcatgagcaccctgagagacctgatcttcaagagacccagcagacagttccagtacctgcacgtgctgctggacctgagcagccacgagaaggacaaggtgagaagccaggccctgctgttcatcaagagaatgtacgagaaggagcagctgagagagtacgtggagaagttcgccctgaactacctgcagctgctggtgcaccccaacccccccagcgtgctgttcggcgccgacaaggacaccgaggtggccgccccctggaccgaggagaccgtgaagcagtgcctgtacctgtacctggccctgctgccccagaaccacaagctgatccacgagctggccgccgtgtacaccgaggccatcgccgacatcaagagaaccgtgctgagagtgatcgagcagcccatcagaggcatgggcatgaacagccccgagctgctgctgctggtggagaactgccccaagggcgccgagaccctggtgaccagatgcctgcacagcctgaccgacaaggtgccccccagccccgagctggtgaagagagtgagagacctgtaccacaagagactgcccgacgtgagattcctgatccccgtgctgaacggcctggagaagaaggaggtgatccaggccctgcccaagctgatcaagctgaaccccatcgtggtgaaggaggtgttcaacagactgctgggcacccagcacggcgagggcaacagcgccctgagccccctgaaccccggcgagctgctgatcgccctgcacaacatcgacagcgtgaagtgcgacatgaagagcatcatcaaggccaccaacctgtgcttcgccgagagaaacgtgtacaccagcgaggtgctggccgtggtgatgcagcagctgatggagcagagccccctgcccatgctgctgatgagaaccgtgatccagagcctgaccatgtaccccagactgggcggcttcgtgatgaacatcctgagcagactgatcatgaagcaggtgtggaagtaccccaaggtgtgggagggcttcatcaagtgctgccagagaaccaagccccagagcttccaggtgatcctgcagctgcccccccagcagctgggcgccgtgttcgacaagtgccccgagctgagagagcccctgctggcccacgtgagaagcttcaccccccaccagcaggcccacatccccaacagcatcatgaccatcctggaggccagcggcaagcaggagcccgaggccaaggaggcccccgccggccccctggaggaggacgacctggagcccctgaccctggcccccgcccccgcccccagacccccccaggacctgatcggcctgagactggcccaggagaaggccctgaagagacagctggaggaggagcagaagctgaagcccggcggcgtgggcgcccccagcagcagcagccccagccccagccccagcgccagacccggccccccccccagcgaggaggccatggacttcagagaggagggccccgagtgcgagacccccggcatcttcatcagcatggacgacgacagcggcctgaccgaggccgccctgctggacagcagcctggagggccccctgcccaaggagaccgccgccggcggcctgaccctgaaggaggagagaagcccccagaccctggcccccgtgggcgaggacgccatgaagacccccagccccgccgccgaggacgccagagagcccgaggccaagggcaacagctag

SEQ ID NO: 320070 - DNA, 465 bp, Artificial Sequence
  derived and/or modified sequence
ctgaccgccgccatggccagcggcagcggcgacagcgtgaccagaagaagcgtggccagccagttcttcacccaggaggagggccccggcatcgacggcatgaccaccagcgagagagtggtggacctgctgaaccaggccgccctgatcaccaacgacagcaagatcaccgtgctgaagcaggtgcaggagctgatcatcaacaaggaccccaccctgctggacaacttcctggacgagatcatcgccttccaggccgacaagagcatcgaggtgagaaagttcgtgatcggcttcatcgaggaggcctgcaagagagacatcgagctgctgctgaagctgatcgccaacctgaacatgctgctgagagacgagaacgtgaacgtggtgaagaaggccatcctgaccatgacccagctgcccgtgcccgtgcccgcctgcccccccagaccccagctgccctag

SEQ ID NO: 320071 - DNA, 3825 bp, Artificial Sequence
  derived and/or modified sequence
atggcttcagggagtggtgactcagtgacacggaggtcagttgcttctcagttttttacccaggaagaaggccctggaattgacggcatgaccacctcggagcgggtagtagatcttctgaatcaggcagccctgatcacaaatgacagcaagattaccgtgctcaagcaagtgcaagaactcatcattaataaggatcccaccctgctggataattttctggacgaaattatagcattccaagccgataagtcaatcgaggtgcgaaagtttgtcattggctttatcgaagaggcgtgcaaaagagatatcgaactcctgcttaaattgatcgccaacctcaacatgctgctgagggatgaaaacgtcaacgtagtgaagaaggctattcttactatgacccagctgtacaaagtcgccctacagtggatggtaaaatcacgggttatttctgagctgcaggaggcttgttgggacatggtgagcgctatggctggcgatatcattttgctgttggattctgacaacgatggaattaggacgcatgccatcaagtttgttgaaggcctgatcgttacattatccccgagaatggctgattccgagatcccgcgcaggcaagagcacgatattagtcttgacaggattccccgtgatcacccctacatccagtacaacgtgctttgggaggaaggaaaggctgccctggaacagctgctcaaattcatggtgcaccctgcaataagctccattaacctgactacggccttaggaagcctggccaatatcgctaggcaaaggcctatgtttatgagtgaggtaatccaggcctacgagacactgcatgcaaacctgccaccaaccttagccaagagccaggtgtccagcgtccggaagaatcttaagctacatcttctgtcagtccttaagcatcccgctagccttgagtttcaggcgcaaataacaactctcctagttgatctcggtactccacaggccgagatcgctagaaatatgcctagctctaaggatacccgcaagaggcctcgcgatgatagcgattccaccttaaaaaagatgaaactggaaccaaatttgggcgaggacgacgaggataaggacctggaaccgggccctagcggaacgtccaaggcgtccgcacagatttctggccagtccgacactgatatcacagcggagttcttgcagccactgcttacccccgataatgtcgctaatctcgtcctgatcagcatggtgtacctgcccgaagctatgccagcctcatttcaggccatatataccccggtggaatctgccggcacagaggctcagataaaacatctggccaggctcatggcaactcagatgacagcggctggcctggggcctggcgttgagcagaccaagcaatgtaaagaggagccaaaagaggagaaggtggtcaagacggagtccgttctgatcaagagacggctttcagctcaggggcaggccatttccgtggtggggtccctaagttctatgagtcccttggaggaggaggccccccaagcgaaacggcggcccgaacctattatccccgtgacacagccaagactcgctggcgccggggggcggaagaaaatttttcgtttatccgacgtcctaaagccactgacggacgcccaggtggaagctatgaaacttggagccgtgaagcggatccttcgcgccgaaaaagccgttgcctgctctggtgccgcccaggtccgtattaaaattctggcatcgctggttacacagtttaactctggacttaaggctgaggtacttagttttatccttgaggatgtaagggctcggcttgacctagcgttcgcttggctgtatcaggagtataatgcttacttggcggcgggggcctctggatccctggataaatatgaagattgcctgattcgcctactcagtggattgcaagagaaaccagatcaaaaagacggcattttcacaaaagtcgtgttggaagcacccctgataaccgagagcgcactggaagtagttagaaagtactgtgaagatgaatcacgaacttacttaggcatgtccacacttagggatctcatatttaagagaccatcccgacagttccagtacctacacgtgctgctggatctatccagccacgaaaaagataaagtgcgcagtcaggccctcctgtttatcaagcggatgtacgagaaggaacagttgcgcgaatacgtagagaagtttgccctgaattatctgcagctcctggtacaccctaatccccctagcgtgctgtttggagctgataaagacacggaggtggccgccccctggaccgaagaaactgtgaaacagtgcctgtacctgtatttggctctgttaccacagaatcataaacttattcacgaactggctgccgtttacactgaggccatagcagatattaaaagaacagtgctgagagttattgagcaacccatacgtggaatgggtatgaacagtccagagctgctgttgttagtcgagaattgtcccaagggtgcagaaactctcgtcactaggtgtttgcactctctcacagataaagtacctccaagtcccgaactggtgaaaagggtgagagatctgtatcacaaacgactcccagatgtccggtttctgataccggtactcaacggacttgagaaaaaagaagtgatccaagcactgcctaagcttatcaaattgaacccaattgtggtgaaagaggtcttcaaccgcctcctcggcacgcagcacggggaaggaaattctgcactctcgccactgaaccccggagagctgctgatagcgctccacaatattgattccgtgaagtgcgatatgaagagcatcattaaggccacaaacctgtgtttcgcagagagaaatgtctacactagcgaggtgctagccgttgttatgcagcagctcatggagcagagtcccctgcccatgctcctcatgcgcacagtgatacagtcactgacaatgtatccaaggcttggcgggttcgtgatgaacattctgagccgactcatcatgaaacaggtgtggaaatatcccaaggtttgggaggggtttattaaatgctgtcaaaggacaaaaccacaatcttttcaggttatcctgcagcttcccccgcagcagttaggcgccgtttttgacaagtgtccagagctcagagaacccctcctcgcacatgtaaggtcattcacaccacaccagcaggcgcacattcctaactctatcatgacaattctggaggcttccggtaaacaggaacccgaggcaaaagaggcccctgctggaccattggaagaggatgatctcgaacccctcacactcgcacccgctcctgcaccacgacctccccaggatctgattggcttacggctggcccaggagaaggctctcaaaagacagttggaggaggaacagaaattaaagccagggggtgtgggagcccccagctcatcttcaccttccccgagtccatccgctaggcctgggcctcccccttccgaggaggccatggatttccgggaagaaggccctgagtgcgagacccctggtatctttatcagtatggacgacgacagtgggcttaccgaagcagctctcctggattcaagcctggaggggccgctgccaaaggaaaccgctgcgggagggctgacactgaaagaggaaaggtcaccacagaccctggccccggtgggggaggacgcgatgaaaactccttcaccggccgctgaagatgcccgggagcctgaagctaaggggaatagttag

SEQ ID NO: 320072 - DNA, 465 bp, Artificial Sequence
  derived and/or modified sequence
ttgacagctgcaatggcctcagggtcaggcgactccgtgaccaggcggtctgtggcatcacaattctttacacaagaggagggcccaggcattgatggcatgaccacatcagagcgcgtcgtggatctgctcaaccaggccgctttgataaccaatgactcaaaaatcactgtgctcaaacaggtccaggagctcatcataaataaggatcctacactccttgacaattttctggatgaaattatcgccttccaggctgacaaatccatcgaggtccgaaagtttgtgattggctttatcgaagaggcttgtaagagggatatcgagttgctgctcaaattaatagctaacctgaatatgctgttaagagacgagaatgtcaacgtggtcaaaaaagccattctgaccatgacacagctgcccgtgccggtacccgcatgccctcctcgacctcaattaccctag

SEQ ID NO: 320073 - DNA, 3825 bp, Artificial Sequence
  derived and/or modified sequence
atggccagcggcagcggggacagcgtgaccaggagatctgtggccagccagttcttcacccaggaggagggccctggcattgatggcatgaccaccagcgagcgggtggtggacctgctgaaccaggccgccctgatcaccaatgacagcaagatcaccgtgctgaagcaggtgcaggagctgatcatcaacaaggaccccaccctgctggacaacttcctggatgagatcatcgccttccaggccgacaagagcattgaggtgaggaagtttgtgattggcttcatcgaggaggcctgcaagagggacatcgagctgctgctgaagctgattgccaacctgaacatgctgctgagagatgaaaatgtgaatgtggtgaagaaggccatcctgaccatgacccagctgtacaaggtggccctgcagtggatggtgaagagcagggtcatcagcgagctgcaggaggcctgctgggacatggtgtctgccatggccggggacatcatcctgctgctggacagcgacaatgatggcatccgcacccacgccatcaagtttgtggagggcctgattgtgaccctgagccccaggatggctgacagcgagatcccccggcggcaggagcatgacatcagcctggaccgcatcccccgggaccacccctacatccagtacaacgtgctgtgggaggagggcaaggccgccctggagcagctgctgaagttcatggtgcacccagccatcagcagcatcaacctgaccacagccctgggcagcctggccaacatcgcccggcagaggcccatgttcatgtctgaggtgatccaggcctatgagaccctgcacgccaacctgccccccaccctggccaagagccaggtgtcctctgtgaggaagaacctgaagctgcacctgctgtctgtgctgaagcacccagccagcctggagttccaggcccagatcaccaccctgctggtggacctgggcaccccccaggccgagatcgccaggaacatgcccagcagcaaggacaccaggaagaggcccagagatgacagcgacagcaccctgaagaagatgaagctggagcccaacctgggggaggatgatgaggacaaggacctggagcccggccccagcggcaccagcaaggccagcgcccagatcagcggccagagcgacacagacatcacagctgagttcctgcagcccctgctgaccccagacaacgtggccaacctggtgctgatctccatggtgtacctgcctgaggccatgcctgccagcttccaggccatctacacccctgtggagagcgctggaacagaggcccagatcaagcacctggcccggctgatggccacccagatgacagctgctggcctgggccctggggtggagcagaccaagcagtgcaaggaggagcccaaggaggagaaggtggtgaagacagagagcgtgctgatcaagaggcggctgagcgcccagggccaggccatctctgtggtgggcagcctgagctccatgagccccctggaggaggaggccccccaggccaagagaagacctgagcccatcatccctgtgacccagccccggctggccggggccggcggcaggaagaagatcttccggctgagtgatgtgctgaagcccctgacagatgcccaggtggaggccatgaagctgggcgctgtgaagaggatcctgcgggcagagaaggctgtggcctgcagcggggccgcccaggtgcgcatcaagatcctggccagcctggtgacccagttcaacagcggcctgaaggccgaggtgctgtccttcatcctggaggatgtgcgggcccggctggacctggcctttgcctggctgtaccaggagtacaatgcctacctggccgccggggccagcggcagcctggacaagtatgaggactgcctgatccggctgctgagcggcctgcaggagaagccagaccagaaggatggcatcttcaccaaggtggtgctggaggcccccctcatcacagaaagtgccctggaggtggtgaggaagtactgtgaagatgagagcaggacctacctgggcatgagcaccctgcgggacctgatcttcaagaggcccagccggcagttccagtacctgcacgtgctgctggacctgagcagccatgagaaggacaaggtgcgcagccaggccctgctcttcatcaagaggatgtatgagaaggagcagctgcgggagtatgtggagaagtttgccctgaactacctgcagctgctggtgcaccccaaccccccatctgtgctgtttggagctgacaaggacacagaggtggccgccccctggacagaggagaccgtgaagcagtgcctgtacctgtacctggccctgctgccccagaaccacaagctgatccacgagctggccgctgtgtacacagaggccatcgctgacatcaagaggacagtgctgcgggtgattgagcagcccatccggggcatgggcatgaacagccctgagctgctgctgctggtggagaactgccccaagggagctgagaccctggtgacccgctgcctgcacagcctgacagacaaggtgccccccagccctgagctggtgaagagggtgcgggacctgtaccacaagaggctgcctgatgtgcgcttcctgatccctgtgctgaatggcctggagaagaaggaggtgatccaggccctgcccaagctgatcaagctgaaccccatcgtggtgaaggaggtgttcaaccggctgctgggcacccagcacggggagggcaacagcgccctgagccccctgaaccctggagagctgctgattgccctgcacaacatcgacagcgtgaagtgtgacatgaagagcatcatcaaggccaccaacctgtgctttgctgagagaaatgtgtacaccagcgaggtgctggccgtggtgatgcagcagctgatggagcagagccccctgcccatgctgctgatgaggacagtcatccagagcctgaccatgtacccccggctgggcggctttgtgatgaacatcctgagccgcctcatcatgaagcaggtgtggaagtaccccaaggtgtgggagggcttcatcaagtgctgccagaggaccaagccccagagcttccaggtgatcctgcagctgcccccccagcagctgggcgctgtgtttgataaatgtcctgagctgcgggagcccctgctggcccacgtgcgctccttcaccccccaccagcaggcccacatccccaacagcatcatgaccatcctggaggccagcggcaagcaggagcctgaggccaaggaggccccagctggccccctggaggaggatgacctggagcccctgaccctggccccagccccagccccccggcccccccaggacctgattggcctgcggctggcccaggagaaggccctgaagaggcagctggaggaggagcagaagctgaagccaggaggagtgggcgcccccagcagcagcagccccagccccagccccagcgcccggcccggccccccaccttctgaggaggccatggacttccgggaggagggcccagaatgtgagaccccaggcatcttcatctccatggatgatgattctggcctgacagaggccgccctgctggacagcagcctggagggccccctgcccaaggagacagctgctgggggcctgaccctgaaggaggagaggagcccccagaccctggcccctgtgggggaggatgccatgaagacccccagccctgctgctgaagatgcccgggagcctgaggccaagggcaacagctag

SEQ ID NO: 320074 - DNA, 465 bp, Artificial Sequence
  derived and/or modified sequence
ctgacagctgccatggccagcggcagcggggacagcgtgaccaggagatctgtggccagccagttcttcacccaggaggagggccctggcattgatggcatgaccaccagcgagcgggtggtggacctgctgaaccaggccgccctgatcaccaatgacagcaagatcaccgtgctgaagcaggtgcaggagctgatcatcaacaaggaccccaccctgctggacaacttcctggatgagatcatcgccttccaggccgacaagagcattgaggtgaggaagtttgtgattggcttcatcgaggaggcctgcaagagggacatcgagctgctgctgaagctgattgccaacctgaacatgctgctgagagatgaaaatgtgaatgtggtgaagaaggccatcctgaccatgacccagctgcctgtgcctgtgcctgcctgccccccccggccccagctgccctag

SEQ ID NO: 320075 - DNA, 3825 bp, Artificial Sequence
  derived and/or modified sequence
atggccagcggcagcggcgacagcgtgacccggcggagcgtggcctcgcaattttttacccaggaggaagggcccggtattgatggcatgaccacaagtgagcgtgtagtggacttactcaaccaggccgccttgatcacaaacgatagcaagatcaccgttttgaagcaggtccaagagctgatcattaacaaggatccaacacttctggacaactttcttgatgaaatcattgccttccaagcagacaaatctattgaagttagaaagtttgtcatcggctttatcgaggaggcctgtaaaagggatattgagctccttctcaagctcatcgctaacttgaatatgttgctacgtgatgagaacgtaaacgtcgtcaagaaggccattctgacaatgacgcagctgtataaagtggccctgcagtggatggtcaaaagccgtgtgatctcagagttgcaggaagcatgctgggacatggtgtcagccatggccggggatattattctcctcctagatagtgacaacgatgggattcgtacccacgcaattaaattcgtggagggtctgattgtaaccctgtccccacggatggccgactcggaaatccctaggaggcaggaacacgacatctccctggacaggataccgcgcgaccacccatatatccaatacaatgtgctgtgggaggaaggaaaggctgcgctcgagcagcttctgaagtttatggtgcatcccgccataagttctatcaacctcaccacagctcttggttccttggcgaatattgcaagacagcgccctatgttcatgtccgaagtaatccaagcctacgagacacttcacgcgaatttgccgcccaccctggccaaatcccaggtgtcatccgtgcgcaaaaacctcaagctgcatttattatctgtgttaaagcatcccgctagccttgagttccaggctcaaatcaccaccttacttgtggatctagggactcctcaggcagaaatcgccaggaacatgccatccagtaaagatactagaaagaggccacgggatgattctgactcgacgctgaagaagatgaagctggagccgaatctgggtgaggacgacgaagacaaggacttggagccaggtccgtcagggacatccaaagcatctgcacagatttcaggtcagtcagatacagatatcacagccgagtttctgcagcccctcctgacaccagacaacgtagccaatctcgtcctgatctctatggtttacctgcccgaggccatgcctgccagctttcaggccatctatactcccgtagaatccgcaggcacagaggcgcagattaagcacctcgctcgcctcatggctacccagatgacagctgccggcctcgggcccggcgtcgagcagaccaagcagtgtaaggaggagcccaaagaagagaaggtcgtgaagactgaatcagtgctgattaagcgaaggcttagcgcacagggccaggcaatctcagtagtcggttcccttagttcaatgtcccccttggaagaggaggccccccaggccaagcggagaccagagcctattatccctgtcacacagcctcgcctggctggagcggggggccgcaagaaaatatttagattgagcgacgtgctgaagcctcttacagatgcccaggtggaggcaatgaagctgggcgccgtgaagagaatcctgcgggctgaaaaggcagtggcttgttcaggagccgcccaagtgaggatcaaaatccttgcaagcttggtaactcaattcaattccggactgaaggcagaggttttaagtttcattctcgaggatgtgagagcacgattggacctggcgttcgcttggctgtaccaggagtacaacgcctacctggccgccggcgcaagtgggtcattggacaaatatgaggactgtcttatcagactgttaagcggactgcaggaaaaaccagatcagaaggatggcatatttacaaaagtcgttctagaagcacccttaatcacagagtctgccttagaggtcgtccgaaaatactgcgaggacgaatctagaacgtacctagggatgtccaccctgcgcgacctgatttttaagcgccctagcagacagttccagtacctgcacgtactcctggatctttccagccacgagaaagacaaggtgagatctcaggcgctactcttcattaagaggatgtacgagaaggagcagttacgcgaatatgtcgagaaatttgcattgaactatctgcagctgctggttcatcccaatcctccaagcgtgctgtttggtgctgataaagacacggaagtggcagccccctggacggaggaaacagtaaaacagtgcttgtacctttatctggctctgcttccacagaaccacaagctgatccacgagctggccgcggtatataccgaggcaatcgccgacatcaagaggactgtcctaagagttatcgagcagccaattcgaggaatggggatgaacagtccagagctgctgctgctagtggagaactgtcccaaaggcgccgagacactggtcacacgctgcctgcactctttgacagataaggtgccaccttcacctgagctggtgaagagggtgagggatttgtaccacaaaaggctacccgacgtccggttcctcatcccagtgcttaatgggctcgaaaagaaggaggtcattcaggctctgcctaaactaatcaaactcaaccccattgttgtgaaggaagtctttaatcgtctactgggcactcaacatggtgaaggtaatagtgcacttagccctctaaacccaggagaactcctgatcgcgttacataatattgactctgtgaagtgcgatatgaagtccatcattaaggccacaaatctgtgcttcgccgaacgcaatgtttatacgagcgaagtgctggctgtggttatgcagcagctcatggaacaaagccctttaccgatgctgcttatgcgcaccgtgatacagtcacttacaatgtatcctcggctggggggttttgtgatgaatattctcagtcgactgatcatgaagcaagtatggaaatacccgaaggtatgggaggggtttattaaatgctgtcaaagaaccaaaccacaaagctttcaggtaattttgcaactcccaccccaacagctaggtgccgtatttgacaaatgccccgagctgcgagaaccacttctggcgcacgttagaagtttcaccccacaccagcaggcccacatccccaattctattatgacaatcttagaggcctcaggtaaacaggagccagaggcaaaggaggcacctgctggacccctcgaagaggatgacttagaacctcttactctagctcccgctccggcaccaagaccaccccaagatctcatcggactgagactggcacaggagaaggcattgaagagacagttggaggaggagcagaaactcaaacccgggggggtcggcgccccttcgagtagctcgccatctcctagcccttctgctaggccggggccacctccctccgaagaagcaatggactttagagaggaggggccggaatgcgaaactcccggaatcttcatcagcatggatgacgattctggcctgacagaggccgctctgcttgactcgtcactcgaagggcctctcccgaaggaaactgccgccgggggacttaccctgaaggaggaacgaagcccacagactctcgccccagtgggggaagacgcgatgaagacccccagcccagcagcagaggatgcccgagaaccggaagccaaaggaaactcctag

SEQ ID NO: 320076 - DNA, 465 bp, Artificial Sequence
  derived and/or modified sequence
ctgaccgccgccatggccagcggcagcggcgacagcgtgacccggaggtcggtcgccagccaattttttacccaggaggagggccccggaattgacggcatgactaccagtgaacgggtggttgacttgctaaatcaagctgccttgatcacaaatgattcaaagattacagtgctaaaacaggtacaggaactcattataaataaagatcctaccctgctagacaattttctggacgagattatcgcatttcaggcagataagtctattgaggttcgcaagttcgtaatcggcttcattgaggaagcgtgcaagagggatatcgaactgctcctgaagctgatcgcaaacctaaacatgctgctgcgcgatgaaaatgtgaatgtggtgaagaaggccatcctcacaatgacacaactgccagttcccgtgcccgcatgccccccccggccgcagctgccttag

SEQ ID NO: 320077 - DNA, 3825 bp, Artificial Sequence
  derived and/or modified sequence
atggcatctggaagtggagatagtgtaacccgtaggtctgtggcctcccagttcttcactcaggaggaggggccaggaatagatggtatgactactagtgagcgggtggtggacttattgaaccaagctgccctcattaccaacgactccaagatcacggtgcttaaacaagtccaagaactgattattaataaggaccccacattgctggacaattttttagacgagatcatcgcattccaggcggacaagtctatagaagtgaggaaatttgtcatcggctttattgaagaagcatgtaagagggatattgagctgctgctcaagcttattgccaacctcaatatgctgctaagagacgaaaatgttaatgtcgtcaagaaagctatattaacaatgacccagctgtacaaggtcgccctgcagtggatggttaaatcccgagtgatctcggagctgcaggaggcctgttgggacatggtgagtgcgatggccggtgacatcatcctgctccttgactcggataatgatggaatccgcacgcatgccatcaagtttgtggaaggattaatcgttaccctgagtccaagaatggcagacagcgagatcccccgaaggcaggaacacgatatctccctagacaggatacctcgagaccacccttacattcagtacaatgtgctgtgggaggagggcaaagccgcactggagcagctcttgaagttcatggtgcatcctgccatctcctcaatcaacctgaccacggcactggggtcgctggccaacattgctaggcagcgccctatgttcatgagtgaggtcattcaggcttatgagacactccacgcgaatcttcctcctactctggcaaaatctcaggtgtcatctgtgcgaaagaatttaaagctgcacttactatcggtgcttaagcatccagcctctctggagtttcaagcgcagattacgactttgctagttgacttaggcaccccccaggccgaaattgcccgaaatatgccatccagcaaggacacgagaaagcgaccgagagacgactctgactccaccctcaagaaaatgaaactcgagccaaacctcggcgaggacgatgaggacaaagatttggagccaggaccaagcggaacgagtaaggcttccgctcagattagcggtcagtccgacacagatattacagctgagttcctgcaacccctgctaacacccgacaacgttgccaatctggtactgattagtatggtctacctgcccgaggccatgcccgcttcattccaggccatttacactcccgtggaatctgcaggaaccgaagcgcagattaagcatctggcgaggcttatggcaacccagatgaccgccgctggcctcggacctggcgtagaacaaaccaagcagtgtaaggaggagccaaaggaggagaaagtggtgaaaacagagtcagtcctgatcaagcgcagactgagcgctcagggccaagccatctcagttgtggggtctttgagtagtatgtctccccttgaggaagaggctccacaggctaagcggaggcccgagccaattatcccagtcactcagcctcgcctggctggggcaggaggtagaaagaaaatatttcgcctgagtgatgtgcttaaacctctcacggatgcacaggtggaggcaatgaagctgggcgctgtgaagcgcattctgagggcagagaaagcggtggcctgcagcggcgcagcacaggtcaggattaaaatccttgcatccctggttactcaattcaattcaggcttgaaagccgaggtgctctctttcatcctcgaagatgttagggctcggctcgatctggcctttgcctggctgtaccaagaatacaacgcctatctggctgcaggggcatccggaagcctggacaagtacgaggactgcctcatccgcctgctgagcggcctgcaggagaaaccagatcagaaagatgggatcttcaccaaagtagtattagaggccccattgattacagagtccgcgctggaggtcgtccgcaagtattgcgaggatgagtctaggacctacctcggaatgtctactctgcgggacctcatctttaagaggccatccaggcagttccagtacctccacgtgcttctcgacctgtctagtcatgagaaagacaaggtgcgaagccaggctctcttattcattaaaaggatgtatgagaaggagcaactgagggaatatgttgagaagttcgctctgaactacttgcagctgcttgtgcaccctaacccaccttctgtcctattcggggcagataaggatacagaggtggccgctccgtggaccgaggaaactgtgaaacaatgcctatacttgtacctggcactgcttccacagaaccacaaattgatccacgagctggcggcagtgtacacagaggccatcgctgatatcaagcggaccgtgcttagagtcattgagcagccaattcgaggtatgggaatgaatagccctgagttgctcctcctggtggaaaactgtcctaaaggcgctgaaactctagtcactcgttgcttgcattctctcacagataaagttccaccctctcccgaactggtcaagcgggtgagggatctctatcataagcgcctccccgacgtccgctttttgatacccgttctaaacgggctggagaagaaggaggtcatccaggctcttcccaagttaatcaaacttaacccaatcgtggtgaaagaggtgttcaatagactgctggggactcaacacggcgagggtaacagcgcactttcccctctcaatcccggtgagctgttgatcgccttgcataacattgattcagtcaagtgcgacatgaaatccatcatcaaggctaccaatctttgcttcgccgagagaaatgtgtacacgtctgaggtgctcgctgttgtaatgcagcagctgatggaacagtcgcctctccctatgttgcttatgaggactgtgattcagtccctaacaatgtacccacggctcgggggttttgtcatgaatatcttgtctcgcctgattatgaagcaggtatggaagtaccccaaggtttgggaagggtttattaagtgctgtcagagaacgaaaccacagtctttccaggtaatcttacaactcccaccacaacagcttggcgctgtttttgataaatgtcccgagctgcgggaacctttactggcccacgtgagaagctttaccccccatcaacaggcccatatcccgaactccattatgactatcttggaggcctctggaaagcaggaacctgaggccaaggaggcccctgcgggacctttggaggaggacgacctggagccacttaccttggccccagcccctgcacccagacccccacaggatttgataggtcttaggctggctcaggaaaaggccctgaagcgtcagctggaggaggaacagaagctcaagccaggcggtgtcggggctccgtcaagcagctcaccgtcaccgagccccagtgctcgccctggtcccccaccgtcagaggaagctatggacttccgcgaggaggggcctgaatgcgaaacacccggaatttttatctcgatggacgacgattccgggttaacggaggctgccttacttgatagttctctggaaggccctctgcccaaagaaaccgctgctggaggcctgactctgaaagaggaacgttctcctcagacactggcccctgtgggtgaagacgccatgaagaccccgagccctgcagctgaggacgcacgtgaacctgaggctaaaggaaattcatag

SEQ ID NO: 320078 - DNA, 465 bp, Artificial Sequence
  derived and/or modified sequence
ctgacagccgctatggcctcaggcagcggtgacagtgtgacacggcgttctgtagccagccagttctttacccaagaggaggggccaggcattgatggcatgacaacttcagagagagtcgtggacctgttgaatcaggccgcattaataaccaatgactctaaaatcacagtcctgaaacaggtgcaggaactcattatcaataaagacccgaccctgctggataactttctggacgaaattatcgcattccaggcggataaatctattgaggtgaggaagtttgtgatcggcttcattgaggaggcatgcaaacgcgacatcgagttgctgctgaaactcattgcaaacctaaacatgctgctgagggacgagaacgttaacgtggtgaaaaaggctattttgacaatgacacagctccctgtgccagttcccgcttgcccacctcgccctcagctgccatag

SEQ ID NO: 320079 - DNA, 4195 bp, Artificial Sequence
  derived and/or modified sequence
ggaaatgaagggtctgctcgccgtagtatggaggcgggcagaatgccgctcgcacgggacgaggcatgggcggggtcgggctgtgctctggactccatttcccggcggccctgggtgtgtggcgcgtgcgcaccgttcccggcgacgaacggaagatggcggcggcggcggcggcggagtgtaggaagaggcactgctgagggggcgcgaggggaacggaggccagagctgcgctgacagcagccatggcgagcggcagtggagacagcgtcacccgtcggagcgtggcatcacagtttttcactcaagaggaggggccgggcatcgatggcatgaccacctcagagagggtggtggatcttctgaaccaggcggcgctgatcaccaatgactcaaagatcacagtgctcaaacaggtccaggagctgatcatcaacaaagaccccacactactggacaacttcctggatgagatcatcgcattccaagcagacaagtcaatcgaagtgcgaaaatttgtcatcggcttcatcgaggaggcatgcaagcgagacattgagttgctgctgaaactcattgcaaacctcaacatgctcttgagggacgagaatgtgaacgtggtgaagaaggctatcctcaccatgacccagctctacaaggtggccctgcagtggatggtaaagtcacgggtcattagcgagctacaggaggcctgctgggacatggtatctgccatggcgggggacatcatcctgctattggactctgacaatgacggcatccgcacccacgccatcaagtttgtggagggcctcattgtcaccctgtcaccccgcatggctgactcagagataccccgacgccaggagcatgatatcagcctggaccgcatccctcgtgaccacccctacatccagtacaacgtgctatgggaagagggcaaggcagccttggagcagctgcttaagttcatggtgcaccctgccatctcctccatcaacctgaccacagcgctgggctcccttgccaatatcgcccgccagagacccatgttcatgtctgaggtgatccaggcctatgaaactctgcatgccaacctgcccccgacgctggccaaatcgcaggtgagcagtgtgcgtaagaatctgaagctgcacctgttgagtgtgctgaagcacccggcttccttggagttccaggcccagatcaccaccctgctggtggacctgggcacacctcaggccgagatcgcccgcaacatgccgagcagcaaggacacccgcaagcggccccgcgatgactcggactccacactcaagaagatgaagctggagcccaacctgggggaggacgatgaggacaaagacttggagccaggcccgtcggggacctcgaaggcctcagcgcagatctccggccagtcagacacggacatcacagctgagttcctgcagcctctgctgacgcctgataatgtggctaatctggtcctcatcagcatggtgtacctacccgaggccatgccagcctccttccaggccatctacacccccgtggagtcagcaggcacggaagcccagatcaagcacctggctcggctcatggccacacagatgacagctgccggactgggaccaggtgtagagcagaccaaacagtgcaaggaggagcccaaggaggagaaggtggtgaagacagagagcgtcctgatcaagcggcgcctgtcagcccagggccaagccatctcggtggtgggttccctgagctccatgtcccccctggaggaagaggcaccgcaggccaagaggaggccagagcccattatccctgtcactcagccccggctggcaggcgctggtgggcgcaagaaaattttccgtctcagcgacgtgctgaagccccttaccgatgcccaggtggaagccatgaagctgggcgctgtgaagcggatcctgcgggctgagaaggctgtggcctgcagcggggcagcccaggtccgcataaagatcctggccagcctggtgacacagttcaactcgggcctgaaggcggaggtcctgtccttcatcctggaggatgtgcgggcccgcctggacctggccttcgcctggctctaccaggagtacaacgcctacctggccgcaggtgcctcgggctccctggacaagtatgaggactgcctcatccgcctgttgtctggcctgcaggagaaaccagaccagaaggatgggatcttcaccaaggttgtgctggaggcgccactcatcacagagagtgccctggaggtggtccgcaagtactgcgaggatgagagtcgcacctatctgggcatgtccacacttcgagacctgatcttcaagcgcccgtcccgccagttccagtacctgcatgtcctcctcgacctcagctcccatgagaaggacaaggtgcgctcccaggccctgctgttcatcaaacgcatgtatgagaaggagcagctgcgggagtatgtggagaaatttgccctcaactacctgcagctcctggtgcaccccaacccaccgtctgtgctgtttggagctgacaaggacacagaggtggcagcaccctggacggaggagacagtgaagcagtgtctgtacctctacctggccctcctgcctcagaaccacaagctgatccacgaactggcggccgtgtacactgaagccatcgccgacatcaagcggacggtgctgagggtcattgagcagccgatccgaggaatgggcatgaactccccggagctgctcctgctggtggaaaattgtcccaagggagcagagacactggtcacgagatgtctgcacagcctcacagacaaagtcccaccctccccagagctggtgaagcgggtccgggatctctaccacaagcgactgccagacgtccgcttcctcatcccggtgctcaatgggctggagaagaaagaggtgatccaggccctgcctaaactcatcaaactcaaccccatcgtggtgaaggaagtcttcaaccgcctgctgggcacccagcatggtgagggaaactcagccttgtccccgctgaaccctggagagctcctgatcgcattacacaacattgactccgtgaagtgcgacatgaaatccatcatcaaagccaccaacctgtgctttgcggagcggaacgtgtacacgtcagaggtgctggccgtggtgatgcagcagctgatggagcagagccccctgcccatgctgctcatgaggaccgtcatccagtccctgaccatgtacccccgcctggggggcttcgtcatgaacatcctgtcccgcctcatcatgaagcaggtgtggaagtaccccaaggtgtgggagggcttcatcaagtgctgccagcgcacaaagccccagagcttccaggtcatcctgcagctgccgccccagcagctgggagccgtctttgacaagtgcccagagctccgggagcccctgctggcccatgtccgctccttcaccccccaccagcaagctcacatccctaactccatcatgaccatcttggaggccagcggcaagcaggagccagaggccaaggaggcgcctgcggggcccttggaggaggatgatctggagcccctgaccttggccccggccccagcaccccggccccctcaggacctcatcggcctgcgactggcccaggagaaggccttaaagcggcagctggaggaggaacagaagctgaagccgggaggagtgggagccccctcctcttcctccccctctccctctccgtcggcccggccaggcccgcccccgtctgaggaagccatggatttccgggaggaggggcctgagtgcgagaccccgggcatcttcatcagcatggatgacgactcggggctgaccgaggccgcgctgttggactctagtctcgagggccccctacccaaggagacggcagcgggcgggctgaccttgaaggaggagcggagcccccagaccctcgcacctgttggagaagatgctatgaagactcccagcccggctgccgaggacgccagggaacccgaggccaaggggaacagctgacggggctcgagggggaaagggggtgggacagggactcggggctgggggacggggcggggcttgacctgcgggtgctttgccttaaaaagaaataaaagatgtgaacttgggcaagttactgaaaa

SEQ ID NO: 320080 - DNA, 2326 bp, Artificial Sequence
  derived and/or modified sequence
gacgaacggaagatggcggcggcggcggcggcggagtgtaggaagaggcactgctgagggggcgcgaggggaacggaggccagagctgcgctgacagcagccatggcgagcggcagtggagacagcgtcacccgtcggagcgtggcatcacagtttttcactcaagaggaggggccgggcatcgatggcatgaccacctcagagagggtggtggatcttctgaaccaggcggcgctgatcaccaatgactcaaagatcacagtgctcaaacaggtccaggagctgatcatcaacaaagaccccacactactggacaacttcctggatgagatcatcgcattccaagcagacaagtcaatcgaagtgcgaaaatttgtcatcggcttcatcgaggaggcatgcaagcgagacattgagttgctgctgaaactcattgcaaacctcaacatgctcttgagggacgagaatgtgaacgtggtgaagaaggctatcctcaccatgacccagctcccagttccagtacctgcatgtcctcctcgacctcagctcccatgagaaggacaaggtgcgctcccaggccctgctgttcatcaaacgcatgtatgagaaggagcagctgcgggagtatgtggagaaatttgccctcaactacctgcagctcctggtgcaccccaacccaccgtctgtgctgtttggagctgacaaggacacagaggtggcagcaccctggacggaggagacagtgaagcagtgtctgtacctctacctggccctcctgcctcagaaccacaagctgatccacgaactggcggccgtgtacactgaagccatcgccgacatcaagcggacggtgctgagggtcattgagcagccgatccgaggaatgggcatgaactccccggagctgctcctgctggtggaaaattgtcccaagggagcagagacactggtcacgagatgtctgcacagcctcacagacaaagtcccaccctccccagagctggtgaagcgggtccgggatctctaccacaagcgactgccagacgtccgcttcctcatcccggtgctcaatgggctggagaagaaagaggtgatccaggccctgcctaaactcatcaaactcaaccccatcgtggtgaaggaagtcttcaaccgcctgctgggcacccagcatggtgagggaaactcagccttgtccccgctgaaccctggagagctcctgatcgcattacacaacattgactccgtgaagtgcgacatgaaatccatcatcaaagccaccaacctgtgctttgcggagcggaacgtgtacacgtcagaggtgctggccgtggtgatgcagcagctgatggagcagagccccctgcccatgctgctcatgaggaccgtcatccagtccctgaccatgtacccccgcctggggggcttcgtcatgaacatcctgtcccgcctcatcatgaagcaggtgtggaagtaccccaaggtgtgggagggcttcatcaagtgctgccagcgcacaaagccccagagcttccaggtcatcctgcagctgccgccccagcagctgggagccgtctttgacaagtgcccagagctccgggagcccctgctggcccatgtccgctccttcaccccccaccagcaagctcacatccctaactccatcatgaccatcttggaggccagcggcaagcaggagccagaggccaaggaggcgcctgcggggcccttggaggaggatgatctggagcccctgaccttggccccggccccagcaccccggccccctcaggacctcatcggcctgcgactggcccaggagaaggccttaaagcggcagctggaggaggaacagaagctgaagccgggaggagtgggagccccctcctcttcctccccctctccctctccgtcggcccggccaggcccgcccccgtctgaggaagccatggatttccgggaggaggggcctgagtgcgagaccccgggcatcttcatcagcatggatgacgactcggggctgaccgaggccgcgctgttggactctagtctcgagggccccctacccaaggagacggcagcgggcgggctgaccttgaaggaggagcggagcccccagaccctcgcacctgttggagaagatgctatgaagactcccagcccggctgccgaggacgccagggaacccgaggccaaggggaacagctgacggggctcgagggggaaagggggtgggacagggactcggggctgggggacggggcggggcttgacctgcgggtgctttgccttaaaaagaaataaaagatgtgaacttgggcaagtt

SEQ ID NO: 320081 - protein, 219 aa, Artificial Sequence
  derived and/or modified sequence
MLRMRVPALLVLLFCFRGRAGPSPHFLQQPEDLVVLLGEGGAQASLGRRASASFSEQKNLMRIPGSSDGSSSRGPEEEETGSREDRGPIVHTDHSDLVLEEKGTLETKDPTNGYYKVRGVSVSLSLGEAPGGGLFLPPPSPLGPPGTPTFYDFNPHLGMVPPCRLYRARAGYLTTPHPRAFTSYIKPTSFGPPDLAPGTPPFPYAAFPTPSHPRLQTHV

SEQ ID NO: 320082 - DNA, 660 bp, Artificial Sequence
  derived and/or modified sequence
atgctcaggatgcgcgtgccagcccttctcgttcttctgttctgttttagagggagggcaggaccaagtccccattttctgcagcaaccagaggatttagttgtcctcctcggtgagggaggcgcgcaggccagtctcggtagaagagcctccgcttctttcagtgaacagaagaacttgatgagaattccggggtcaagcgacggctcgtcctctagaggcccagaggaagaagagacagggtctcgggaagatcgggggcccattgtccacactgatcacagcgacttggtcctggaagaaaaagggaccctagagaccaaggaccccaccaacggctattataaagtcaggggggtgtccgtgagccttagtctgggagaggcccctggaggtggccttttccttcctcctcccagtcctctgggccccccaggaacccctacattttacgattttaaccctcatctgggaatggtgcctccttgccgcctgtacagggcaagggccggttaccttactactccccatcctcgggctttcacctcctatatcaagcctacatcctttggaccccctgacctcgcacccggcactccccctttcccctatgccgccttccccacaccttcccaccctcgactgcaaactcacgtgtag

SEQ ID NO: 320083 - DNA, 872 bp, Artificial Sequence
  derived and/or modified sequence
cccagagacccaggccgcggaactggcaggcgtttcagagcgtcagaggctgcggatgagcagacttggaggactccaggccagagactaggctgggcgaagagtcgagcgtgaagggggctccgggccagggtgacaggaggcgtgcttgagaggaagaagttgacgggaaggccagtgcgacggcaaatctcgtgaaccttgggggacgaatgctcaggatgcgggtccccgccctcctcgtcctcctcttctgcttcagagggagagcaggcccgtcgccccatttcctgcaacagccagaggacctggtggtgctgctgggcgagggaggtgcccaggccagcctgggccgtagagcctcagcctctttctccgagcaaaagaacctgatgcgaatccctggcagcagcgacggctccagttcacgaggtcctgaagaagaggagacaggcagccgcgaggaccggggccccattgtgcacactgaccacagtgatctggttctggaggagaaagggactctggagaccaaggacccaaccaacggttactacaaggtccgaggagtcagtgtgagcctgagccttggcgaagcccctggaggaggtctcttcctgccaccaccctccccccttgggcccccagggacccctaccttctatgacttcaacccacacctgggcatggtccccccctgcagactttacagagccagggcaggctatctcaccacaccccaccctcgagctttcaccagctacatcaaacccacatcctttgggcccccagatctggcccccgggactccccccttcccatatgctgccttccccacacctagccacccgcgtctccagactcacgtgtga

SEQ ID NO: 320084 - DNA, 660 bp, Artificial Sequence
  derived and/or modified sequence
atgctgaggatgagggtgcctgccctgctggtgctgctcttctgcttccggggccgggccggccccagcccccacttcctgcagcagcctgaggacctggtggtgctgctgggggagggcggggcccaggccagcctgggccggcgggccagcgccagcttcagcgagcagaagaacctgatgagaattcctggcagcagtgatggcagcagcagccggggccctgaggaggaggagaccggcagccgggaggaccggggccccatcgtgcacacagaccacagcgacctggtgctggaggagaagggcaccctggagaccaaggaccccaccaacggctactacaaggtgcggggcgtgtctgtgtccctgagcctgggggaggcccctgggggcggcctcttcctgcccccacccagccccctgggccccccaggcacccccaccttctatgacttcaacccccacctgggcatggtgcccccctgccgcctgtaccgggcccgggccggctacctgaccaccccccacccccgggccttcaccagctacatcaagcccaccagctttggccccccagacctggcccctggcaccccacccttcccctatgctgccttccccacccccagccacccccggctgcagacccacgtgtag

SEQ ID NO: 320085 - DNA, 660 bp, Artificial Sequence
  derived and/or modified sequence
atgctgcggatgcgggtgcccgccctgctggtgctgctgttctgcttcaggggtcgcgccgggccctcaccacacttcttgcaacagccagaggacttggtagttttgctgggcgagggcggcgctcaggcgagcctgggtcgccgagcgagcgcgagctttagcgaacaaaaaaatctcatgcgcatccccggatctagcgatggatcctcctcacgtggccccgaagaggaggaaaccggctcaagggaggatcggggacctatagttcacactgatcacagcgacctggtcctggaggagaaaggaactctcgagactaaagacccaactaacgggtattacaaggtacgaggagtttcagtgtctctgagcctaggagaagcgccgggcggtgggctgttcctccccccccctagtcccctgggaccacctggcacacctactttttacgactttaatcctcatctgggcatggtgccaccatgcagactgtacagggctcgagctggatacctcacgaccccccacccaagggctttcactagttatatcaagcccacttcctttgggcctcccgatctagctcccggcacacccccctttccatacgccgcttttccgactccctcccacccaagactccagacccatgtttag

SEQ ID NO: 320086 - DNA, 660 bp, Artificial Sequence
  derived and/or modified sequence
atgctgcgaatgcgcgttcctgcattactggtgctcctgttctgcttccgaggtcgcgctggcccatccccccacttcctgcagcagcctgaggacctggtggtgctccttggagagggcggtgctcaggctagtctcggaaggagggctagcgccagctttagtgagcagaaaaatctaatgaggattccaggatctagcgacggctcctcaagccgaggacccgaggaggaggaaacgggttctcgagaggatcgcggacctattgtccatacagatcatagcgacttggtactggaagagaagggcactctcgagacaaaagaccccactaacggatattacaaggttcggggtgtgagcgtttctctctccctaggcgaggccccaggaggtggcctctttttgccccctcccagtcccctgggacccccaggaacaccaacattctacgacttcaaccctcaccttggcatggtgccaccttgccggctttaccgagctagggccggttacctgacgaccccgcatcctcgagctttcacatcttatatcaaaccaacatcctttggacccccagatctggctcccggaacacccccatttccctacgccgcattcccaaccccctcccatcctcgattgcagacacacgtgtag

SEQ ID NO: 320087 - DNA, 660 bp, Artificial Sequence
  derived and/or modified sequence
atgctgagaatgagagtgcccgccctgctggtgctgctgttctgcttcagaggcagagccggccccagcccccacttcctgcagcagcccgaggacctggtggtgctgctgggcgagggcggcgcccaggccagcctgggcagaagagccagcgccagcttcagcgagcagaagaacctgatgagaatccccggcagcagcgacggcagcagcagcagaggccccgaggaggaggagaccggcagcagagaggacagaggccccatcgtgcacaccgaccacagcgacctggtgctggaggagaagggcaccctggagaccaaggaccccaccaacggctactacaaggtgagaggcgtgagcgtgagcctgagcctgggcgaggcccccggcggcggcctgttcctgcccccccccagccccctgggcccccccggcacccccaccttctacgacttcaacccccacctgggcatggtgcccccctgcagactgtacagagccagagccggctacctgaccaccccccaccccagagccttcaccagctacatcaagcccaccagcttcggcccccccgacctggcccccggcaccccccccttcccctacgccgccttccccacccccagccaccccagactgcagacccacgtgtag

SEQ ID NO: 320088 - DNA, 4761 bp, Artificial Sequence
  derived and/or modified sequence
atgggcgatgtgaaagccttattgtttgtggccgctgcccgcgcccgacgactcggcggcgcagcggcctcagaaagccttgcagtatcggaggctttctgccgcgtccggtcatgccaacctaagaaatgcgccggaccccaacgctgcctaaacccggtcccggcagtgccctccccatctccaagcgtccgaaaaaggcaggtgtccctaaactggcaaccactcaccctgcaggaggctagagcactgcttaagcgcaggcggccaaggggaccagggggccggggtctgctccgcagacgcccgccacagagggcacctgccgggaaggcaccagtgctgtgccctcttatctgtcataacggaggagtatgcgtgaaacctgaccggtgtctgtgccccccagactttgctggaaagttttgtcaactgcactcaagtggcgcaagaccgcccgctcctgctgtgccggggttgacgcgcagcgtgtacaccatgcctctcgcaaaccaccgggacgacgagcacggagtggcctctatggtgtcggtccacgttgaacaccctcaagaggccagcgtggtggtgcatcaagtggagagggtgtccgggccgtgggaggaggctgatgcagaagcagtcgcaagggccgaagccgcagcaagggccgaggccgctgccccatataccgtcctggctcaaagcgcccctcgcgaagacgggtactcggacgcctctggttttgggtactgttttagagaactgagaggaggagagtgcgcgtctcctctgcccggcctcagaacacaggaagtgtgctgcaggggcgcggggttggcatggggcgtgcacgactgtcagttatgctcggagcgacttgggaattcagagcgagtctccgcccccgacggaccctgcccgaccggctttgaaagagtaaatggatcctgcgaggacgtcgacgagtgcgccaccgggggacgctgtcaacacggcgagtgcgccaataccaggggaggatatacatgcgtctgtccagatgggttcctgctggactcttccagatcgagctgcatttcccagcatgtgatttccgaagctaaggggccctgttttagagtccttagggatgggggctgctctctccccattcttcgtaacattacaaagcagatctgctgctgttccagagtaggcaaagcctggggaagaggttgtcaattatgtccccctttcggatctgaaggttttcgggagatctgtcccgctggtcccggttaccattatagcgcatctgaccttcggtacaacacgcgccctctgggccaggaaccacctcgggtatcactgtctcagcctagaacactccccgcaaccagtaggccgagtgccggctttctgcctacgcaccgtctggaaccgcgtcctgagccccgcccagatcctcgtccaggacccgaacttcccctgccttctatccccgcctggaccggtcctgagatccccgaatccggaccatcctctggcatgtgccagcggaaccctcaggtctgtgggcccggaaggtgtatctcacggccatccggctatacgtgcgcatgcgactcagggtttcgactcagcccccaaggcactaggtgcattgacgtggacgaatgtagacgagtaccacccccctgcgcccccggcagatgtgagaactcccctgggtcatttagatgtgtttgtgggcctggctttagggcaggcccaagggcagccgagtgcctggatgtggacgagtgtcaccgggtgccccctccgtgtgatctaggacggtgcgagaacaccccgggctcctttctctgtgtctgcccagccggttaccaggccgcaccacacggggcttcatgtcaggacgtggatgaatgcacacaaagtcctggcttatgcggacgtggagcctgtaaaaacctgccagggtcctttagatgtgtatgcccagcaggatttcgtgggtcagcctgcgaggaggacgtggacgagtgcgctcaggaaccccctccatgtggacccggacgatgtgacaacacagcaggctcctttcattgtgcatgtcccgcgggctttaggtccagaggccctggagcgccctgtcaggatgtggacgagtgtgctcggtccccccccccctgtacgtatggacgctgcgaaaacactgaaggctcttttcagtgtgtttgcccgatgggcttccaacccaacaccgctgggtcggaatgcgaagacgtggatgagtgtgaaaaccaccttgcctgtcccggccaggagtgcgtaaattccccagggagcttccagtgccgcacttgtccctctggccatcatctgcataggggacggtgtacagacgtcgatgaatgtagcagcggcgcccccccctgcgggccccacggacactgcactaacaccgaaggctccttccgttgttcttgtgcacccggctaccgggcgcctagcgggcgaccagggccatgtgccgacgtgaatgaatgtctagagggggacttctgctttccccacggcgagtgtttgaacacggacggctcctttgcttgcacatgtgcacccggctaccgcccaggcccccggggggcctcttgcctggatgttgacgagtgtagtgaggaggatctgtgtcaaagcgggatttgtaccaacaccgacgggtcatttgagtgtatttgcccgcccggacatcgggcgggcccagacctggcatcttgtctcgacgtggatgagtgcagagagcgaggccctgctctatgcggctcccagagatgcgaaaacagtcctggtagttacagatgcgttcgcgactgcgaccctggctatcacgccggcccggaggggacctgcgatgatgttgacgagtgccaggagtacggacctgagatctgtggcgcccagaggtgtgaaaacaccccaggtagctaccgttgcacccccgcctgcgaccccggctatcagcccacacctggtggcggctgccaagacgtagacgaatgcagaaaccgaagtttctgcggagctcacgctgtctgccaaaatctgccaggttcttttcagtgcctgtgcgaccaatatgaaggggccagggacggcagacactgtgtggacgttaatgaatgcgaaaccttacagggggtttgtggcgctgcgctatgcgagaacgtcgaggggtcgttcctgtgcgtgtgccctaactctccagaggaatttgacccaatgacgggacggtgtgtgcctcccagaacctccgccggtaccttccccggttctcaaccccaagccccagcgagcccagttctgccagctcgtcccccccctcctccgcttccacgccgcccttctacccccaggcagggcccagttggaagtggccggcgcgaatgttatttcgacactgctgcaccagatgcttgcgataacatacttgcacgcaatgtcacatggcaagagtgctgttgcaccgttggtgaggggtgggggtccggatgcagaatccaacaatgcccaggaaccgagactgctgagtaccagagcctgtgtccacacggaagaggatacctggcccccagtggagatctgtctctccgaagagacgtggatgagtgtcagctttttagggaccaggtgtgtaagtctggggtctgtgtcaacactgctccaggctacagttgctattgctcaaacggttactactatcacacacagagactagagtgcatcgataatgatgaatgcgctgacgaagagcctgcatgcgagggcggtcgatgcgtcaatactgtgggctcatatcactgcacttgtgagcccccgctggtgcttgatggatctcagagaaggtgcgtaagtaatgagtcccagagtttggacgataacttgggtgtctgctggcaggaggtcggtgccgacctcgtgtgttcacatccccgccttgatcgccaggcaacatatactgaatgctgctgtctctatggggaggcatggggaatggactgcgctctgtgccctgcacaagactcggacgacttcgaggcgctctgtaatgtgctgcgcccacctgcctacagtcctccccgtcctggcggatttggactgccatatgagtacgggccagatctagggcccccatatcagggcttaccctacgggcctgaattgtaccctccacctgcactcccttatgacccatatccacctcccccagggcccttcgcccggagggaagccccttacggagctccaaggttcgacatgcccgactttgaggacgatggcggcccttatggggaatccgaagctccggcaccgccaggtccagggactcggtggccatatcgctcgcgggataccaggagatctttcccggagcctgaagagccacccgagggaggctcctacgcggggagtctagccgaaccttatgaagagctggaagcagaggagtgcggaatcctcgacgggtgcactaatggaagatgcgtacgcgtgccagaaggctttacttgtcgttgcttcgacggttacaggttggacatgactcggatggcgtgcgtggacattaatgaatgcgacgaggcagaagccgcttcccctctatgtgttaatgcgagatgcctcaacaccgatggttcctttagatgtatctgcaggcccgggtttgcccccacccaccagccacatcattgtgctcctgcacgcccaagggcctag

SEQ ID NO: 320089 - DNA, 5031 bp, Artificial Sequence
  derived and/or modified sequence
atgggagacgtaaaagcgttgctgtttgtcgctgctgcccgggccagacgtctaggaggagccgctgcatccgagtccctggctgtctccgaagccttctgcagggtccgaagctgccagcccaaaaagtgtgcaggcccccagcggtgcctgaacccagtgcctgcagtgcccagtcccagccccagcgtgaggaagagacaggtgtccctcaactggcagccactgacgctccaggaggccagagctctactgaagcggcggcggccccgggggccagggggccggggactactgagaaggaggcccccacagcgtgcccccgctggcaaggccccggtcctgtgtcccttgatctgtcacaatggcggtgtgtgcgtgaagcctgaccgctgcctctgtcccccggacttcgctggcaagttctgccagttgcactcctcgggcgcccggcccccggccccggctgtaccaggcctcacccgctccgtgtacactatgccactggccaaccaccgcgacgacgagcacggcgtggcatctatggtgagcgtccacgtggagcacccgcaggaggcgtcggtggtggtgcaccaggtggagcgtgtgtctggcccttgggaggaggcggacgctgaggcggtggcgcgggcggaagcggcggcgcgggcggaggcggcagcgccctacacggtgttggcacagagcgcgccgcgggaggacggctactcagatgcctcgggcttcggttactgctttcgggagctgcgcggaggcgaatgcgcgtccccgctgcccgggctccggacgcaggaggtctgctgccgaggggccggcttggcctggggcgttcacgactgtcagctgtgctccgagcgcctggggaactccgaaagagtgagcgccccagatggaccttgtccaaccggctttgaaagagttaatgggtcctgcgaagatgtggatgagtgcgcgactggcgggcgctgccagcacggcgagtgtgcaaacacgcgcggcgggtacacgtgtgtgtgccccgacggctttctgctcgactcgtcccgcagcagctgcatctcccaacacgtgatctcagaggccaaagggccctgcttccgcgtgctccgcgacggcggctgttcgctgcccattctgcggaacatcactaaacagatctgctgctgcagccgcgtaggcaaggcctggggccggggctgccagctctgcccacccttcggctcagagggtttccgggagatctgcccggctggtcctggttaccactactcggcctccgacctccgctacaacaccagacccctgggccaggagccaccccgagtgtcactcagccagcctcgtaccctgccagccacctctcggccatctgcaggctttctgcccacccatcgcctggagccccggcctgaaccccggcccgatccccggcccggccctgagcttcccttgcccagcatccctgcctggactggtcctgagattcctgaatcaggtccctcctccggcatgtgtcagcgcaacccccaggtctgcggcccaggacgctgcatttcccggcccagcggctacacctgcgcttgcgactctggcttccggctcagcccccagggcacccgatgcattgatgtggacgaatgtcgccgcgtgcccccgccctgtgctcccgggcgctgcgagaactcaccaggcagcttccgctgcgtgtgcggcccgggcttccgagccggcccacgggctgcggaatgcctggatgtggacgagtgccaccgcgtgccgccgccgtgtgacctcgggcgctgcgagaacacgccaggcagcttcctgtgcgtgtgccccgccgggtaccaggctgcaccgcacggagccagctgccaggatgtggatgaatgcacccagagcccaggcctgtgtggccgaggggcctgcaagaacctgcctggctctttccgctgtgtttgcccggctggcttccggggctcggcgtgtgaagaggatgtggatgagtgtgcccaggagccgccgccctgtgggcccggccgctgtgacaacacggcaggctcctttcactgtgcctgccctgctggcttccgctcccgagggcccggggccccctgccaagatgtggatgagtgtgcccgaagccccccaccctgcacctacggccggtgtgagaacacagaaggcagcttccagtgtgtctgccccatgggcttccaacccaacactgctggctccgagtgcgaggatgtggatgagtgtgagaaccacctcgcatgccctgggcaggagtgtgtgaactcgcccggctccttccagtgcaggacctgtccttctggccaccacctgcaccgtggcagatgcactgatgtggacgaatgcagttcgggtgcccctccctgtggtccccacggccactgcactaacaccgaaggctccttccgctgcagctgcgcgccaggctaccgggcgccgtcgggtcggcccgggccctgcgcagacgtgaacgagtgcctggagggcgatttctgcttccctcacggcgagtgcctcaacactgacggctcctttgcctgtacttgtgcccctggctaccgacccggaccccgcggagcctcttgcctcgacgttgacgagtgcagcgaggaggacctttgccagagcggcatctgtaccaacaccgacggctccttcgagtgcatctgtcctccgggacaccgcgctggcccggacctcgcctcctgcctcgacgtggacgaatgtcgcgagcgaggcccagccctgtgcgggtcgcagcgctgtgagaactctcccggctcctaccgctgtgtccgggactgcgatcctgggtaccacgcgggccccgagggcacctgtgacgatgtggatgagtgccaagaatatggtcccgagatttgtggagcccagcgttgtgagaacacccctggctcctaccgctgcacaccagcctgtgaccctggctatcagcccacgccagggggcggatgccaggatgtggacgaatgccggaaccggtccttctgcggtgcccacgccgtgtgccagaacctgcccggctccttccagtgcctctgtgaccagtacgagggggcacgggatgggcgtcactgcgtggatgtgaacgagtgtgaaacactacagggtgtatgtggagctgccctgtgtgaaaatgtcgaaggctccttcctctgtgtctgccccaacagcccggaagagtttgaccccatgactggacgctgtgttcccccacgaacttctgctggcacgttcccaggctcgcagccccaggcacctgctagccccgttctgcccgccaggccacctccgccacccctgccccgccgacccagcacacctaggcagggccctgtggggagtgggcgccgggagtgctactttgacacagcggccccggatgcatgtgacaacatcctggctcggaatgtgacatggcaggagtgctgctgtactgtgggtgagggctggggcagcggctgccgcatccagcagtgcccgggcaccgagacagctgagtaccagtcattgtgccctcacggccggggctacctggcgcccagtggagacctgagcctccggagagacgtggacgaatgtcagctcttccgagaccaggtgtgcaagagtggcgtgtgtgtgaacacggccccgggctactcatgctattgcagcaacggctactactaccacacacagcggctggagtgcatcgacaatgacgagtgcgccgatgaggaaccggcctgtgagggcggccgctgtgtcaacactgtgggctcttatcactgtacctgcgagcccccactggtgctggatggctcgcagcgccgctgcgtctccaacgagagccagagcctcgatgacaatctgggagtgtgctggcaggaagtgggggctgacctcgtgtgcagccaccctcggctggaccgtcaggccacctacacagagtgctgctgcctgtatggagaggcctggggcatggactgcgccctctgccctgcgcaggactcagatgacttcgaggccctgtgcaatgtgctacgcccccccgcatatagccccccgcgaccaggtggctttggactcccctacgagtacggcccagacttaggtccaccttaccagggcctcccatatgggcctgagttgtacccaccacctgcgctaccctacgacccctacccaccgccacctgggcccttcgcccgccgggaggctccttatggggcaccccgcttcgacatgccagactttgaggacgatggtggcccctatggcgaatctgaggctcctgcgccacctggcccgggcacccgctggccctatcggtcccgggacacccgccgctccttcccagagcccgaggagcctcctgaaggtggaagctatgctggttccctggctgagccctacgaggagctggaggcggaggagtgcgggatcctggacggctgcaccaacggccgctgcgtgcgcgtccccgaaggcttcacctgccgttgcttcgacggctaccgcctggacatgacccgcatggcctgcgttgacatcaacgagtgtgatgaggccgaggctgcctccccgctgtgcgtcaacgcgcgttgcctcaacacggatggctccttccgctgcatctgccgcccgggattcgcacccacgcaccagccgcaccactgtgcgcccgcacggccccgggcctgagccctggcacccgctggccgcccacccgcgcccgccactcggggcccctgccgcgcatcctgcagcccgcttatgcgtatgtgcacggggccgcccgcctggacctggagaagggacctacggacgcctggaagctgcgacgccctgcactgctcccgcctccaccagcgcctcccactgatgtcgtggtcccgggcctggcccaggggcccctttacatgccctctcccttttataaaattttccattaaaaaccacctattttctatc

SEQ ID NO: 320090 - DNA, 4761 bp, Artificial Sequence
  derived and/or modified sequence
atgggagatgtgaaggccctgctgtttgtggccgccgcccgggcccggcggctgggcggggccgccgccagcgagagcctggccgtgtctgaggccttctgccgggtgcgcagctgccagcccaagaagtgtgccggcccccagcgctgcctgaaccctgtgcctgctgtgcccagccccagccccagcgtgaggaagaggcaggtgtccctgaactggcagcccctgaccctgcaggaggcccgggccctgctgaagagaagaagaccccggggccctgggggccggggcctgctgcggcggcggcccccccagagggccccagctgggaaggcccctgtgctgtgccccctcatctgccacaacggcggcgtgtgtgtgaagccagaccgctgcctgtgccccccagactttgctgggaagttctgccagctgcacagcagcggggcccggcccccagccccagctgtgcccggcctgaccaggtctgtgtacaccatgcccctggccaaccacagagatgatgaacatggagtggcctccatggtgtctgtgcacgtggagcacccccaggaggcctctgtggtggtgcaccaggtggagcgggtgtctggcccctgggaggaggctgatgctgaggccgtggcccgggcagaggccgccgcccgggcagaggccgccgccccctacacagtgctggcccagagcgccccccgggaggatggctacagtgatgccagcggcttcggctactgcttccgggagctgcggggcggggagtgtgccagccccctgcccggcctgcggacccaggaggtgtgctgccgcggggccggcctggcctggggcgtgcatgactgccagctgtgcagcgagcggctgggcaacagcgagcgggtgtctgccccagatggcccctgccccactggatttgagcgggtgaatggcagctgtgaagatgtggatgaatgtgccaccggcggccgctgccagcacggggagtgtgccaacacccggggcggctacacctgtgtgtgcccagatggcttcctgctggacagcagccgcagcagctgcatcagccagcacgtgatcagcgaggccaagggcccctgcttccgggtgctgagagatggcggctgcagcctgcccatcctgaggaacatcaccaagcagatctgctgctgcagccgggtgggcaaggcctggggccggggctgccagctgtgccccccatttggaagtgagggcttccgggagatctgcccagctggccctggctaccactacagcgccagtgacctgcgctacaacacccggcccctgggccaggagcccccccgggtgtccctgagccagcccaggaccctgcctgccaccagccggcccagcgctggcttcctgcccacccaccggctggagcccaggcctgagcccaggccagaccccaggcctggccctgagctgcccctgcccagcatcccagcctggacaggccctgagatccctgagagcggccccagcagcggcatgtgccagaggaacccccaggtgtgtggccctggccgctgcatcagccggcccagcggctacacctgtgcctgtgacagcggcttccggctgagcccccagggcacccgctgcattgatgtggatgaatgtagaagagtgcccccaccctgtgcccctggccgctgtgagaacagccctggcagcttccgctgtgtgtgtggccctggcttccgggccggccccagggctgctgaatgtctggatgtggatgagtgccaccgggtgcccccaccctgtgacctgggccgctgtgagaacaccccaggcagcttcctgtgtgtgtgcccagctggctaccaggccgccccccacggggccagctgccaggatgtggatgaatgtacccagagccctggcctgtgtggccgcggggcctgcaagaacctgcccggcagcttccgctgtgtgtgcccagctggcttccggggcagcgcctgtgaggaggatgtggatgaatgtgcccaggagcccccaccctgtggccctggccgctgtgacaacacagctggcagcttccactgtgcctgcccagctggcttccgcagccggggccctggggccccctgccaggatgtggatgaatgtgcccggagccccccaccctgcacctacggccgctgtgagaacacagagggcagcttccagtgtgtgtgccccatgggcttccagcccaacacagctggctctgaatgtgaagatgtggatgaatgtgagaaccacctggcctgccccggccaggagtgtgtgaacagccctggcagcttccagtgcaggacctgccccagcggccaccacctgcaccggggccgctgcacagatgtggatgagtgcagcagcggggccccaccctgtggcccccacggccactgcaccaacacagagggcagcttccgctgcagctgtgcccctggctaccgggcccccagcggccggcccggcccctgtgctgatgtgaatgaatgtctggagggggacttctgcttcccccacggggagtgcctgaacacagatggcagctttgcctgcacctgtgcccctggctaccggcccggccccaggggggccagctgcctggatgtggatgagtgcagcgaggaggacctgtgccagagcggcatctgcaccaacacagatggcagctttgagtgcatctgccccccaggccacagagctggccctgacctggccagctgcctggatgtggatgaatgtcgggagcggggccctgccctgtgtggcagccagagatgtgagaacagccctggcagctaccgctgtgtgcgggactgtgaccccggctaccacgccggccctgagggcacctgtgatgatgtggatgagtgccaggagtatggccctgagatctgtggggcccagagatgtgagaacaccccaggcagctaccgctgcaccccagcctgtgaccccggctaccagcccacccctgggggcggctgccaggatgtggatgaatgtagaaacagaagcttctgtggggcccatgctgtgtgccagaacctgcccggcagcttccagtgcctgtgtgaccagtatgagggcgccagagatggccgccactgtgtggatgtgaatgaatgtgagaccctgcagggcgtgtgtggggccgccctgtgtgaaaatgtggagggcagcttcctgtgtgtgtgccccaacagccctgaggagtttgaccccatgacaggccgctgtgtgccccccaggaccagcgctggcaccttccctggcagccagccccaggccccagccagccctgtgctgcctgcccggcccccacctccacccctgccccggcggcccagcaccccccggcagggccctgtgggcagcggccggcgggagtgctactttgacacagctgccccagatgcctgtgacaacatcctggccagaaatgtgacctggcaggagtgctgctgcaccgtgggggagggctggggcagcggctgccgcatccagcagtgccccggcacagaaacagctgagtaccagagcctgtgcccccacggccggggctacctggcccccagcggggacctgagcctgcggagagatgtggatgagtgccagctgttccgggaccaggtgtgcaagtctggagtgtgtgtgaacacagcccctggctacagctgctactgcagcaatggctactactaccacacccagaggctggagtgcatcgacaatgatgaatgtgctgatgaggagcccgcctgtgagggcggccgctgtgtgaacacagtgggcagctaccactgcacctgtgagccccccctggtgctggatggcagccagaggcgctgtgtgtccaatgaaagccagagcctggatgacaacctgggcgtgtgctggcaggaggtgggcgctgacctggtgtgcagccacccccggctggaccggcaggccacctacacagagtgctgctgcctgtatggagaggcctggggcatggactgtgccctgtgcccagcccaggacagtgatgactttgaggccctgtgcaatgtgctgcggcccccagcctacagcccccccaggcctgggggcttcggcctgccctatgaatatggccctgacctgggccccccctaccagggcctgccctacggccctgagctgtacccacctccagccctgccctatgacccctacccacctcctcctggcccctttgcccggcgggaggccccctacggggcccccaggtttgacatgccagactttgaagatgatggcggcccctatggagagagcgaggccccagcccctcctggccctggcacccgctggccctaccgcagccgggacacccggcgctccttccctgagcctgaggagcccccagagggcggcagctatgccggcagcctggccgagccctatgaggagctggaggccgaggagtgtggcatcctggatggctgcaccaacggccgctgtgtgcgggtgcctgagggcttcacctgccgctgctttgatggctaccgcctggacatgaccaggatggcctgtgtggacatcaatgaatgtgatgaagctgaggccgccagccccctgtgtgtgaatgcccgctgcctgaacacagatggcagcttccgctgcatctgccggcccggctttgcccccacccaccagccccaccactgtgccccagcccggccccgggcctag

SEQ ID NO: 320091 - DNA, 4761 bp, Artificial Sequence
  derived and/or modified sequence
atgggcgacgtgaaggccctgctgttcgtggccgccgcccgggccaggagactgggcggagctgctgcctctgagagcctggcagtgagcgaggctttctgcagagtgagatcctgccagcccaagaagtgcgctgggccacagaggtgtcttaatcccgttccagctgtcccaagcccaagtccgagtgtgcggaaacggcaggtgagtctcaactggcagcccttgacactgcaggaggcacgcgccctcctcaagagaagaagacccagaggacccggaggaaggggcctgctgagacgtcggccaccccagagagcaccggcagggaaggctcccgtgctgtgcccactcatctgtcataatggtggggtgtgtgttaaacctgaccgttgtctctgtccgccggatttcgcaggtaagttctgtcagttgcatagctccggggcccgcccacccgccccggccgttccaggcttgacccggtcagtgtacactatgccgctggcaaaccaccgagacgacgagcacggggtagccagtatggtctctgttcacgtggaacatccccaggaagctagcgtggttgtacaccaagtcgagcgcgtgtctggaccttgggaagaagccgacgctgaggcggtggctcgagccgaagctgccgcccgggccgaggcagccgcgccttacacagtcctggcgcagtcagctccacgtgaagacgggtattccgatgccagtggtttcgggtactgcttccgcgaattgcgcgggggagagtgcgcatcccccctaccaggtctgagaacccaagaagtatgctgcaggggggccggcctcgcttggggagttcacgactgtcagctctgttcagagcgcctgggaaattccgagagagtttctgcccccgacggtccctgccccaccggattcgagcgcgtgaatggaagttgtgaagacgttgacgaatgcgcgacgggcggacgttgtcagcatggggaatgcgcgaatactagaggaggctacacgtgcgtgtgtcctgacgggttcctgctggatagctctcgttcctcatgcatttctcagcacgtgatatctgaggccaaagggccctgctttagagtgctgagggatggcggatgctctttgcctatcctgagaaacatcacaaagcagatctgctgctgtagtagagtcggaaaggcatggggcagggggtgtcaactctgtcccccgtttgggtcagaaggcttccgagagatttgtcctgcagggccaggataccactattccgccagcgaccttcgatacaatacaaggcccttgggtcaggagcctccacgtgttagtttgagccagcctaggacgttgcctgccacttcaagaccaagcgcaggattccttcccacccaccgcttggaacctcgcccagagccaaggccggacccaagaccaggtcccgagctgccgctgcctagtatccctgcatggacaggcccagagatccctgagtcaggcccctcttccggcatgtgccaaaggaatccccaggtgtgcggcccggggagatgtatctcgcgtcctagcgggtacacctgcgcttgtgacagcggtttcaggctgtccccacaaggaactaggtgcatagatgttgacgaatgccgaagagtgcctcccccctgcgcacccggacgctgtgaaaattctcccggatcctttagatgtgtgtgcgggcccggcttcagggcagggccacgggctgccgaatgcttggacgtcgacgaatgccacagagtgccaccaccctgtgatctcggccgctgcgagaacacgcccggctctttcctgtgcgtgtgtccagctggataccaagctgccccccacggagccagctgccaagacgtcgatgaatgcactcagagcccaggcctttgtggaagaggagcctgcaagaatttaccagggtccttcagatgtgtctgccctgccggcttcaggggttccgcttgcgaagaagatgtagatgaatgcgctcaggagcctcctccatgtggacccgggcgctgtgacaacacagccggttcttttcattgtgcctgccccgcaggattccgaagtcgagggcctggcgccccatgtcaagatgtggacgagtgcgctcgctcccctccaccatgcacgtacggtagatgcgaaaataccgaagggagctttcagtgtgtgtgccccatgggattccaaccaaacaccgctgggagtgagtgcgaagacgtggatgagtgtgagaaccaccttgcctgtcctgggcaggagtgcgtgaactcccccggatcttttcagtgccgcacgtgcccctccgggcaccacctccacaggggcaggtgcaccgacgtggacgagtgctcatcaggcgcacccccgtgtggcccccatgggcattgcaccaacacagagggatccttcaggtgttcctgtgcccctgggtacagggcgccctccggacgccctgggccatgtgccgatgtgaacgaatgtctggaaggggacttttgttttccacatggggagtgtctgaacaccgatgggtccttcgcatgtacatgcgctcctggataccggccgggtcctcggggtgcttcatgtttggacgtcgatgagtgcagcgaggaggatctctgtcaatcaggcatctgtacgaatactgacggaagtttcgagtgcatttgccccccaggccatcgcgctggccctgacctcgcatcttgtctggacgtcgacgaatgcagagaacgaggacctgcgctctgtggatcccaaagatgtgagaactcacccggatcgtaccgatgtgtgcgagattgtgacccaggctaccacgccggtccagaaggtacttgcgacgatgtcgacgagtgccaggagtacggccctgagatatgcggtgctcagcgttgcgagaatacaccgggttcttatcgctgtaccccagcatgcgaccccggataccagccgacacctggcgggggatgccaggacgtcgacgaatgccgcaataggagtttttgcggcgctcatgcagtctgccagaacctccctggttcgttccagtgcttgtgtgaccagtatgaaggggcgcgagacggccgacattgtgtggacgtgaatgaatgtgagactttacaaggcgtttgtggggcggcactgtgcgagaacgttgaagggagttttctgtgcgtgtgtccgaatagcccggaagaattcgaccccatgaccggcaggtgcgtacccccccgaacatccgccggaacattccctggctcccaaccccaagccccagcgtcaccagtcctgccagctcggccccccccaccccccctgccgcggagaccctctaccccccggcaaggaccggtgggctctggcaggcgggagtgttactttgacaccgccgcccccgatgcctgcgataacattttagctcgaaacgtgacttggcaggaatgttgctgcaccgtcggagaaggttggggatcagggtgtaggatccagcagtgtcctggcacagaaactgctgagtatcaaagcctctgccctcatggacggggctatctagcaccgagcggcgacctgagcctgaggcgggacgtggacgagtgtcaactctttcgtgatcaggtatgcaaatcgggcgtgtgcgtaaacacagcaccaggatacagctgctactgctcgaacgggtattattatcatacgcaacgactagaatgcatagataacgacgaatgcgccgacgaggaaccagcctgtgaaggggggaggtgtgtgaacacggtgggatcctaccattgcacatgtgaacccccactggtcctcgacgggagtcagagacgttgtgttagtaacgagagtcagtctcttgatgataaccttggcgtgtgctggcaggaggtgggggcagatctggtttgttcccatccgcgcctcgatcgtcaagccacatatacggagtgctgttgtctatacggcgaggcctggggaatggattgcgccctgtgcccagctcaggattctgatgatttcgaggcactttgcaacgttctgcgaccccccgcctactcaccacctaggcctggcggctttggcctgccctacgaatacggaccggaccttggtcccccatatcaaggactcccctatggcccagaactttacccgcctcccgctctgccttatgacccgtatcctcctccacctgggccctttgcacgcagggaggctccatatggggccccccgctttgatatgcctgattttgaggatgacggaggaccatatggggagtctgaggcccccgcaccccctggccccgggaccaggtggccatatagaagccgggacaccagaagatctttccctgagccagaagagcccccagaaggtggttcttatgcaggctctttagcagaaccttatgaggaactggaggcagaggagtgcggcattttggacggctgcaccaatgggagatgcgttagggtgcctgaaggctttacgtgccgttgtttcgatggctacaggttagatatgacaaggatggcctgcgtagacatcaacgaatgcgacgaggccgaagccgccagcccgctgtgcgtgaacgctcgctgtcttaacacggatgggagcttccggtgcatctgccgcccagggttcgcccccacacatcagccccaccactgtgctccagcccgaccacgcgcttag

SEQ ID NO: 320092 - DNA, 4761 bp, Artificial Sequence
  derived and/or modified sequence
atgggcgacgtgaaggccctgttgtttgtcgcggcagctcgcgctcgccgattgggaggtgctgcggcttctgagtctctggccgtgtctgaggcattttgcagggttcgctcctgccagccaaaaaagtgcgcgggaccacagaggtgcctgaatcccgtgcccgcagtgccttccccttccccctccgtaaggaagcgtcaggtttccttgaactggcagcccttgacactgcaggaagcccgtgccctactaaagagaaggcggcctcgtgggccagggggaaggggactcttgagacggagaccacctcagagagcgcctgcaggaaaggcaccggtgctgtgcccactgatctgtcataacggtggtgtgtgcgttaaacccgatcgttgtctgtgccccccagacttcgctggaaaattctgccaactgcacagttctggagccaggcctcctgccccagcagtccctggcctcacacggagcgtgtacacaatgccactcgctaaccacagagacgatgagcacggggttgccagtatggtttccgtacacgtagaacaccctcaggaagcatccgtggtggtgcaccaggtcgagcgcgtgagtggaccctgggaagaggccgacgcagaagccgttgctcgcgctgaggccgctgcaagggcagaagccgctgccccttacacagtgttagcacagagtgcgcctcgcgaagatggatacagtgatgcgtccgggtttggttattgttttagggagcttagaggcggagaatgtgcgtccccgctccccggactacggactcaagaggtttgctgcagaggggcaggccttgcctggggggtgcatgattgtcagctctgttcagagcgactgggtaacagtgagcgcgtatcagccccagacgggccttgccccacaggtttcgaaagggttaatggctcctgtgaagatgttgatgaatgtgcgactggaggccgttgccaacatggtgagtgcgcaaatacccgagggggttacacatgtgtctgtccggacgggtttctgctggactcgtctcgatccagttgtatttctcagcatgtgatttctgaggcaaaaggtccttgttttagggttctccgagatggcggatgtagtctccccatactgcgcaatattactaaacagatctgttgctgtagccgcgtaggcaaagcctggggccgaggatgtcagctttgtccgcctttcggttcagaaggtttcagggagatttgtcctgccggtccaggctatcactatagcgcttcggatctgcggtataatacccgtccattgggacaggaaccaccacgagtctcactcagtcagccgcgaacattgcccgcaaccagtcgcccatccgctgggttcctcccgacacacaggctggagcctcggcctgagcctcggcctgatccccgtcccggaccagagctccctctgcctagtatcccagcatggacaggtcccgaaattcccgagtccgggccatcatccggcatgtgccaacgaaaccctcaagtgtgtggcccaggacggtgcattagtagaccctcaggatatacttgcgcctgcgacagtggattccgccttagcccacaggggacccggtgcatcgatgtcgacgagtgcaggagggtaccccctccgtgcgcacctggacgatgtgaaaattctcccggttcttttagatgcgtctgcggaccgggattccgggcaggtcccagggctgcagaatgtctcgacgtagacgagtgccacagggtaccccctccatgtgatttaggtagatgcgagaatacaccgggatccttcctgtgtgtgtgccctgccggttaccaggccgcaccccacggggcttcttgtcaggacgtcgacgagtgcacacaaagccccggtctctgcgggaggggagcctgtaaaaacctccccggatcattccgatgcgtgtgcccagcagggttcaggggatccgcttgcgaggaggacgtagatgagtgtgcccaggagccaccaccatgcggccctggccgatgcgacaatacagccggttccttccactgtgcctgtccagccggatttcgttcccggggaccaggcgcaccctgtcaggacgtggacgagtgtgctaggtctccaccgccttgtacgtacgggagatgcgagaacaccgaaggctctttccaatgtgtctgtcccatgggattccagcccaatacagctggctccgagtgtgaagacgtggacgaatgtgagaaccatctggcatgccccggtcaggagtgcgtcaactctcccggttccttccagtgtaggacctgccccagcggtcatcacttgcatagagggagatgcactgatgtggatgagtgctccagtggggcacccccatgtgggcctcatggccattgtacaaacacagaaggttcatttaggtgctcctgcgcgccaggatacagagccccttcagggcgacccggtccctgcgctgacgtgaatgagtgcctagagggcgacttctgtttcccacatggtgaatgcctcaataccgacggctcctttgcttgcacctgcgctcccggataccgtcctgggccaagaggtgcctcttgcctcgacgtggacgagtgctcagaagaggacctctgccagtccggcatttgcacaaataccgacggatcttttgaatgtatttgcccccctggccaccgtgccggacctgatctggccagctgcttagacgtagatgaatgtcgcgaacggggacctgcgctctgcgggtcccagcgatgcgagaacagcccgggatcttaccgttgcgtcagggactgtgatccaggataccacgcgggaccagaaggcacgtgtgacgatgtggacgagtgtcaggaatatggccctgagatttgcggcgctcagcgctgcgagaatacccctggatcctataggtgcactccagcttgtgatcccggataccagccgactcctggcggaggctgccaggatgtcgacgaatgccggaaccgcagtttctgtggcgctcacgccgtatgccagaacttgcccggatcttttcagtgtttgtgcgaccagtatgagggcgctcgcgacggaagacactgtgtcgacgtgaacgaatgcgaaactctccagggagtatgcggagcagccctgtgcgagaatgtggaaggatcattcttatgcgtgtgcccaaatagccctgaagagtttgacccaatgaccggtcgttgcgtgccacctcgcacatcggctggaactttccccggatctcagccacaggcgcctgccagcccagtgctgccggctagaccaccgcctcctccactgcccagacgtccctccacaccacgacagggcccagtgggatccggcaggcgagaatgctactttgataccgctgctcccgatgcatgcgacaacattctcgctcgcaacgttacctggcaagaatgttgctgcacagtgggtgaggggtggggcagtgggtgcagaattcagcagtgtcccggaaccgagacagccgaataccagagtctgtgtccccacggcagaggctacctggcaccttcaggagacctctccctgaggcgggatgtggacgagtgtcagctgtttcgagaccaggtgtgcaagtcaggtgtttgtgtgaacaccgcccctgggtacagctgctactgtagcaacggctattattaccacacccagagattggagtgcatcgacaatgacgagtgcgctgatgaggagccagcgtgtgaaggaggaaggtgtgttaatacagtgggaagttatcactgtacgtgtgagccacctttagtcctggacggcagccagagacgctgcgtaagcaacgaatcgcagagcctggatgacaatctgggtgtctgctggcaggaagtgggagccgatctggtttgctctcaccccaggcttgacaggcaggccacatacaccgaatgttgctgtctgtatggcgaggcttggggtatggactgcgcactttgtccggcacaggactctgacgactttgaggccttatgtaacgttctgagacccccagcctactctccgccaaggcctggaggttttggtctgccttatgagtacggccctgaccttgggcctccctatcagggactcccatatggtccggaattgtacccacctccagcgcttccatatgacccttatcctcccccacctgggccatttgcgaggcgcgaagctccctatggggctccacggtttgacatgcctgactttgaggatgatggaggaccctatggggaatctgaggcacctgcccctccaggccctggaacacgatggccttacaggagccgcgacacacgacgctctttcccagagcccgaggagccgcctgagggaggaagttacgctgggtctctcgccgaaccctatgaggaactggaggcggaggagtgcgggattttagacggttgtaccaatggtcgctgcgtgcgcgttcccgaaggattcacctgccggtgctttgatgggtatcggctggatatgactcggatggcctgtgtggatattaatgaatgcgacgaggcagaggccgcttctcccttatgtgtaaacgctcggtgtttaaacaccgacggttcttttcggtgcatctgtcggccaggctttgctcctacccaccagccccaccattgcgctccagcaagaccacgtgcgtag

SEQ ID NO: 320093 - DNA, 4761 bp, Artificial Sequence
  derived and/or modified sequence
atgggcgacgtgaaggccctgctgttcgtggccgccgccagagccagaagactgggcggcgccgccgccagcgagagcctggccgtgagcgaggccttctgcagagtgagaagctgccagcccaagaagtgcgccggcccccagagatgcctgaaccccgtgcccgccgtgcccagccccagccccagcgtgagaaagagacaggtgagcctgaactggcagcccctgaccctgcaggaggccagagccctgctgaagagaagaagacccagaggccccggcggcagaggcctgctgagaagaagacccccccagagagcccccgccggcaaggcccccgtgctgtgccccctgatctgccacaacggcggcgtgtgcgtgaagcccgacagatgcctgtgcccccccgacttcgccggcaagttctgccagctgcacagcagcggcgccagaccccccgcccccgccgtgcccggcctgaccagaagcgtgtacaccatgcccctggccaaccacagagacgacgagcacggcgtggccagcatggtgagcgtgcacgtggagcacccccaggaggccagcgtggtggtgcaccaggtggagagagtgagcggcccctgggaggaggccgacgccgaggccgtggccagagccgaggccgccgccagagccgaggccgccgccccctacaccgtgctggcccagagcgcccccagagaggacggctacagcgacgccagcggcttcggctactgcttcagagagctgagaggcggcgagtgcgccagccccctgcccggcctgagaacccaggaggtgtgctgcagaggcgccggcctggcctggggcgtgcacgactgccagctgtgcagcgagagactgggcaacagcgagagagtgagcgcccccgacggcccctgccccaccggcttcgagagagtgaacggcagctgcgaggacgtggacgagtgcgccaccggcggcagatgccagcacggcgagtgcgccaacaccagaggcggctacacctgcgtgtgccccgacggcttcctgctggacagcagcagaagcagctgcatcagccagcacgtgatcagcgaggccaagggcccctgcttcagagtgctgagagacggcggctgcagcctgcccatcctgagaaacatcaccaagcagatctgctgctgcagcagagtgggcaaggcctggggcagaggctgccagctgtgcccccccttcggcagcgagggcttcagagagatctgccccgccggccccggctaccactacagcgccagcgacctgagatacaacaccagacccctgggccaggagccccccagagtgagcctgagccagcccagaaccctgcccgccaccagcagacccagcgccggcttcctgcccacccacagactggagcccagacccgagcccagacccgaccccagacccggccccgagctgcccctgcccagcatccccgcctggaccggccccgagatccccgagagcggccccagcagcggcatgtgccagagaaacccccaggtgtgcggccccggcagatgcatcagcagacccagcggctacacctgcgcctgcgacagcggcttcagactgagcccccagggcaccagatgcatcgacgtggacgagtgcagaagagtgccccccccctgcgcccccggcagatgcgagaacagccccggcagcttcagatgcgtgtgcggccccggcttcagagccggccccagagccgccgagtgcctggacgtggacgagtgccacagagtgccccccccctgcgacctgggcagatgcgagaacacccccggcagcttcctgtgcgtgtgccccgccggctaccaggccgccccccacggcgccagctgccaggacgtggacgagtgcacccagagccccggcctgtgcggcagaggcgcctgcaagaacctgcccggcagcttcagatgcgtgtgccccgccggcttcagaggcagcgcctgcgaggaggacgtggacgagtgcgcccaggagccccccccctgcggccccggcagatgcgacaacaccgccggcagcttccactgcgcctgccccgccggcttcagaagcagaggccccggcgccccctgccaggacgtggacgagtgcgccagaagcccccccccctgcacctacggcagatgcgagaacaccgagggcagcttccagtgcgtgtgccccatgggcttccagcccaacaccgccggcagcgagtgcgaggacgtggacgagtgcgagaaccacctggcctgccccggccaggagtgcgtgaacagccccggcagcttccagtgcagaacctgccccagcggccaccacctgcacagaggcagatgcaccgacgtggacgagtgcagcagcggcgcccccccctgcggcccccacggccactgcaccaacaccgagggcagcttcagatgcagctgcgcccccggctacagagcccccagcggcagacccggcccctgcgccgacgtgaacgagtgcctggagggcgacttctgcttcccccacggcgagtgcctgaacaccgacggcagcttcgcctgcacctgcgcccccggctacagacccggccccagaggcgccagctgcctggacgtggacgagtgcagcgaggaggacctgtgccagagcggcatctgcaccaacaccgacggcagcttcgagtgcatctgcccccccggccacagagccggccccgacctggccagctgcctggacgtggacgagtgcagagagagaggccccgccctgtgcggcagccagagatgcgagaacagccccggcagctacagatgcgtgagagactgcgaccccggctaccacgccggccccgagggcacctgcgacgacgtggacgagtgccaggagtacggccccgagatctgcggcgcccagagatgcgagaacacccccggcagctacagatgcacccccgcctgcgaccccggctaccagcccacccccggcggcggctgccaggacgtggacgagtgcagaaacagaagcttctgcggcgcccacgccgtgtgccagaacctgcccggcagcttccagtgcctgtgcgaccagtacgagggcgccagagacggcagacactgcgtggacgtgaacgagtgcgagaccctgcagggcgtgtgcggcgccgccctgtgcgagaacgtggagggcagcttcctgtgcgtgtgccccaacagccccgaggagttcgaccccatgaccggcagatgcgtgccccccagaaccagcgccggcaccttccccggcagccagccccaggcccccgccagccccgtgctgcccgccagacccccccccccccccctgcccagaagacccagcacccccagacagggccccgtgggcagcggcagaagagagtgctacttcgacaccgccgcccccgacgcctgcgacaacatcctggccagaaacgtgacctggcaggagtgctgctgcaccgtgggcgagggctggggcagcggctgcagaatccagcagtgccccggcaccgagaccgccgagtaccagagcctgtgcccccacggcagaggctacctggcccccagcggcgacctgagcctgagaagagacgtggacgagtgccagctgttcagagaccaggtgtgcaagagcggcgtgtgcgtgaacaccgcccccggctacagctgctactgcagcaacggctactactaccacacccagagactggagtgcatcgacaacgacgagtgcgccgacgaggagcccgcctgcgagggcggcagatgcgtgaacaccgtgggcagctaccactgcacctgcgagccccccctggtgctggacggcagccagagaagatgcgtgagcaacgagagccagagcctggacgacaacctgggcgtgtgctggcaggaggtgggcgccgacctggtgtgcagccaccccagactggacagacaggccacctacaccgagtgctgctgcctgtacggcgaggcctggggcatggactgcgccctgtgccccgcccaggacagcgacgacttcgaggccctgtgcaacgtgctgagaccccccgcctacagcccccccagacccggcggcttcggcctgccctacgagtacggccccgacctgggccccccctaccagggcctgccctacggccccgagctgtaccccccccccgccctgccctacgacccctacccccccccccccggccccttcgccagaagagaggccccctacggcgcccccagattcgacatgcccgacttcgaggacgacggcggcccctacggcgagagcgaggcccccgccccccccggccccggcaccagatggccctacagaagcagagacaccagaagaagcttccccgagcccgaggagccccccgagggcggcagctacgccggcagcctggccgagccctacgaggagctggaggccgaggagtgcggcatcctggacggctgcaccaacggcagatgcgtgagagtgcccgagggcttcacctgcagatgcttcgacggctacagactggacatgaccagaatggcctgcgtggacatcaacgagtgcgacgaggccgaggccgccagccccctgtgcgtgaacgccagatgcctgaacaccgacggcagcttcagatgcatctgcagacccggcttcgcccccacccaccagccccaccactgcgcccccgccagacccagagcctag

SEQ ID NO: 320094 - protein, 899 aa, Artificial Sequence
  derived and/or modified sequence
MCQRNPQVCGPGRCISRPSGYTCACDSGFRLSPQGTRCIDVDECRRVPPPCAPGRCENSPGSFRCVCGPGFRAGPRAAECLDVDECHRVPPPCDLGRCENTPGSFLCVCPAGYQAAPHGASCQDVDECTQSPGLCGRGACKNLPGSFRCVCPAGFRGSACEEDVDECAQEPPPCGPGRCDNTAGSFHCACPAGFRSRGPGAPCQDVDECARSPPPCTYGRCENTEGSFQCVCPMGFQPNTAGSECEDVDECENHLACPGQECVNSPGSFQCRTCPSGHHLHRGRCTDVDECSSGAPPCGPHGHCTNTEGSFRCSCAPGYRAPSGRPGPCADVNECLEGDFCFPHGECLNTDGSFACTCAPGYRPGPRGASCLDVDECSEEDLCQSGICTNTDGSFECICPPGHRAGPDLASCLDVDECRERGPALCGSQRCENSPGSYRCVRDCDPGYHAGPEGTCDDVNECETLQGVCGAALCENVEGSFLCVCPNSPEEFDPMTGRCVPPRTSAGTFPGSQPQAPASPVLPARPPPPPLPRRPSTPRQGPVGSGRRECYFDTAAPDACDNILARNVTWQECCCTVGEGWGSGCRIQQCPGTETAEYQSLCPHGRGYLAPSGDLSLRRDVDECQLFRDQVCKSGVCVNTAPGYSCYCSNGYYYHTQRLECIDNDECADEEPACEGGRCVNTVGSYHCTCEPPLVLDGSQRRCVSNESQSLDDNLGVCWQEVGADLVCSHPRLDRQATYTECCCLYGEAWGMDCALCPAQDSDDFEALCNVLRPPAYSPPRPGGFGLPYEYGPDLGPPYQGLPYGPELYPPPALPYDPYPPPPGPFARREAPYGAPRFDMPDFEDDGGPYGESEAPAPPGPGTRWPYRSRDTRRSFPEPEEPPEGGSYAGSLAEPYEEL

SEQ ID NO: 320095 - DNA, 2700 bp, Artificial Sequence
  derived and/or modified sequence
atgtgccagaggaatccccaggtgtgtggtcccggtagatgcatttcccgacccagcggctacacatgtgcgtgtgactcaggattccgcctcagtccacaaggtacgcggtgcatcgatgtagacgagtgtagacgagttccccccccgtgcgctcccggacgatgtgaaaactcgcctggatccttccgatgcgtctgcgggccaggatttagggctggcccccgcgcagcggagtgtcttgatgttgatgagtgtcatagggttccgccgccgtgcgatctggggaggtgcgagaacacaccaggttcttttctctgtgtgtgcccagcagggtatcaagcagctccacacggagcctcgtgtcaggatgtcgacgaatgtacccagtcgccaggcctgtgcgggagaggagcttgtaaaaacctgcccggtagttttagatgcgtgtgtccagctggctttcgtgggtccgcgtgcgaggaagacgtggatgaatgcgcccaagaacctcctccctgcggacccggacgctgtgacaacacggcaggatccttccactgcgcctgtcctgccgggttcaggagcagggggcccggtgccccgtgtcaagatgtggacgaatgtgccagatctccccctccctgtacgtatggaaggtgcgagaataccgaaggttctttccagtgtgtgtgcccaatgggcttccaaccaaacacagccggaagcgagtgcgaagatgttgacgagtgtgaaaaccatttggcttgcccggggcaggaatgtgtcaattctcctgggtcctttcagtgtcgaacatgcccctctggccaccacctgcatcgagggcggtgtaccgacgtagatgaatgtagctcaggagcccctccatgcggtcctcatggtcactgtaccaacacggagggctctttcagatgctcttgcgctcctggctatcgcgctccaagtgggaggccgggcccctgtgccgacgtcaatgaatgcttagagggagacttttgcttcccccacggtgagtgtctcaataccgatggctctttcgcttgcacctgtgctcctggctacaggcctggcccaagaggcgctagttgtctggacgtagatgagtgctcagaagaggacctttgccagtcaggcatttgcaccaacactgatgggtccttcgagtgcatatgcccacctggccaccgtgcaggacccgatctggcatcttgtctggatgtagacgaatgcagagagagaggcccagcactgtgtggctcccagagatgcgagaactctccaggttcttaccgctgtgttagagattgcgacccagggtaccatgccggcccagaggggacatgcgacgatgttaacgaatgtgaaacgttgcagggcgtgtgtggcgccgctttatgcgaaaacgttgagggttctttcctctgtgtctgcccaaacagccctgaggagtttgatcccatgacagggcggtgtgtgccaccccggaccagtgccgggacttttcccggcagtcagccacaagcccccgcctctcctgttctgcctgcccgccctccaccgcctcctctgccgagacggccctccacgccacgccagggtcccgtgggaagtggccggcgggaatgttactttgacactgccgcccccgatgcttgtgacaacattctggcaagaaatgtgacttggcaggaatgttgctgtactgtcggggaagggtggggaagtggatgtcgaattcagcagtgcccaggaacagagacagcagagtatcagtcactctgcccgcacggaagggggtatttggcgccttccggggacctcagcttgaggcgtgacgtggatgagtgccagctgttccgggaccaggtctgtaagagcggcgtctgtgtgaacacggctccggggtactcctgttattgttcgaatgggtattactaccacacccagcggttagaatgcatcgataacgatgagtgcgctgacgaagaaccagcgtgcgagggagggcgctgcgtgaatacagttggctcctaccattgcacttgcgagccccccctggtcctggatggaagtcaacgccggtgcgtgagtaacgagagccagagccttgatgacaatctcggcgtttgctggcaggaggtgggggccgacctcgtttgcagccacccacggcttgaccgacaagccacatacacagagtgttgctgcttatacggcgaggcctgggggatggattgcgccctgtgccccgcgcaggactctgacgacttcgaggccctgtgtaatgtgttacggcctcctgcctattcccctccaagaccaggaggctttggactcccttatgaatatggccctgaccttggcccaccataccaggggttaccctatggaccagagctctacccaccccccgcccttccctacgatccctaccccccgcctcctggcccgtttgcgaggcgcgaggccccatacggagctccccgttttgacatgccagacttcgaggacgatggtggaccctatggcgagagtgaagcacccgcccctcctggacccggtacccgatggccctatcggtctagggacacccgcaggagctttcccgagccagaagaaccaccagagggtggctcttatgcaggaagcctggcagagccctacgaagaactgtag

SEQ ID NO: 320096 - DNA, 4776 bp, Artificial Sequence
  derived and/or modified sequence
atgggagacgtaaaagcgttgctgtttgtcgctgctgcccgggccagacgtctaggaggagccgctgcatccgagtccctggctgtctccgaagccttctgcagggtccgaagctgccagcccaaaaagtgtgcaggcccccagcggtgcctgaacccagtgcctgcagtgcccagtcccagccccagcgtgaggaagagacaggtgtccctcaactggcagccactgacgctccaggaggccagagctctactgaagcggcggcggccccgggggccagggggccggggactactgagaaggaggcccccacagcgtgcccccgctggcaaggccccggtcctgtgtcccttgatctgtcacaatggcggtgtgtgcgtgaagcctgaccgctgcctctgtcccccggacttcgctggcaagttctgccagttgcactcctcgggcgcccggcccccggccccggctgtaccaggcctcacccgctccgtgtacactatgccactggccaaccaccgcgacgacgagcacggcgtggcatctatggtgagcgtccacgtggagcacccgcaggaggcgtcggtggtggtgcaccaggtggagcgtgtgtctggcccttgggaggaggcggacgctgaggcggtggcgcgggcggaagcggcggcgcgggcggaggcggcagcgccctacacggtgttggcacagagcgcgccgcgggaggacggctactcagatgcctcgggcttcggttactgctttcgggagctgcgcggaggcgaatgcgcgtccccgctgcccgggctccggacgcaggaggtctgctgccgaggggccggcttggcctggggcgttcacgactgtcagctgtgctccgagcgcctggggaactccgaaagagtgagcgccccagatggaccttgtccaaccggctttgaaagagttaatgggtcctgcgaagatgtggatgagtgcgcgactggcgggcgctgccagcacggcgagtgtgcaaacacgcgcggcgggtacacgtgtgtgtgccccgacggctttctgctcgactcgtcccgcagcagctgcatctcccaacacgtgatctcagaggccaaagggccctgcttccgcgtgctccgcgacggcggctgttcgctgcccattctgcggaacatcactaaacagatctgctgctgcagccgcgtaggcaaggcctggggccggggctgccagctctgcccacccttcggctcagagggtttccgggagatctgcccggctggtcctggttaccactactcggcctccgacctccgctacaacaccagacccctgggccaggagccaccccgagtgtcactcagccagcctcgtaccctgccagccacctctcggccatctgcaggctttctgcccacccatcgcctggagccccggcctgaaccccggcccgatccccggcccggccctgagcttcccttgcccagcatccctgcctggactggtcctgagattcctgaatcaggtccctcctccggcatgtgtcagcgcaacccccaggtctgcggcccaggacgctgcatttcccggcccagcggctacacctgcgcttgcgactctggcttccggctcagcccccagggcacccgatgcattgatgtggacgaatgtcgccgcgtgcccccgccctgtgctcccgggcgctgcgagaactcaccaggcagcttccgctgcgtgtgcggcccgggcttccgagccggcccacgggctgcggaatgcctggatgtggacgagtgccaccgcgtgccgccgccgtgtgacctcgggcgctgcgagaacacgccaggcagcttcctgtgcgtgtgccccgccgggtaccaggctgcaccgcacggagccagctgccaggatgtggatgaatgcacccagagcccaggcctgtgtggccgaggggcctgcaagaacctgcctggctctttccgctgtgtttgcccggctggcttccggggctcggcgtgtgaagaggatgtggatgagtgtgcccaggagccgccgccctgtgggcccggccgctgtgacaacacggcaggctcctttcactgtgcctgccctgctggcttccgctcccgagggcccggggccccctgccaagatgtggatgagtgtgcccgaagccccccaccctgcacctacggccggtgtgagaacacagaaggcagcttccagtgtgtctgccccatgggcttccaacccaacactgctggctccgagtgcgaggatgtggatgagtgtgagaaccacctcgcatgccctgggcaggagtgtgtgaactcgcccggctccttccagtgcaggacctgtccttctggccaccacctgcaccgtggcagatgcactgatgtggacgaatgcagttcgggtgcccctccctgtggtccccacggccactgcactaacaccgaaggctccttccgctgcagctgcgcgccaggctaccgggcgccgtcgggtcggcccgggccctgcgcagacgtgaacgagtgcctggagggcgatttctgcttccctcacggcgagtgcctcaacactgacggctcctttgcctgtacttgtgcccctggctaccgacccggaccccgcggagcctcttgcctcgacgttgacgagtgcagcgaggaggacctttgccagagcggcatctgtaccaacaccgacggctccttcgagtgcatctgtcctccgggacaccgcgctggcccggacctcgcctcctgcctcgacgtggacgaatgtcgcgagcgaggcccagccctgtgcgggtcgcagcgctgtgagaactctcccggctcctaccgctgtgtccgggactgcgatcctgggtaccacgcgggccccgagggcacctgtgacgatgtgaacgagtgtgaaacactacagggtgtatgtggagctgccctgtgtgaaaatgtcgaaggctccttcctctgtgtctgccccaacagcccggaagagtttgaccccatgactggacgctgtgttcccccacgaacttctgctggcacgttcccaggctcgcagccccaggcacctgctagccccgttctgcccgccaggccacctccgccacccctgccccgccgacccagcacacctaggcagggccctgtggggagtgggcgccgggagtgctactttgacacagcggccccggatgcatgtgacaacatcctggctcggaatgtgacatggcaggagtgctgctgtactgtgggtgagggctggggcagcggctgccgcatccagcagtgcccgggcaccgagacagctgagtaccagtcattgtgccctcacggccggggctacctggcgcccagtggagacctgagcctccggagagacgtggacgaatgtcagctcttccgagaccaggtgtgcaagagtggcgtgtgtgtgaacacggccccgggctactcatgctattgcagcaacggctactactaccacacacagcggctggagtgcatcgacaatgacgagtgcgccgatgaggaaccggcctgtgagggcggccgctgtgtcaacactgtgggctcttatcactgtacctgcgagcccccactggtgctggatggctcgcagcgccgctgcgtctccaacgagagccagagcctcgatgacaatctgggagtgtgctggcaggaagtgggggctgacctcgtgtgcagccaccctcggctggaccgtcaggccacctacacagagtgctgctgcctgtatggagaggcctggggcatggactgcgccctctgccctgcgcaggactcagatgacttcgaggccctgtgcaatgtgctacgcccccccgcatatagccccccgcgaccaggtggctttggactcccctacgagtacggcccagacttaggtccaccttaccagggcctcccatatgggcctgagttgtacccaccacctgcgctaccctacgacccctacccaccgccacctgggcccttcgcccgccgggaggctccttatggggcaccccgcttcgacatgccagactttgaggacgatggtggcccctatggcgaatctgaggctcctgcgccacctggcccgggcacccgctggccctatcggtcccgggacacccgccgctccttcccagagcccgaggagcctcctgaaggtggaagctatgctggttccctggctgagccctacgaggagctggaggcggaggagtgcgggatcctggacggctgcaccaacggccgctgcgtgcgcgtccccgaaggcttcacctgccgttgcttcgacggctaccgcctggacatgacccgcatggcctgcgttgacatcaacgagtgtgatgaggccgaggctgcctccccgctgtgcgtcaacgcgcgttgcctcaacacggatggctccttccgctgcatctgccgcccgggattcgcacccacgcaccagccgcaccactgtgcgcccgcacggccccgggcctgagccctggcacccgctggccgcccacccgcgcccgccactcggggcccctgccgcgcatcctgcagcccgcttatgcgtatgtgcacggggccgcccgcctggacctggagaagggacctacggacgcctggaagctgcgacgccctgcactgctcccgcctccaccagcgcctcccactgatgtcgtggtcccgggcctggcccaggggcccctttacatgccctctcccttttataaaattttccattaaaaaccacctattttctatc

SEQ ID NO: 320097 - DNA, 2700 bp, Artificial Sequence
  derived and/or modified sequence
atgtgccagaggaacccccaggtgtgtggccctggccgctgcatcagccggcccagcggctacacctgtgcctgtgacagcggcttccggctgagcccccagggcacccgctgcattgatgtggatgaatgtagaagagtgcccccaccctgtgcccctggccgctgtgagaacagccctggcagcttccgctgtgtgtgtggccctggcttccgggccggccccagggctgctgaatgtctggatgtggatgagtgccaccgggtgcccccaccctgtgacctgggccgctgtgagaacaccccaggcagcttcctgtgtgtgtgcccagctggctaccaggccgccccccacggggccagctgccaggatgtggatgaatgtacccagagccctggcctgtgtggccgcggggcctgcaagaacctgcccggcagcttccgctgtgtgtgcccagctggcttccggggcagcgcctgtgaggaggatgtggatgaatgtgcccaggagcccccaccctgtggccctggccgctgtgacaacacagctggcagcttccactgtgcctgcccagctggcttccgcagccggggccctggggccccctgccaggatgtggatgaatgtgcccggagccccccaccctgcacctacggccgctgtgagaacacagagggcagcttccagtgtgtgtgccccatgggcttccagcccaacacagctggctctgaatgtgaagatgtggatgaatgtgagaaccacctggcctgccccggccaggagtgtgtgaacagccctggcagcttccagtgcaggacctgccccagcggccaccacctgcaccggggccgctgcacagatgtggatgagtgcagcagcggggccccaccctgtggcccccacggccactgcaccaacacagagggcagcttccgctgcagctgtgcccctggctaccgggcccccagcggccggcccggcccctgtgctgatgtgaatgaatgtctggagggggacttctgcttcccccacggggagtgcctgaacacagatggcagctttgcctgcacctgtgcccctggctaccggcccggccccaggggggccagctgcctggatgtggatgagtgcagcgaggaggacctgtgccagagcggcatctgcaccaacacagatggcagctttgagtgcatctgccccccaggccacagagctggccctgacctggccagctgcctggatgtggatgaatgtcgggagcggggccctgccctgtgtggcagccagagatgtgagaacagccctggcagctaccgctgtgtgcgggactgtgaccccggctaccacgccggccctgagggcacctgtgatgatgtgaatgaatgtgagaccctgcagggcgtgtgtggggccgccctgtgtgaaaatgtggagggcagcttcctgtgtgtgtgccccaacagccctgaggagtttgaccccatgacaggccgctgtgtgccccccaggaccagcgctggcaccttccctggcagccagccccaggccccagccagccctgtgctgcctgcccggcccccacctccacccctgccccggcggcccagcaccccccggcagggccctgtgggcagcggcagaagagagtgctactttgacacagctgccccagatgcctgtgacaacatcctggccagaaatgtgacctggcaggagtgctgctgcaccgtgggggagggctggggcagcggctgccgcatccagcagtgccctggaacagaaacagctgagtaccagagcctgtgcccccacggccggggctacctggcccccagcggggacctgagcctgcggagagatgtggatgagtgccagctgttccgggaccaggtgtgcaagagcggcgtgtgtgtgaacacagcccctggctacagctgctactgcagcaatggctactactaccacacccagaggctggagtgcatcgacaatgatgaatgtgctgatgaggagcccgcctgtgagggcggccgctgtgtgaacacagtgggcagctaccactgcacctgtgagccccccctggtgctggatggcagccagaggcgctgtgtgtccaatgaaagccagagcctggatgacaacctgggcgtgtgctggcaggaggtgggcgctgacctggtgtgcagccacccccggctggaccggcaggccacctacacagagtgctgctgcctgtatggagaggcctggggcatggactgtgccctgtgcccagcccaggacagtgatgactttgaggccctgtgcaatgtgctgcggcccccagcctacagcccccccaggcctgggggcttcggcctgccctatgaatatggccctgacctgggccccccctaccagggcctgccctacggccctgagctgtacccacctccagccctgccctatgacccctacccacctcctcctggcccctttgcccggcgggaggccccctatggagcccccaggtttgacatgccagactttgaagatgatggcggcccctacggggagagcgaggccccagcccctcctggccctggcacccgctggccctaccgcagccgggacaccaggaggagcttccctgagcctgaggagcccccagagggcggcagctatgccggcagcctggccgagccctatgaggagctgtag

SEQ ID NO: 320098 - DNA, 2700 bp, Artificial Sequence
  derived and/or modified sequence
atgtgccagcggaacccccaggtgtgcggccccggccggtgcatctcacggccttccggctacacttgcgcttgtgattcagggttccgtctgagtcctcagggcacccggtgtattgatgtagatgagtgtcgtcgggtgccccccccatgtgcacccggccggtgtgagaactcaccaggctcttttaggtgcgtgtgcggcccagggttccgtgctgggccccgggccgccgagtgcctggatgttgatgaatgccaccgagtgccacccccttgcgaccttggacggtgtgaaaacactcctgggagcttcctctgcgtttgtcctgctggctatcaagcagccccgcacggggctagttgccaggacgtggacgaatgcacccagagtccaggcctctgcggtaggggagcctgcaaaaacctgcctggatcttttagatgtgtgtgccctgcaggtttcagaggatcagcttgcgaggaagatgtggatgaatgtgcgcaagagccaccaccctgtggaccaggccgttgtgacaacactgcaggaagctttcactgtgcctgtccagctggttttcggagtagggggcccggtgccccctgccaggatgtagatgaatgcgctcgctcccctcctccatgcacttatggccgctgcgaaaataccgagggctctttccaatgcgtgtgccccatggggtttcagcctaatactgctgggagcgaatgtgaagacgtagatgagtgcgaaaatcatttagcctgccccgggcaggagtgcgtcaactcacccggatcatttcaatgccgaacttgcccatctgggcaccacctgcacaggggcaggtgcactgacgtggatgagtgttcatcaggcgctcccccctgtggccctcacggtcactgtaccaataccgaaggatcttttaggtgttcatgtgcacctggctatcgggctccaagtggtaggcctgggccttgtgcagatgtgaacgagtgcctggagggggacttctgcttcccacatggggaatgcctcaatacggacggcagttttgcatgcacatgcgcaccagggtaccggcctggtcctagaggtgcttcatgtctggacgttgatgaatgtagcgaggaggacctatgtcaatccggcatatgcacaaacaccgacgggtcctttgagtgtatatgcccaccaggtcaccgtgctggccccgatctcgctagttgtctcgatgtggatgaatgcagggagcgcggccccgcgttgtgtggatcccagcgctgcgagaattctccaggctcctaccgttgtgtgagagactgtgatcctgggtatcatgccgggcccgaaggcacatgcgatgacgtgaacgagtgcgaaacgctgcaaggggtttgcggagccgccctgtgcgaaaacgtggagggctcttttctgtgtgtctgccctaacagccccgaggagttcgaccccatgactgggaggtgcgtaccgccgcggacctccgctggaacatttccaggcagccaaccccaagcaccagcatccccagtgctgcccgcaaggccaccaccaccgccactgccaagaagaccatctacccctcggcaaggccctgtgggctctggacggcgtgagtgctattttgacaccgctgctcccgatgcctgcgacaatatccttgcccggaatgttacttggcaggagtgctgctgtaccgttggtgagggctgggggtccggctgcaggatacagcagtgtcctggtaccgaaaccgcggagtaccagtccctgtgcccccacggccgcggttacctcgctccctccggggacctaagcctgagacgggatgtggatgagtgccagctgttccgcgaccaagtgtgcaagagtggcgtgtgtgtcaataccgcacctggctactcatgctattgctctaatggttactactatcatacccagagacttgaatgcattgacaatgatgagtgcgcagatgaggagcctgcttgtgaaggtggtcggtgcgtaaataccgtaggctcatatcactgtacttgcgaacccccgctcgttctcgacggctcccaacgcagatgtgtcagcaacgaatctcagtctctggacgataaccttggcgtgtgctggcaggaggtgggcgccgatctcgtctgcagtcaccctcggctggacaggcaagcaacgtacactgaatgctgctgcctgtacggcgaggcttggggtatggactgcgcactttgtccggcccaagacagtgacgacttcgaagcgctgtgcaacgtccttcggccccccgcctatagtccgccacgccccggcggctttggcctaccctatgagtatgggcctgatttgggccccccataccagggattgccctacggccctgaactgtacccacctcctgcactgccttatgacccttaccctccccctccaggcccattcgccaggagggaggccccatacggtgcgccccggttcgatatgccagactttgaggacgacggcggaccttacggtgagtccgaagcccccgctcctcctgggcccggcaccagatggccatatcggtcacgggacacacgtaggagcttccccgagccagaggaaccgccagaggggggctcttacgccgggtccttagccgagccatatgaagaattgtag

SEQ ID NO: 320099 - DNA, 2700 bp, Artificial Sequence
  derived and/or modified sequence
atgtgccagcgcaatcctcaggtgtgtggacccggtaggtgcatcagccgcccatctggatatacttgtgcttgtgatagtggctttcgactgtcacctcagggaacacgctgcatcgacgtcgacgaatgccgcagagtccccccaccctgcgccccaggcaggtgcgaaaactcacctggaagctttaggtgtgtgtgcgggcctggtttccgcgctggacccagagcagcagaatgtctggacgtagatgagtgccatcgggtgcccccaccctgtgatcttgggaggtgtgaaaacactcccggttccttcctgtgtgtgtgtccagctggataccaggcagcacctcacggggcatcatgtcaggatgttgacgagtgtacgcagagcccaggtctttgcggacggggagcctgcaagaatcttcctggtagctttagatgcgtgtgccccgctgggtttagagggtccgcatgtgaggaggacgtggacgagtgcgcccaggagcctccaccttgtggtcccggacgttgtgacaacaccgccggttcgtttcactgcgcttgccctgcgggtttcagatccagaggtcccggagcgccatgccaggacgtagacgaatgcgctaggtctccgcctccgtgtacgtacggcaggtgtgagaacaccgagggaagtttccaatgcgtttgtccaatggggttccagccaaacactgcagggtctgagtgcgaggacgtggacgagtgcgagaaccacctcgcctgcccaggtcaggaatgtgtgaactcccctggctcctttcaatgcagaacctgcccctcagggcatcacttgcacaggggacgttgtaccgatgtcgacgagtgttcgtctggggctcctccatgcgggccacatgggcactgcacaaatacggagggaagcttcaggtgctcctgcgccccaggttaccgagccccaagtgggcgaccgggaccttgtgctgacgttaatgagtgcctggaaggcgatttctgtttcccccacggggaatgcctgaacacagatggatcgttcgcctgcacctgtgcacccggatatcggcctggccctcgcggagccagttgcctggacgttgatgagtgcagcgaggaagatctctgtcagtcgggaatctgtaccaacactgacggcagttttgaatgcatatgtcccccagggcaccgggctggccctgatctggcgagttgtcttgacgtggacgagtgccgagaacgagggcctgccttgtgtggatcccaaagatgtgagaattcaccaggaagttaccggtgcgtcagagattgcgacccaggctaccacgctggtccagaaggtacgtgtgatgacgttaatgagtgtgagacactgcagggcgtgtgcggcgctgcactgtgcgagaacgtggaaggatcatttctctgcgtgtgcccaaactctcctgaagagttcgacccgatgacagggaggtgcgtgcccccacgaacgtccgccggtactttccctggtagccaaccccaggcgcctgcctcccccgttctacctgcacggccaccccctccacccttaccaagacggccaagcactcctaggcagggccctgtcggaagtgggagacgagaatgctactttgacacagctgctcctgatgcatgcgataatatcctggccagaaatgtaacttggcaggagtgctgctgcacagttggagaagggtgggggtccggatgtagaattcaacagtgtccaggaaccgaaacagcagagtaccagagtctctgcccacacggccgaggatacctggctccaagcggtgatttgtcactgcgcagggatgtggacgagtgccaactctttagagaccaggtgtgtaaatccggtgtttgtgtgaacaccgcacctggttattcctgttactgctctaatggctactactaccatacacagcgcttagaatgtatagacaatgacgagtgcgctgatgaggaacccgcttgtgaggggggtcgctgtgtgaatacagtcggatcctaccactgcacctgcgagcctcctcttgtactcgatggatctcagaggcgctgtgtgagtaacgagtcccaatccctggacgacaatttgggagtatgctggcaagaggtcggcgctgatctcgtttgttcacatccgaggctggaccggcaggcgacttatactgagtgctgttgcctgtacggggaggcatggggtatggactgcgccctgtgccccgctcaggactccgacgatttcgaggccctgtgtaatgtgctgcggcctcctgcctactccccgcctcggcctggcggattcggcctgccttatgaatatggccctgatctgggcccaccttaccaggggcttccctacggaccagaactttaccctccacctgcattgccctatgacccttacccacctcctcctggcccttttgcgcgtcgagaagctccttacggcgctcctagattcgacatgcccgactttgaagacgacgggggaccttacggtgaaagcgaagccccagctccacccggaccaggtacgcggtggccctacagaagtcgggataccaggcgatcctttccagagcctgaggagccccctgagggtgggtcttatgcaggctcactggctgaaccttatgaagaactctag

SEQ ID NO: 320100 - DNA, 2700 bp, Artificial Sequence
  derived and/or modified sequence
atgtgccagagaaacccccaggtgtgcggccccggcagatgcatcagcagacccagcggctacacctgcgcctgcgacagcggcttcagactgagcccccagggcaccagatgcatcgacgtggacgagtgcagaagagtgccccccccctgcgcccccggcagatgcgagaacagccccggcagcttcagatgcgtgtgcggccccggcttcagagccggccccagagccgccgagtgcctggacgtggacgagtgccacagagtgccccccccctgcgacctgggcagatgcgagaacacccccggcagcttcctgtgcgtgtgccccgccggctaccaggccgccccccacggcgccagctgccaggacgtggacgagtgcacccagagccccggcctgtgcggcagaggcgcctgcaagaacctgcccggcagcttcagatgcgtgtgccccgccggcttcagaggcagcgcctgcgaggaggacgtggacgagtgcgcccaggagccccccccctgcggccccggcagatgcgacaacaccgccggcagcttccactgcgcctgccccgccggcttcagaagcagaggccccggcgccccctgccaggacgtggacgagtgcgccagaagcccccccccctgcacctacggcagatgcgagaacaccgagggcagcttccagtgcgtgtgccccatgggcttccagcccaacaccgccggcagcgagtgcgaggacgtggacgagtgcgagaaccacctggcctgccccggccaggagtgcgtgaacagccccggcagcttccagtgcagaacctgccccagcggccaccacctgcacagaggcagatgcaccgacgtggacgagtgcagcagcggcgcccccccctgcggcccccacggccactgcaccaacaccgagggcagcttcagatgcagctgcgcccccggctacagagcccccagcggcagacccggcccctgcgccgacgtgaacgagtgcctggagggcgacttctgcttcccccacggcgagtgcctgaacaccgacggcagcttcgcctgcacctgcgcccccggctacagacccggccccagaggcgccagctgcctggacgtggacgagtgcagcgaggaggacctgtgccagagcggcatctgcaccaacaccgacggcagcttcgagtgcatctgcccccccggccacagagccggccccgacctggccagctgcctggacgtggacgagtgcagagagagaggccccgccctgtgcggcagccagagatgcgagaacagccccggcagctacagatgcgtgagagactgcgaccccggctaccacgccggccccgagggcacctgcgacgacgtgaacgagtgcgagaccctgcagggcgtgtgcggcgccgccctgtgcgagaacgtggagggcagcttcctgtgcgtgtgccccaacagccccgaggagttcgaccccatgaccggcagatgcgtgccccccagaaccagcgccggcaccttccccggcagccagccccaggcccccgccagccccgtgctgcccgccagacccccccccccccccctgcccagaagacccagcacccccagacagggccccgtgggcagcggcagaagagagtgctacttcgacaccgccgcccccgacgcctgcgacaacatcctggccagaaacgtgacctggcaggagtgctgctgcaccgtgggcgagggctggggcagcggctgcagaatccagcagtgccccggcaccgagaccgccgagtaccagagcctgtgcccccacggcagaggctacctggcccccagcggcgacctgagcctgagaagagacgtggacgagtgccagctgttcagagaccaggtgtgcaagagcggcgtgtgcgtgaacaccgcccccggctacagctgctactgcagcaacggctactactaccacacccagagactggagtgcatcgacaacgacgagtgcgccgacgaggagcccgcctgcgagggcggcagatgcgtgaacaccgtgggcagctaccactgcacctgcgagccccccctggtgctggacggcagccagagaagatgcgtgagcaacgagagccagagcctggacgacaacctgggcgtgtgctggcaggaggtgggcgccgacctggtgtgcagccaccccagactggacagacaggccacctacaccgagtgctgctgcctgtacggcgaggcctggggcatggactgcgccctgtgccccgcccaggacagcgacgacttcgaggccctgtgcaacgtgctgagaccccccgcctacagcccccccagacccggcggcttcggcctgccctacgagtacggccccgacctgggccccccctaccagggcctgccctacggccccgagctgtaccccccccccgccctgccctacgacccctacccccccccccccggccccttcgccagaagagaggccccctacggcgcccccagattcgacatgcccgacttcgaggacgacggcggcccctacggcgagagcgaggcccccgccccccccggccccggcaccagatggccctacagaagcagagacaccagaagaagcttccccgagcccgaggagccccccgagggcggcagctacgccggcagcctggccgagccctacgaggagctgtag

SEQ ID NO: 320101 - protein, 186 aa, Artificial Sequence
  derived and/or modified sequence
MLGGAGGGPGLRTPCPADVDECSEEDLCQSGICTNTDGSFECICPPGHRAGPDLASCLDVDECRERGPALCGSQRCENSPGSYRCVRDCDPGYHAGPEGTCDDVDECRNRSFCGAHAVCQNLPGSFQCLCDQYEGARDGRHCVDVNECETLQGVCGAALCENVEGSFLCVCPNSPEEFDPMTGRCV

SEQ ID NO: 320102 - DNA, 561 bp, Artificial Sequence
  derived and/or modified sequence
atgttaggcggggcaggaggagggccaggccttaggacaccttgccccgccgacgtggatgaatgttccgaagaagacctctgccagagcggcatatgcacaaacacagacggaagcttcgagtgtatctgtcccccgggccaccgcgctggcccagatcttgccagttgcctggatgtcgatgaatgtcgcgagcggggtcctgccctgtgtggcagtcagcggtgtgagaactctcctggaagttacagatgtgtgcgagattgcgatccaggttaccacgccggacctgaaggcacctgcgatgatgttgacgaatgcaggaacagaagcttctgcggcgcacatgccgtatgccagaatcttcctggatccttccaatgtctatgcgatcagtacgagggagcaagggatggcagacattgcgttgatgtcaacgagtgcgagacccttcagggagtgtgtggggcggcattgtgcgagaacgtcgagggatcattcttgtgtgtgtgccctaacagccctgaagagtttgaccctatgaccggaaggtgtgtttag

SEQ ID NO: 320103 - DNA, 561 bp, Artificial Sequence
  derived and/or modified sequence
atgctgggcggggccggcggcggccctggcctgcggaccccctgcccagcagatgtggatgaatgttctgaggaggacctgtgccagagcggcatctgcaccaacacagatggcagctttgagtgcatctgccccccaggccaccgggccggccctgacctggccagctgcctggatgtggatgagtgccgggagcggggccctgccctgtgtggcagccagagatgtgagaacagccctggcagctaccgctgtgtgcgggactgtgaccccggctaccacgccggccctgagggcacctgtgatgatgtggatgagtgcaggaacagaagcttctgtggggcccatgctgtgtgccagaacctgcccggcagcttccagtgcctgtgtgaccagtatgaaggagccagagatggccgccactgtgtggatgtgaatgaatgtgagaccctgcagggcgtgtgtggggccgccctgtgtgaaaatgtggagggcagcttcctgtgtgtgtgccccaacagccctgaggagtttgaccccatgacaggccgctgtgtgtag

SEQ ID NO: 320104 - DNA, 561 bp, Artificial Sequence
  derived and/or modified sequence
atgctgggcggcgccggcggcggccccggcctgcggaccccctgccccgccgatgttgacgaatgtagcgaagaagatctgtgccaatcagggatctgtactaacacagacggaagcttcgaatgtatctgtcccccaggacaccgggccggacctgacctagcttcttgcctcgacgttgatgaatgccgggaacggggacctgccttgtgcggctcacagagatgcgaaaacagtcccgggtcttatagatgcgttcgggactgtgacccagggtaccatgccgggccggaaggcacatgtgatgatgttgacgagtgtaggaataggagcttctgcggcgcacacgctgtgtgccagaatcttcccgggagcttccagtgtctgtgcgaccagtacgaaggggcacgggatgggcgtcactgtgttgatgtgaatgagtgtgagacactgcagggtgtgtgtggagcagccctttgtgaaaacgtcgagggcagcttcctgtgtgtctgtcctaacagtcccgaggagtttgacccgatgaccggccggtgcgtttag

SEQ ID NO: 320105 - DNA, 561 bp, Artificial Sequence
  derived and/or modified sequence
atgttggggggagccggaggcggacctggacttcgaacaccttgtcctgccgatgtcgatgaatgttccgaggaggacctttgccaatcaggtatctgcaccaatactgatggtagcttcgagtgcatctgtccccctggtcacagggccggtcccgacctggctagctgcctggacgtggatgaatgtagagaaagaggaccggctctgtgcggcagccagcggtgcgagaactctcccggatcatatcggtgcgttcgcgattgtgatcctggttatcatgcagggccagaggggacttgcgatgacgtagatgagtgcaggaataggtcattctgtggggcacacgcggtctgtcagaacttgcccggatcctttcaatgcctgtgcgatcagtacgaaggggctcgagacggacgccattgtgtcgatgtgaatgaatgtgagaccctacagggagtgtgtggagctgccctctgcgaaaacgtggaagggtcttttttgtgtgtgtgccccaattctcccgaagagttcgatcctatgactggacggtgtgtgtag

SEQ ID NO: 320106 - DNA, 561 bp, Artificial Sequence
  derived and/or modified sequence
atgctgggcggcgccggcggcggccccggcctgagaaccccctgccccgccgacgtggacgagtgcagcgaggaggacctgtgccagagcggcatctgcaccaacaccgacggcagcttcgagtgcatctgcccccccggccacagagccggccccgacctggccagctgcctggacgtggacgagtgcagagagagaggccccgccctgtgcggcagccagagatgcgagaacagccccggcagctacagatgcgtgagagactgcgaccccggctaccacgccggccccgagggcacctgcgacgacgtggacgagtgcagaaacagaagcttctgcggcgcccacgccgtgtgccagaacctgcccggcagcttccagtgcctgtgcgaccagtacgagggcgccagagacggcagacactgcgtggacgtgaacgagtgcgagaccctgcagggcgtgtgcggcgccgccctgtgcgagaacgtggagggcagcttcctgtgcgtgtgccccaacagccccgaggagttcgaccccatgaccggcagatgcgtgtag

SEQ ID NO: 320107 - protein, 384 aa, Artificial Sequence
  derived and/or modified sequence
MTGRCVPPRTSADVDECQLFRDQVCKSGVCVNTAPGYSCYCSNGYYYHTQRLECIDNDECADEEPACEGGRCVNTVGSYHCTCEPPLVLDGSQRRCVSNESQSLDDNLGVCWQEVGADLVCSHPRLDRQATYTECCCLYGEAWGMDCALCPAQDSDDFEALCNVLRPPAYSPPRPGGFGLPYEYGPDLGPPYQGLPYGPELYPPPALPYDPYPPPPGPFARREAPYGAPRFDMPDFEDDGGPYGESEAPAPPGPGTRWPYRSRDTRRSFPEPEEPPEGGSYAGSLAEPYEELEAEECGILDGCTNGRCVRVPEGFTCRCFDGYRLDMTRMACVDINECDEAEAASPLCVNARCLNTDGSFRCICRPGFAPTHQPHHCAPARPRA

SEQ ID NO: 320108 - DNA, 1155 bp, Artificial Sequence
  derived and/or modified sequence
atgactgggaggtgcgtgcctccgcggacatccgccgacgtggatgaatgtcaactgttcagagaccaggtgtgtaagtctggggtttgtgtgaataccgcacctggctatagctgttactgcagcaacggctattattaccatacacaacgccttgaatgcatcgacaacgacgaatgcgctgatgaggaacctgcttgcgagggtggacgttgcgttaacaccgttggatcctatcattgcacctgcgagcctccactggtgttggatggttcacagcggcgatgcgtgagcaatgagtctcagagtttggacgacaatctcggagtctgctggcaggaggtcggagctgatctggtttgcagtcacccacgcctcgaccgacaggcgacgtatacagagtgctgctgcctctatggggaggcatgggggatggattgcgccctgtgtcccgcgcaagacagcgatgacttcgaggccctctgcaacgtgctgcgtccccccgcttattcacccccaaggcctggggggttcgggctcccatacgagtatggccccgacttaggcccgccataccagggcctgccctatgggccagaactgtatcctcccccagccttgccatacgacccctatccaccacctccaggaccgttcgctagacgagaggccccatacggggcaccgcgttttgacatgccagatttcgaagacgacggaggcccatatggagaaagcgaggctccagcccctccagggcctggcaccaggtggccttaccggtcaagggacacgaggcgttcattccctgaaccagaggagccaccagaaggggggtcatacgccgggagtcttgccgagccctatgaggaacttgaggctgaagaatgtggtattcttgacgggtgtactaatggtcgctgcgttagagtgcccgaggggttcacttgccggtgctttgatggatataggctggacatgacaaggatggcctgcgtagatatcaacgaatgtgacgaggcggaggcagccagtcccctgtgcgtgaacgcccgatgcctcaatacggatggcagcttcaggtgtatctgcagaccggggttcgcacctacccatcagcctcatcattgcgcccctgctagacctcgcgcgtag

SEQ ID NO: 320109 - DNA, 1700 bp, Artificial Sequence
  derived and/or modified sequence
gtctttcctcctccgcttctcccctccccttacctctttcccccgcctcctctcctagcctccccaactctcctctaccccaatcttctcctgccctctcctctgcttccccggcctcccccttctgactctcctctcccctctttgtatcccccatcttgcctccctgcttcccacatccgaccacccgacctctctcctcagacgtggacgaatgtcgcgagcgaggcccagccctgtgcgggtcgcagcgctgtgagaactctcccggctcctaccgctgtgtccgggactgcgatcctgggtaccacgcgggccccgagggcacctgtgacgatgtgaacgagtgtgaaacactacagggtgtatgtggagctgccctgtgtgaaaatgtcgaaggctccttcctctgtgtctgccccaacagcccggaagagtttgaccccatgactggacgctgtgttcccccacgaacttctgctgacgtggacgaatgtcagctcttccgagaccaggtgtgcaagagtggcgtgtgtgtgaacacggccccgggctactcatgctattgcagcaacggctactactaccacacacagcggctggagtgcatcgacaatgacgagtgcgccgatgaggaaccggcctgtgagggcggccgctgtgtcaacactgtgggctcttatcactgtacctgcgagcccccactggtgctggatggctcgcagcgccgctgcgtctccaacgagagccagagcctcgatgacaatctgggagtgtgctggcaggaagtgggggctgacctcgtgtgcagccaccctcggctggaccgtcaggccacctacacagagtgctgctgcctgtatggagaggcctggggcatggactgcgccctctgccctgcgcaggactcagatgacttcgaggccctgtgcaatgtgctacgcccccccgcatatagccccccgcgaccaggtggctttggactcccctacgagtacggcccagacttaggtccaccttaccagggcctcccatatgggcctgagttgtacccaccacctgcgctaccctacgacccctacccaccgccacctgggcccttcgcccgccgggaggctccttatggggcaccccgcttcgacatgccagactttgaggacgatggtggcccctatggcgaatctgaggctcctgcgccacctggcccgggcacccgctggccctatcggtcccgggacacccgccgctccttcccagagcccgaggagcctcctgaaggtggaagctatgctggttccctggctgagccctacgaggagctggaggcggaggagtgcgggatcctggacggctgcaccaacggccgctgcgtgcgcgtccccgaaggcttcacctgccgttgcttcgacggctaccgcctggacatgacccgcatggcctgcgttgacatcaacgagtgtgatgaggccgaggctgcctccccgctgtgcgtcaacgcgcgttgcctcaacacggatggctccttccgctgcatctgccgcccgggattcgcacccacgcaccagccgcaccactgtgcgcccgcacggccccgggcctgagccctggcacccgctggccgcccacccgcgcccgccactcggggcccctgccgcgcatcctgcagcccgcttatgcgtatgtgcacggggccgcccgcc

SEQ ID NO: 320110 - DNA, 1155 bp, Artificial Sequence
  derived and/or modified sequence
atgacaggccgctgtgtgccccccaggaccagcgcagatgtggatgagtgccagctgttccgggaccaggtgtgcaagtctggagtgtgtgtgaacacagcccctggctacagctgctactgcagcaatggctactactaccacacccagaggctggagtgcatcgacaatgatgaatgtgctgatgaggagcccgcctgtgagggcggccgctgtgtgaacacagtgggcagctaccactgcacctgtgagccccccctggtgctggatggcagccagaggcgctgtgtgtccaatgaaagccagagcctggatgacaacctgggcgtgtgctggcaggaggtgggcgctgacctggtgtgcagccacccccggctggaccggcaggccacctacacagagtgctgctgcctgtatggagaggcctggggcatggactgtgccctgtgcccagcccaggacagtgatgactttgaggccctgtgcaatgtgctgcggcccccagcctacagcccccccaggcctgggggcttcggcctgccctatgaatatggccctgacctgggccccccctaccagggcctgccctacggccctgagctgtacccacctccagccctgccctatgacccctacccacctcctcctggcccctttgcccggcgggaggccccctacggggcccccaggtttgacatgccagactttgaagatgatggcggcccctatggagagagcgaggccccagcccctcctggccctggcacccgctggccctaccgcagccgggacacccggcgctccttccctgagcctgaggagcccccagagggcggcagctatgccggcagcctggccgagccctatgaggagctggaggccgaggagtgtggcatcctggatggctgcaccaacggccgctgtgtgcgggtgcctgagggcttcacctgccgctgctttgatggctaccgcctggacatgaccaggatggcctgtgtggacatcaatgaatgtgatgaagctgaggccgccagccccctgtgtgtgaatgcccgctgcctgaacacagatggcagcttccgctgcatctgccggcccggctttgcccccacccaccagccccaccactgtgccccagcccggccccgggcctag

SEQ ID NO: 320111 - DNA, 1155 bp, Artificial Sequence
  derived and/or modified sequence
atgaccggccggtgcgtgcccccccggaccagcgccgacgtggacgagtgccagcttttccgcgaccaggtgtgtaagagtggtgtgtgtgtgaatacggctcccggatatagctgctactgtagcaatggctattactatcacactcaacgcttggaatgcatcgataacgacgagtgcgccgatgaggaacctgcctgtgaaggcggacgttgcgtgaacactgttggctcgtaccattgtacttgtgagcctccattggtcctagacggcagccagaggaggtgcgtgagcaatgaaagccagtcactcgacgataatctcggcgtgtgctggcaggaggtcggcgcggatctcgtatgctcccatccccggctcgataggcaggccacttataccgagtgttgttgtctgtacggggaggcctgggggatggattgtgcactctgccccgcccaggactcggatgactttgaagctctgtgcaacgtgcttcggccccccgcttattcccctccacgccccggcggcttcggcctgccttacgaatacggcccggatctgggtcctccctaccagggcctcccttacggccccgagctgtatccccctcccgccctgccttacgacccctatcctccccctcccggtccgtttgccaggagggaggcgccttacggagccccaaggttcgatatgcccgatttcgaagacgatggaggaccttacggtgagtctgaggcgccagccccacccggacccggaacaagatggccttatagatcccgggacacccgcaggtcttttccggaacccgaagagccaccagaaggagggagctatgccggttccctcgctgaaccctacgaggaactcgaagctgaggagtgcggcatcctggatggttgcaccaacggtcggtgtgtgcgcgtgccagagggattcacctgtcgttgtttcgacggttaccgcctggatatgactaggatggcttgtgtggatatcaacgaatgtgacgaggccgaagctgctagccctctctgcgttaacgctcgatgcctcaacacggatggcagtttcaggtgcatttgtcgaccaggctttgctccaactcatcagccccatcattgcgcccctgccagaccgcgcgcctag

SEQ ID NO: 320112 - DNA, 1155 bp, Artificial Sequence
  derived and/or modified sequence
atgacgggaaggtgtgtgccaccaagaacgtcggcagatgtcgatgagtgccagctgttccgagaccaggtgtgtaagagtggggtctgcgtgaatacggctccgggatatagttgctactgtagtaacggatactattatcacacacagcggctggagtgtattgacaacgatgagtgcgccgatgaagaacccgcatgtgagggtggacggtgcgtgaacactgtggggagctatcactgtacctgtgagcccccacttgttctcgatggcagtcagcgaaggtgtgtttctaatgagtcccagagcctcgacgacaacttgggagtatgttggcaggaggtcggcgctgatttggtttgctcacaccccagactcgacagacaagcgacatatacagagtgctgttgtctttacggcgaagcctggggtatggattgtgcgctgtgccccgctcaagacagtgacgattttgaggccctttgcaatgtcctcagacctccggcttacagcccccctcgtccagggggattcggcctgccgtatgagtatggtccagatttgggccctccttaccaaggtctcccctatggcccagagctgtatcccccaccagccctcccctacgacccatacccccctccaccgggaccattcgccagacgggaggctccttatggcgcaccccgtttcgatatgcctgatttcgaagatgacggcggaccgtacggcgaatcagaagcgcctgccccacccggtcccggaaccaggtggccatatcggagtcgagacaccaggaggtctttccctgaaccagaagagccccctgaagggggttcttacgccggatctctggcggagccgtatgaggagctggaggccgaggaatgcgggattctggacggttgtaccaatgggaggtgtgtgcgcgtgcctgaagggtttacatgccggtgcttcgatgggtaccggctggacatgacgcggatggcctgcgtagatatcaacgaatgcgacgaagctgaagctgcatcccccctgtgcgtaaacgccagatgtttaaatacggacgggtcattcaggtgcatctgtaggccaggattcgccccaacacaccaaccacaccactgcgctccagctaggccacgggcatag

SEQ ID NO: 320113 - DNA, 1155 bp, Artificial Sequence
  derived and/or modified sequence
atgaccggcagatgcgtgccccccagaaccagcgccgacgtggacgagtgccagctgttcagagaccaggtgtgcaagagcggcgtgtgcgtgaacaccgcccccggctacagctgctactgcagcaacggctactactaccacacccagagactggagtgcatcgacaacgacgagtgcgccgacgaggagcccgcctgcgagggcggcagatgcgtgaacaccgtgggcagctaccactgcacctgcgagccccccctggtgctggacggcagccagagaagatgcgtgagcaacgagagccagagcctggacgacaacctgggcgtgtgctggcaggaggtgggcgccgacctggtgtgcagccaccccagactggacagacaggccacctacaccgagtgctgctgcctgtacggcgaggcctggggcatggactgcgccctgtgccccgcccaggacagcgacgacttcgaggccctgtgcaacgtgctgagaccccccgcctacagcccccccagacccggcggcttcggcctgccctacgagtacggccccgacctgggccccccctaccagggcctgccctacggccccgagctgtaccccccccccgccctgccctacgacccctacccccccccccccggccccttcgccagaagagaggccccctacggcgcccccagattcgacatgcccgacttcgaggacgacggcggcccctacggcgagagcgaggcccccgccccccccggccccggcaccagatggccctacagaagcagagacaccagaagaagcttccccgagcccgaggagccccccgagggcggcagctacgccggcagcctggccgagccctacgaggagctggaggccgaggagtgcggcatcctggacggctgcaccaacggcagatgcgtgagagtgcccgagggcttcacctgcagatgcttcgacggctacagactggacatgaccagaatggcctgcgtggacatcaacgagtgcgacgaggccgaggccgccagccccctgtgcgtgaacgccagatgcctgaacaccgacggcagcttcagatgcatctgcagacccggcttcgcccccacccaccagccccaccactgcgcccccgccagacccagagcctag

SEQ ID NO: 320114 - DNA, 639 bp, Artificial Sequence
  derived and/or modified sequence
atgtggaccagcgccaccgcctgtagacggcgcgtgaccagtggcgcggcccggactcggcaggccgcgtcttgtgcgtgtgcaccacctggaacccgtcttcatagaacggagcccgccgcaagaatgtggatgagcgttccagaggctccacacccagcaccaaccgccggggtcaggacgcaaaaggccgcctcatcggtttctgcaccctgggcctccaaccctactttgctcgcaccgaatgtggacgaatgtgagaaccatttagcttgtcctggccaggaatgtgtgaacagcccaggctccttccaatgtcggacttgtccaagtgggcaccacttacaccggggcagatgcacagatgtggacgaatgttcctctggtgcacctccatgtgggccccacggccactgcacaaatacagagggctcctttaggtgttcttgcgctcctgggtacagagcaccctccgggaggcccggcccttgcgccgacgtgaatgagtgtctggagggagacttttgtttcccacacggtgaatgtctcaacacagacggatcatttgcatgcacctgcgccccaggctaccggcccggaccacgaggggcttcctgcctggggtcttacccgggatag

SEQ ID NO: 320115 - DNA, 2569 bp, Artificial Sequence
  derived and/or modified sequence
agaagagggcgaaaaggggaaaacgagtttttagccggggtattccagcaggatcagggggcagctggtgggagtctcgaggcagtgagggggggcggggcgtggagatgaaagggccgagtctgggtatttggaccgtgattgtaaagaagctgttctaaacccgtcggggggcggtgtttgcagggagggaagtagcgtgaggcaggttggggaaggcgtgagaggcctaggagagccgaggggcggtggaggggtgtggcctagaatgttaggcggagcgggaggtgggccgggccttcggacgccctgtcccgcagacgttgacgagtgcagcgaggaggacctttgccagagcggcatctgtaccaacaccgacggctccttcgagtgcatctgtcctccgggacaccgcgctggcccggacctcgcctcctgcctcgacgtggacgaatgtcgcgagcgaggcccagccctgtgcgggtcgcagcgctgtgagaactctcccggctcctaccgctgtgtccgggactgcgatcctgggtaccacgcgggccccgagggcacctgtgacgatgtggacgaatgccggaaccggtccttctgcggtgcccacgccgtgtgccagaacctgcccggctccttccagtgcctctgtgaccagtacgagggggcacgggatgggcgtcactgcgtggatgtgaacgagtgtgaaacactacagggtgtatgtggagctgccctgtgtgaaaatgtcgaaggctccttcctctgtgtctgccccaacagcccggaagagtttgaccccatgactggacgctgtgttcccccacgaacttctgctggcacgttcccaggctcgcagccccaggcacctgctagccccgttctgcccgccaggccacctccgccacccctgccccgccgacccagcacacctaggcagggccctgtggggagtgggcgccgggagtgctactttgacacagcggccccggatgcatgtgacaacatcctggctcggaatgtgacatggcaggagtgctgctgtactgtgggtgagggctggggcagcggctgccgcatccagcagtgcccgggcaccgagacagctgagtaccagtcattgtgccctcacggccggggctacctggcgcccagtggagacctgagcctccggagagacgtggacgaatgtcagctcttccgagaccaggtgtgcaagagtggcgtgtgtgtgaacacggccccgggctactcatgctattgcagcaacggctactactaccacacacagcggctggagtgcatcgacaatgacgagtgcgccgatgaggaaccggcctgtgagggcggccgctgtgtcaacactgtgggctcttatcactgtacctgcgagcccccactggtgctggatggctcgcagcgccgctgcgtctccaacgagagccagagcctcgatgacaatctgggagtgtgctggcaggaagtgggggctgacctcgtgtgcagccaccctcggctggaccgtcaggccacctacacagagtgctgctgcctgtatggagaggcctggggcatggactgcgccctctgccctgcgcaggactcagatgacttcgaggccctgtgcaatgtgctacgcccccccgcatatagccccccgcgaccaggtggctttggactcccctacgagtacggcccagacttaggtccaccttaccagggcctcccatatgggcctgagttgtacccaccacctgcgctaccctacgacccctacccaccgccacctgggcccttcgcccgccgggaggctccttatggggcaccccgcttcgacatgccagactttgaggacgatggtggcccctatggcgaatctgaggctcctgcgccacctggcccgggcacccgctggccctatcggtcccgggacacccgccgctccttcccagagcccgaggagcctcctgaaggtggaagctatgctggttccctggctgagccctacgaggagctggaggcggaggagtgcgggatcctggacggctgcaccaacggccgctgcgtgcgcgtccccgaaggcttcacctgccgttgcttcgacggctaccgcctggacatgacccgcatggcctgcgttgacatcaacgagtgtgatgaggccgaggctgcctccccgctgtgcgtcaacgcgcgttgcctcaacacggatggctccttccgctgcatctgccgcccgggattcgcacccacgcaccagccgcaccactgtgcgcccgcacggccccgggcctgagccctggcacccgctggccgcccacccgcgcccgccactcggggcccctgccgcgcatcctgcagcccgcttatgcgtatgtgcacggggccgcccgcctggacctggagaagggacctacggacgcctggaagctgcgacgccctgcactgctcccgcctccaccagcgcctcccactgatgtcgtggtcccgggcctggcccaggggcccctttacatgccctctcccttttataaaattttccattaaaaaccacctattttct

SEQ ID NO: 320116 - DNA, 1285 bp, Artificial Sequence
  derived and/or modified sequence
aactccctcccccaggccccgccactgtcctgcaactgcggcaaccaatctcctgaccgcgaccccgattccaaccctgccacaccagagccctatccccaaactgctcctttcttctctagcccctaccccaccttcccttagcttggtccccaaagctctcctttctgcccttgcgctaccaaaccctgccctccacaattgcctctctcactgtgcccctctccggctgtcctggccgggtccccatcctggctctggcccaagcttggtcccgctcccgcttccctctacccctgcctccttgcgtcgcttctcccggggctgtctgccccagtcccagccgcctggtctgtgcctacagatgtggacgagtgccaccgcgtgccgccgccgtgtgacctcgggcgctgcgagaacacgccaggcagcttcctgtgcgtgtgccccgccgggtaccaggctgcaccgcacggagccagctgccaggatgtggatgagtgtgcccgaagccccccaccctgcacctacggccggtgtgagaacacagaaggcagcttccagtgtgtctgccccatgggcttccaacccaacactgctggctccgaatgtggatgagtgtgagaaccacctcgcatgccctgggcaggagtgtgtgaactcgcccggctccttccagtgcaggacctgtccttctggccaccacctgcaccgtggcagatgcactgatgtggacgaatgcagttcgggtgcccctccctgtggtccccacggccactgcactaacaccgaaggctccttccgctgcagctgcgcgccaggctaccgggcgccgtcgggtcggcccgggccctgcgcagacgtgaacgagtgcctggagggcgatttctgcttccctcacggcgagtgcctcaacactgacggctcctttgcctgtacttgtgcccctggctaccgacccggaccccgcggagcctcttgcctcggttcgtacccgggctgatcctggccccggaaagggtgggcttagggcaggaaaaggcgggacggggagaagagggcgaaaaggggaaaacgagtttttagccggggtattccagcaggatcagggggcagctggtgggagtctcgaggcagtgagggggggcggggcgtggagatgaaagggccgagtctgggtatttggaccgtgattgtaaagaagctgttctaaacccgtcggggggcggtgtttgcagggagggaagtagcgtgaggcaggttggggaaggcgtgagaggcctag

SEQ ID NO: 320117 - DNA, 639 bp, Artificial Sequence
  derived and/or modified sequence
atgtggaccagcgccacagcctgcagaagaagagtgaccagcggggccgcccggacccggcaggccgccagctgtgcctgtgcccctcctggcacccggctgcacaggacagagcctgctgccaggatgtggatgtctgtgcctgaggccccccacccagcccccacagctggggtgaggacccagaaggccgccagctctgtgtctgccccctgggccagcaaccccaccctgctggcccccaacgtggatgaatgtgagaaccacctggcctgccccggccaggagtgtgtgaacagccctggcagcttccagtgcaggacctgccccagcggccaccacctgcaccggggccgctgcacagatgtggatgaatgtagcagcggggccccaccctgtggcccccacggccactgcaccaacacagagggcagcttccgctgcagctgtgcccctggctaccgggcccccagcggccggcccggcccctgtgctgatgtgaatgaatgtctggagggggacttctgcttcccccatggagaatgtctgaacacagatggcagctttgcctgcacctgtgcccctggctacagacctggccccaggggggccagctgcctgggcagctacccaggatag

SEQ ID NO: 320118 - DNA, 639 bp, Artificial Sequence
  derived and/or modified sequence
atgtggaccagcgccaccgcctgccggcggcgggtgaccagcggcgcagcccgaacaaggcaagcggcctcttgtgcttgcgcccccccaggcaccagactccatagaaccgagcctgctgcacgaatgtggatgtccgtgcctgaggcgccccatcccgccccgaccgccggagtgagaacacagaaagctgctagttccgtctctgctccgtgggccagtaatccgaccctgcttgctccaaacgttgacgagtgcgagaatcaccttgcatgtcctggtcaggagtgtgtcaactcccccgggtctttccagtgtagaacatgtcccagcggtcatcacctgcatcgaggccggtgtacggacgtagatgagtgctcttccggcgctcctccttgcggtccccatggtcactgcactaacacagaaggttcctttcgctgtagttgcgctccgggatatcgcgctccgtccggaagacctggcccttgtgcggatgtgaatgagtgtttggaaggcgacttctgcttcccgcatggcgaatgcctgaacacagatggcagcttcgcatgcacctgcgcccctggctataggcctggtccaagaggagccagctgcctgggaagttacccaggttag

SEQ ID NO: 320119 - DNA, 639 bp, Artificial Sequence
  derived and/or modified sequence
atgtggacctcagctacagcttgtcgaagaagggtgaccagtggcgcagccaggacccgtcaggcagcctcctgcgcttgcgccccaccaggcaccaggctgcaccggactgagcccgctgcgaggatgtggatgtcagtaccagaagcccctcaccctgctcctactgcgggtgtgaggacacaaaaggcagcctcaagcgtttctgctccctgggctagcaatcctacgctgctggctccaaatgtggacgagtgtgaaaatcacctggcgtgccccggacaagagtgcgtcaacagccccggatcattccaatgcagaacttgcccaagtgggcatcacctacaccgaggcagatgcacagatgtggacgagtgctctagcggcgcacccccatgtggtccgcatgggcattgcaccaatacggaaggcagttttcggtgctcctgcgcacccggttatagagctccatctgggagaccaggtccatgcgccgacgtaaacgagtgcctggaaggtgacttctgtttcccacacggcgagtgtctgaacactgatggtagctttgcctgcacttgcgccccaggctatagacccggacctaggggcgcaagttgcctcggctcttatccaggttag

SEQ ID NO: 320120 - DNA, 639 bp, Artificial Sequence
  derived and/or modified sequence
atgtggaccagcgccaccgcctgcagaagaagagtgaccagcggcgccgccagaaccagacaggccgccagctgcgcctgcgccccccccggcaccagactgcacagaaccgagcccgccgccagaatgtggatgagcgtgcccgaggccccccaccccgcccccaccgccggcgtgagaacccagaaggccgccagcagcgtgagcgccccctgggccagcaaccccaccctgctggcccccaacgtggacgagtgcgagaaccacctggcctgccccggccaggagtgcgtgaacagccccggcagcttccagtgcagaacctgccccagcggccaccacctgcacagaggcagatgcaccgacgtggacgagtgcagcagcggcgcccccccctgcggcccccacggccactgcaccaacaccgagggcagcttcagatgcagctgcgcccccggctacagagcccccagcggcagacccggcccctgcgccgacgtgaacgagtgcctggagggcgacttctgcttcccccacggcgagtgcctgaacaccgacggcagcttcgcctgcacctgcgcccccggctacagacccggccccagaggcgccagctgcctgggcagctaccccggctag

SEQ ID NO: 320121 - protein, 319 aa, Artificial Sequence
  derived and/or modified sequence
MATMSSAQLISAPSLQAKLGPTGPQVVQASELFQFWSGGSGPPWNVPDVKPFSQTPFTLSLTPPSTDLPGYEPPQALSPLPPPTPSPPAWQARGLGTARLQLVEFSAFVEPPDAVDSYQRHLFVHISQHCPSPGAPPLESVDVRQIYDKFPEKKGGLRELYDRGPPHAFFLVKFWADLNWGPSGEEAGAGGSISSGGFYGVSSQYESLEHMTLTCSSKVCSFGKQVVEKVETERAQLEDGRFVYRLLRSPMCEYLVNFLHKLRQLPERYMMNSVLENFTILQVVTNRDTQELLLCTAYVFEVSTSERGAQHHIYRLVRD

SEQ ID NO: 320122 - DNA, 1444 bp, Artificial Sequence
  derived and/or modified sequence
aaagctcccggcaactttctccctcgcagcgccccgcccgcccgcggctccccagccccaggccgggaggtcggaatgaactgatcgcccgctacatcaagctgagaacggggaagacccgaactcgaaaacaggtttctagtcacatccaggttttggcccgaaggaaatcaagggaaatccagtccaagttgaaggctctgaacgtggaccaggtttccaaggacaaggctttccagacaatggcaaccatgtcctctgcccagctcatctccgcgccttctctgcaggccaaactgggtcccactggtcctcaggtggtccaggcctctgagcttttccagttttggtctggaggatctgggcccccctggaatgttccagatgtgaagccattctcacagacaccgttcaccttgtcactgactcccccatctactgacctcccagggtacgagcccccccaagccctctcacccctgcccccacctaccccatcgcccccagcctggcaggctcggggcctgggcaccgcccggttgcagctggtagagttctcagccttcgtggaaccgccagatgcagttgattcttaccagaggcacctgttcgtgcacatcagccagcactgccccagccccggagcgccgccgctcgagagtgtggacgtccggcagatctacgacaaattccctgagaaaaagggtggcctccgagagctatatgatcgtggccccccccatgccttcttcctggtcaagttctgggcggacctgaactggggcccaagtggtgaggaggcaggggccggtggcagcatcagcagtggtggcttctacggagtgagcagccagtatgagagcctggaacacatgaccctcacctgttcctccaaggtctgctcttttggcaagcaggtggtggagaaggtggagacggaacgggcccagctggaggacggcagatttgtgtaccgcctgctgcgctcgcccatgtgcgagtacctggtgaatttcttgcacaagttgcggcagctgcctgagcgatacatgatgaacagcgtcctggaaaacttcaccatcctccaggtggtgacaaacagagacacccaggaactgctgctctgcaccgcctatgtcttcgaggtctccaccagcgagcgtggggcccagcatcacatttaccgcctggtcagggactgaagggggaccccaaaactggctcaccccccagaacaccctcctcccagggagggtcctccagctcacctcatgcttcttatttggggagagggctgtgatgtaaaggggttgacctcagaggcctaagcaactggggccatcccccccattagaggggcccccaaaacttggttggagagctgaacaggctgggactgaggaaaggataaaccccgatattgggacctcacagtgggtgtctg

SEQ ID NO: 320123 - protein, 485 aa, Artificial Sequence
  derived and/or modified sequence
MKNATIVMSVRREQGSSSGEGSLSFEDVAVGFTREEWQFLDQSQKVLYKEVMLENYINLVSIGYRGTKPDSLFKLEQGEPPGIAEGAAHSQICPGFVIQSRRYAGKDSDAFGGYGRSCLHIKRDKTLTGVKYHRCVKPSSPKSQLNDLQKICAGGKPHECSVCGRAFSRKAQLIQHQRTERGEKPHGCGECGKTFMRKIQLTEHQRTHTGEKPHECSECGKAFSRKSQLMVHQRTHTGEKPYRCSKCGKAFSRKCRLNRHQRSHTGEKLYGCSVCGKAFSQKAYLTAHQRLHTGDKPYKCSDCGRTFYFKSDLTRHQRIHTGEKPYECSECEKAFRSKSKLIQHQRTHTGERPYSCRECGKAFAHMSVLIKHEKTHIRETAINSLTVEKPSSRSHTSLYMSELIQEQKTVNTVPIEMPSSGTPPLLNKSERLVGRNVVIVEQPFPRNQAFVVNQEFEQRISLTNEVNVAPSVINYILYLTDIVSE

SEQ ID NO: 320124 - protein, 44 aa, Artificial Sequence
  derived and/or modified sequence
MKNATIVMSVRREQGSSSGEGSLSFEDVAVGFTREEWQFLDQSQ

SEQ ID NO: 320125 - protein, 58 aa, Artificial Sequence
  derived and/or modified sequence
MKNATIVMSVRREQGSSSGEGSLSFEDVAVGFTREEWQFLDQSQKVLYKEVMLENYIN

SEQ ID NO: 320126 - protein, 62 aa, Artificial Sequence
  derived and/or modified sequence
MKNATIVMSVRREQGSSSGEGSLSFEDVAVGFTREEWQFLDQSQKVLYKEVMLENYINLVSI

SEQ ID NO: 320127 - protein, 480 aa, Artificial Sequence
  derived and/or modified sequence
MKNATIVMSVRREQGSSSGEGSLSFEDVAVGFTREEWQFLDQSQKVLYKEVMLENYINLVSIGYRGTKPDSLFKLEQGEPPGIAEGAAHSQICPGFVIQSRRYAGKDSDAFGGYGRSCLHIKRDKTLTGVKYHRCVKPSSPKSQLNDLQKICAGGKPHECSVCGRAFSRKAQLIQHQRTERGEKPHGCGECGKTFMRKIQLTEHQRTHTGEKPHECSECGKAFSRKSQLMVHQRTHTGEKPYRCSKCGKAFSRKCRLNRHQRSHTGEKLYGCSVCGKAFSQKAYLTAHQRLHTGDKPYKCSDCGRTFYFKSDLTRHQRIHTGEKPYECSECEKAFRSKSKLIQHQRTHTGERPYSCRECGKAFAHMSVLIKHEKTHIRETAINSLTVEKPSSRSHTSLYMSELIQEQKTVNTVPIEMPSSGTPPLLNKSERLVGRNVVIVEQPFPRNQAFVVNQEFEQRISLTNEVNVAPSVINYILYLT

SEQ ID NO: 320128 - DNA, 1458 bp, Artificial Sequence
  derived and/or modified sequence
atgaagaacgccaccatcgtgatgagcgtgagaagagagcagggcagcagcagcggcgagggcagcctgagcttcgaggacgtggccgtgggcttcaccagagaggagtggcagttcctggaccagagccagaaggtgctgtacaaggaggtgatgctggagaactacatcaacctggtgagcatcggctacagaggcaccaagcccgacagcctgttcaagctggagcagggcgagccccccggcatcgccgagggcgccgcccacagccagatctgccccggcttcgtgatccagagcagaagatacgccggcaaggacagcgacgccttcggcggctacggcagaagctgcctgcacatcaagagagacaagaccctgaccggcgtgaagtaccacagatgcgtgaagcccagcagccccaagagccagctgaacgacctgcagaagatctgcgccggcggcaagccccacgagtgcagcgtgtgcggcagagccttcagcagaaaggcccagctgatccagcaccagagaaccgagagaggcgagaagccccacggctgcggcgagtgcggcaagaccttcatgagaaagatccagctgaccgagcaccagagaacccacaccggcgagaagccccacgagtgcagcgagtgcggcaaggccttcagcagaaagagccagctgatggtgcaccagagaacccacaccggcgagaagccctacagatgcagcaagtgcggcaaggccttcagcagaaagtgcagactgaacagacaccagagaagccacaccggcgagaagctgtacggctgcagcgtgtgcggcaaggccttcagccagaaggcctacctgaccgcccaccagagactgcacaccggcgacaagccctacaagtgcagcgactgcggcagaaccttctacttcaagagcgacctgaccagacaccagagaatccacaccggcgagaagccctacgagtgcagcgagtgcgagaaggccttcagaagcaagagcaagctgatccagcaccagagaacccacaccggcgagagaccctacagctgcagagagtgcggcaaggccttcgcccacatgagcgtgctgatcaagcacgagaagacccacatcagagagaccgccatcaacagcctgaccgtggagaagcccagcagcagaagccacaccagcctgtacatgagcgagctgatccaggagcagaagaccgtgaacaccgtgcccatcgagatgcccagcagcggcaccccccccctgctgaacaagagcgagagactggtgggcagaaacgtggtgatcgtggagcagcccttccccagaaaccaggccttcgtggtgaaccaggagttcgagcagagaatcagcctgaccaacgaggtgaacgtggcccccagcgtgatcaactacatcctgtacctgaccgacatcgtgagcgagtag

SEQ ID NO: 320129 - DNA, 1443 bp, Artificial Sequence
  derived and/or modified sequence
atgaagaacgccaccatcgtgatgagcgtgagaagagagcagggcagcagcagcggcgagggcagcctgagcttcgaggacgtggccgtgggcttcaccagagaggagtggcagttcctggaccagagccagaaggtgctgtacaaggaggtgatgctggagaactacatcaacctggtgagcatcggctacagaggcaccaagcccgacagcctgttcaagctggagcagggcgagccccccggcatcgccgagggcgccgcccacagccagatctgccccggcttcgtgatccagagcagaagatacgccggcaaggacagcgacgccttcggcggctacggcagaagctgcctgcacatcaagagagacaagaccctgaccggcgtgaagtaccacagatgcgtgaagcccagcagccccaagagccagctgaacgacctgcagaagatctgcgccggcggcaagccccacgagtgcagcgtgtgcggcagagccttcagcagaaaggcccagctgatccagcaccagagaaccgagagaggcgagaagccccacggctgcggcgagtgcggcaagaccttcatgagaaagatccagctgaccgagcaccagagaacccacaccggcgagaagccccacgagtgcagcgagtgcggcaaggccttcagcagaaagagccagctgatggtgcaccagagaacccacaccggcgagaagccctacagatgcagcaagtgcggcaaggccttcagcagaaagtgcagactgaacagacaccagagaagccacaccggcgagaagctgtacggctgcagcgtgtgcggcaaggccttcagccagaaggcctacctgaccgcccaccagagactgcacaccggcgacaagccctacaagtgcagcgactgcggcagaaccttctacttcaagagcgacctgaccagacaccagagaatccacaccggcgagaagccctacgagtgcagcgagtgcgagaaggccttcagaagcaagagcaagctgatccagcaccagagaacccacaccggcgagagaccctacagctgcagagagtgcggcaaggccttcgcccacatgagcgtgctgatcaagcacgagaagacccacatcagagagaccgccatcaacagcctgaccgtggagaagcccagcagcagaagccacaccagcctgtacatgagcgagctgatccaggagcagaagaccgtgaacaccgtgcccatcgagatgcccagcagcggcaccccccccctgctgaacaagagcgagagactggtgggcagaaacgtggtgatcgtggagcagcccttccccagaaaccaggccttcgtggtgaaccaggagttcgagcagagaatcagcctgaccaacgaggtgaacgtggcccccagcgtgatcaactacatcctgtacctgacctag

SEQ ID NO: 320130 - DNA, 1458 bp, Artificial Sequence
  derived and/or modified sequence
atgaaaaacgccactattgtcatgtccgtcaggagggagcagggatcttcctctggcgagggttcactctctttcgaggatgtagccgttggctttacccgtgaggaatggcagttcctggaccagagccaaaaagtcctgtataaggaagttatgctcgagaattatattaatctcgtctccattggctatcggggcacaaagccggactctctttttaagctcgagcagggcgagccccccgggattgccgagggggccgcccattctcagatttgccccgggttcgtaatccaaagccgacgctacgccggaaaggattctgacgcgttcggagggtacggtagatcttgcctgcacataaagcgggacaagacactgaccggggtgaagtaccaccggtgcgtgaagccatctagccccaagtctcaactcaacgacctccagaagatttgcgccggcggaaagccacacgaatgtagtgtgtgtggcagagcttttagtaggaaggctcagctgatccagcaccagcggactgaacgcggcgaaaagcctcacggatgcggcgagtgtggaaagacctttatgaggaagattcaattgaccgagcaccagcgtacacacaccggcgaaaaacctcacgaatgttccgagtgcggcaaggccttcagtcgcaagagccaattgatggtacatcagcgtacccacactggcgagaaaccttatcgctgttccaagtgtggcaaagcgttttccaggaagtgtagactgaaccggcatcagcgatcccatacaggcgagaaactgtatggctgcagcgtttgcggcaaagcgttctcccaaaaggcctaccttacagctcaccagcgacttcatacgggcgataagccttataaatgtagcgactgtggacgcactttttattttaagagcgacctgacgcgacatcagcggatccacacaggagaaaagccctacgaatgttctgaatgcgagaaggctttccgcagcaagagcaaactcatccagcatcagaggactcacaccggcgagcggccgtacagctgccgagaatgtggcaaggcctttgcacatatgtccgtgctgattaaacatgagaagacacatatccgcgagaccgccattaactctttgactgtggaaaagccttctagcaggagccacacatccctgtacatgagtgaacttattcaggagcagaagacagtcaataccgtaccaattgagatgccgagcagtggcacaccaccgcttctgaacaagtcggagcgtcttgtgggacgaaacgtggttattgtggagcagcctttccctcgcaatcaggccttcgtggtgaatcaggagttcgagcagaggatatccttgactaatgaggttaacgtggctccctccgtaattaactatatcctgtatcttaccgatattgtgagtgagtag

SEQ ID NO: 320131 - DNA, 1443 bp, Artificial Sequence
  derived and/or modified sequence
atgaagaacgcgacaatcgtgatgtccgtgagacgcgaacaggggagcagtagtggcgaaggttcattaagtttcgaagatgtggccgtgggcttcactagagaagagtggcagttcctggatcagtcacagaaagttttgtataaagaagtaatgctcgagaactatataaatctagtaagcatcggataccgagggacaaagccagacagtttattcaagctcgagcaaggcgagcccccaggaatcgccgagggcgctgcacactcacaaatttgtcccggattcgtcattcaatcccggcgctacgccgggaaggactcagacgctttcggtgggtacggcaggagttgcctacatatcaaacgggataaaactctgaccggtgtgaaatatcatcgatgcgttaaacccagttcccccaagagccaactcaacgacctgcagaaaatctgtgccggcggtaagcctcacgaatgttctgtttgcggacgcgccttctctcggaaagcccaactcatacagcaccagcggaccgagaggggggagaagcctcacggctgtggtgaatgtggcaagacttttatgcgaaagattcagttaaccgagcatcagcgaacccacactggcgaaaaacctcacgaatgttctgagtgcggcaaggccttctcacgcaagagccaactgatggtacaccagagaacacatacgggtgaaaagccttataggtgctcaaagtgtggaaaggccttttcaaggaaatgccgcctcaatcgccaccagcgctctcatactggcgaaaaactgtatgggtgctcagtgtgtggcaaagcctttagccagaaagcctatctgaccgcgcaccagagactgcacactggagacaaaccttataaatgcagtgactgcggccggaccttttacttcaagtctgatctcactagacatcagcgaatacatacaggagaaaagccctacgagtgcagcgaatgtgaaaaggcatttaggagtaagagtaaactgatccagcaccagcgaactcacacaggggaacggccctatagctgccgggaatgtggcaaggcatttgcccatatgtccgtcctcatcaagcacgaaaagacacatatacgcgagaccgccattaactccctcactgtcgagaagccatcatcaagaagtcacacctctctctacatgtccgagctcatacaagagcagaaaacagtgaatacagtacccatcgaaatgccctcatctggtacacctcccctgttgaacaaatcagagaggctcgtcggacgcaacgtagtgattgtcgaacagccgtttcctcggaaccaggctttcgtggtgaaccaggaatttgaacagaggattagcctgaccaacgaagttaacgttgcaccatctgtgataaactatatcctctacctcacatag

SEQ ID NO: 320132 - DNA, 1458 bp, Artificial Sequence
  derived and/or modified sequence
atgaagaatgccaccatcgtgatgtctgtgagaagagagcagggcagcagcagcggggagggcagcctgagctttgaagatgtggccgtgggcttcacccgggaggagtggcagttcctggaccagagccagaaggtgctgtacaaggaggtgatgctggagaactacatcaacctggtgtccatcggctaccggggcaccaagccagacagcctcttcaagctggagcagggcgagcccccaggcattgctgagggcgccgcccacagccagatctgccccggcttcgtcatccagagcagaagatatgctgggaaggacagtgatgcctttggaggctacggccgcagctgcctgcacatcaagagggacaagaccctgactggagtgaagtaccaccgctgtgtgaagcccagcagccccaagagccagctgaatgacctgcagaagatctgtgccggcggcaagccccatgaatgttctgtgtgtggccgggccttcagcaggaaggcccagctgatccagcaccagaggacagagcggggggagaagccccacggctgtggggagtgtgggaagaccttcatgaggaagatccagctgacagagcaccagaggacccacactggagagaagccccatgaatgttctgaatgtgggaaggccttcagcaggaagagccagctgatggtgcaccagaggacccacactggagagaagccctaccgctgcagcaaatgtgggaaggccttcagcaggaagtgccgcctgaacagacaccagaggagccacactggagagaagctgtatggctgcagcgtgtgtgggaaggccttcagccagaaggcctacctgacagcccaccagaggctgcacactggagacaagccctacaagtgcagcgactgtggccgcaccttctacttcaagagtgacctgaccaggcaccagaggatccacactggagagaagccctatgaatgttctgaatgtgagaaggccttccgcagcaagagcaagctgatccagcaccagaggacccacactggagagcggccctacagctgccgggagtgtgggaaggcctttgcccacatgtctgtgctgatcaagcatgagaagacccacatccgggagacagccatcaacagcctgactgtggagaagcccagcagccgcagccacaccagcctgtacatgtctgagctgatccaggagcagaagacagtgaacacagtgcccatcgagatgcccagcagcggcaccccacccctgctgaacaagtctgagcggctggtgggcagaaatgtggtgattgtggagcagcccttccccaggaaccaggcctttgtggtgaaccaggagtttgagcagaggatcagcctgaccaatgaggtgaatgtggcccccagcgtcatcaactacatcctgtacctgacagacatcgtgtctgagtag

SEQ ID NO: 320133 - DNA, 1443 bp, Artificial Sequence
  derived and/or modified sequence
atgaagaatgccaccatcgtgatgtctgtgagaagagagcagggcagcagcagcggggagggcagcctgagctttgaagatgtggccgtgggcttcacccgggaggagtggcagttcctggaccagagccagaaggtgctgtacaaggaggtgatgctggagaactacatcaacctggtgtccatcggctaccggggcaccaagccagacagcctcttcaagctggagcagggcgagcccccaggcattgctgagggcgccgcccacagccagatctgccccggcttcgtcatccagagcagaagatatgctgggaaggacagtgatgcctttggaggctacggccgcagctgcctgcacatcaagagggacaagaccctgactggagtgaagtaccaccgctgtgtgaagcccagcagccccaagagccagctgaatgacctgcagaagatctgtgccggcggcaagccccatgaatgttctgtgtgtggccgggccttcagcaggaaggcccagctgatccagcaccagaggacagagcggggggagaagccccacggctgtggggagtgtgggaagaccttcatgaggaagatccagctgacagagcaccagaggacccacactggagagaagccccatgaatgttctgaatgtgggaaggccttcagcaggaagagccagctgatggtgcaccagaggacccacactggagagaagccctaccgctgcagcaaatgtgggaaggccttcagcaggaagtgccgcctgaacagacaccagaggagccacactggagagaagctgtatggctgcagcgtgtgtgggaaggccttcagccagaaggcctacctgacagcccaccagaggctgcacactggagacaagccctacaagtgcagcgactgtggccgcaccttctacttcaagagtgacctgaccaggcaccagaggatccacactggagagaagccctatgaatgttctgaatgtgagaaggccttccgcagcaagagcaagctgatccagcaccagaggacccacactggagagcggccctacagctgccgggagtgtgggaaggcctttgcccacatgtctgtgctgatcaagcatgagaagacccacatccgggagacagccatcaacagcctgactgtggagaagcccagcagccgcagccacaccagcctgtacatgtctgagctgatccaggagcagaagacagtgaacacagtgcccatcgagatgcccagcagcggcaccccacccctgctgaacaagtctgagcggctggtgggcagaaatgtggtgattgtggagcagcccttccccaggaaccaggcctttgtggtgaaccaggagtttgagcagaggatcagcctgaccaatgaggtgaatgtggcccccagcgtcatcaactacatcctgtacctgacctag

SEQ ID NO: 320134 - DNA, 1458 bp, Artificial Sequence
  derived and/or modified sequence
atgaagaacgccaccatcgtgatgagcgtgcggcgggagcagggctcaagctccggtgagggaagtctgagttttgaagacgttgcggtgggatttacccgcgaggagtggcagttcctcgaccagtcccagaaagtgctgtataaagaagtaatgcttgagaactatatcaacctggtgtctattgggtaccgcggcacgaaaccagacagccttttcaaattggagcagggcgaaccccccgggatcgcagagggcgctgcccattcccagatctgtccaggcttcgtgatccagtcccgccggtacgccgggaaagacagtgacgcatttggcggctacgggcgcagttgtctgcatattaaaagggataagaccctgaccggggttaaatatcaccgctgtgttaagcccagtagccctaagtcccagctcaatgacttacaaaaaatatgcgcgggaggcaagccccatgagtgtagcgtgtgcggcagagccttcagccgaaaggcgcagttgatacagcaccagagaactgaacgcggggaaaaaccgcacgggtgtggcgaatgcggcaagactttcatgagaaagatacagctgacagaacatcagaggacccataccggggaaaaaccgcacgagtgttccgagtgcgggaaagctttcagcagaaaatctcagttaatggtgcatcaacggacacacaccggtgaaaaaccctatcgatgctctaaatgcggtaaagcgtttagtaggaaatgtcggctcaatcgacatcagcggtctcacactggcgaaaagttgtacggttgttccgtctgtggcaaggctttcagccagaaagcctaccttacagcccatcaacgacttcataccggggataaaccatacaagtgttctgactgcggtaggacgttttactttaagagcgatctgaccagacatcagcgaatccatacgggggaaaagccctacgagtgctctgaatgtgaaaaagccttccggagcaagagcaaactgattcagcaccaacggactcatacgggagagaggccttattcttgcagggaatgcgggaaggcctttgcccatatgagtgtgctcatcaaacatgagaagacccacatccgagagacagcaatcaattcgctcaccgtggaaaagccttcctcaaggagtcacacctccctgtatatgagtgagctgatccaggaacagaagacagtaaatacagtgcctatcgagatgcccagctcggggactccccctctacttaacaagagtgagcgcctagtgggcaggaacgtcgtgatagtagaacaaccatttcccaggaatcaggcctttgtggtgaatcaggaatttgaacagcgcattagccttaccaacgaagtgaacgttgctccttccgtcatcaactacatcctgtacttgaccgacatagtttctgaatag

SEQ ID NO: 320135 - DNA, 1443 bp, Artificial Sequence
  derived and/or modified sequence
atgaagaacgccaccatcgtgatgagcgtgcggcgggagcagggctcgagctccggggaaggcagtttatcatttgaggatgttgctgttggctttacacgcgaggaatggcagtttctggaccagagccagaaagttctctataaagaagtgatgcttgaaaactacatcaaccttgtctctatagggtatagggggacgaagcccgatagcttattcaagttggagcagggagaacccccgggtatcgctgagggcgctgcccacagtcagatctgccccggattcgtcattcaatcgaggcgatacgccggaaaggactccgacgcatttggcggatatgggaggagctgcctacacattaagcgggacaaaacactcacaggagtgaagtatcaccgatgtgtcaagccatcatcccccaaaagccagttaaacgatctgcagaagatttgtgctggtggcaagcctcatgaatgctcggtgtgcggacgcgcattcagccgcaaagcgcagctgattcagcaccagcggactgaacgtggggagaaaccacacgggtgcggagagtgtgggaagacattcatgaggaagattcagctgaccgagcaccagagaacccacactggcgaaaaaccccatgagtgcagcgaatgcggaaaagcattctcccgcaagagtcagttgatggtgcaccagcgcacacacactggagagaagccgtatcgttgtagcaagtgtgggaaagctttttccaggaagtgccggttgaatcgacatcagcgctctcatacaggcgaaaaactgtacggttgtagtgtgtgcggcaaagccttcagccagaaggcttacctgaccgcacaccagcgactgcacactggcgacaagccctacaagtgtagcgactgtggacgcacattttactttaagagtgacctgacaaggcatcagcggatccacaccggggagaaaccctacgagtgctcagagtgcgagaaggctttccggtctaagagcaagctgatccaacaccagcgaacgcacaccggagaaagaccatactcatgccgggagtgtggcaaagcctttgcccacatgtctgtgttgatcaaacatgagaaaacacacattagagagaccgccatcaacagtcttactgttgagaagccatctagtagatcccacactagtctgtacatgagcgaattaatacaagagcagaaaaccgtaaataccgtacctatcgaaatgcctagtagcggcacccctccactgctgaacaagtccgaaaggcttgtgggccgaaacgttgtgatcgttgagcaaccctttccccggaatcaggcattcgttgtgaaccaagaattcgaacagagaatctccttgaccaatgaggtcaacgtcgccccatcagttattaactacatactctacctcacctag

SEQ ID NO: 320136 - DNA, 1458 bp, Artificial Sequence
  derived and/or modified sequence
atgaaaaacgccactattgtgatgagtgtccgtagagaacagggatcatcgagcggagagggcagcctaagctttgaagacgtggctgtggggttcacacgggaagagtggcagttcctggatcaatcacagaaggttctgtataaagaagtgatgctggaaaactacataaacctggtgtcaatcggttacagaggcacaaagccagattctttgttcaaactggagcagggtgaaccgcctgggatcgccgaaggagcggctcactcccagatttgtcccggttttgtcatccagtccagaaggtatgccggaaaggattctgatgctttcgggggatacggtagatcatgcctgcatataaagcgtgacaagactctgactggcgtcaagtatcacaggtgcgtgaaaccaagtagtcccaagagtcagctcaacgacctacagaagatatgtgccggtggcaagccccacgagtgctccgtctgtgggagagctttctcacggaaggctcaactcattcagcaccagaggacggagcgtggagagaagcctcacggttgcggagagtgtggaaagacgttcatgcgcaagatccaactcacagagcatcaacggacacacacaggagaaaaaccccatgaatgctccgaatgcggcaaagcctttagtaggaaatcgcaattgatggttcatcaaaggactcatacaggggagaaaccataccgatgctcaaaatgtgggaaagcgttctcccgaaagtgtaggctgaatagacaccagagatctcacaccggggagaaactgtatggatgttccgtgtgcggtaaagccttctctcagaaggcctacctgacagctcaccagcgtttgcacacaggggataaaccctacaagtgctctgactgcggtagaactttctattttaagtccgacctcactcgtcaccagagaatccatactggcgagaaaccctatgagtgttccgagtgcgagaaggctttcagaagcaagagtaagttgatccagcaccaacgtacacatacgggggaaaggccatattcatgtagagagtgtggaaaggccttcgcgcacatgtccgtgctcattaagcacgaaaaaacgcacatcagggagactgccataaatagtttgacagtcgaaaagccatcaagtcggtcacacactagcctttatatgagcgagctgattcaggagcagaagactgtaaatactgtccccattgaaatgccatcatccggtacgccaccactccttaacaagagcgaacgcttggtcggaagaaatgttgtgattgtggaacaaccattcccacggaaccaggcctttgtcgttaaccaggaatttgaacagaggatttccctgaccaatgaagtaaatgtggccccttcagtgatcaactacattctttatctcactgatatcgtgtctgagtag

SEQ ID NO: 320137 - DNA, 1443 bp, Artificial Sequence
  derived and/or modified sequence
atgaagaatgcaactattgtgatgtccgttcgtagagagcagggatctagttctggagagggaagccttagctttgaggatgtggcagtaggcttcacccgcgaagagtggcagttcctggaccagtcacagaaggtgttgtacaaggaagtgatgcttgaaaattacatcaacctggtctccatcggataccggggtacgaagcccgatagcctctttaaacttgaacagggcgaaccacccggaatagccgagggggcagctcattcccagatctgtcctggtttcgtgatccagagccgtcggtatgcaggtaaagactccgatgctttcggcggatacgggagaagctgtctgcatatcaaaagagacaaaacactgacaggcgttaagtatcatagatgtgtgaagccatcatctcccaagagccagctaaatgatctgcagaagatttgtgccggagggaaaccccatgagtgtagtgtgtgtgggagagccttctccaggaaagctcagctcatccaacaccagcggaccgaaagaggggagaagccccatggatgcggcgagtgtggcaagactttcatgcggaaaatacagcttactgagcaccaaagaacacacaccggcgagaagccccacgagtgtagtgagtgtggcaaagccttctccagaaagtcacagttgatggtgcaccagaggacacatactggggagaaaccataccgttgttctaaatgcggtaaagccttctcacgaaagtgccgcctgaaccgccaccagcggtcgcataccggagaaaagctttacggttgtagcgtgtgcggcaaggccttctctcagaaggcatatcttaccgcgcaccagcggctgcacacgggggataagccttacaagtgttctgattgcggccgaacattctacttcaagtcagacctgacacgccatcaacgcatacacacgggggaaaaaccctacgaatgctccgagtgtgagaaagcattccgatccaaatcaaaattgatccagcaccagaggacccacacaggcgagagaccgtacagctgccgggaatgcggaaaagcattcgctcacatgtccgtccttatcaagcacgagaaaacccatatcagagaaactgctataaacagtctgaccgtggaaaagcccagctctaggtcccacacaagtctatacatgtctgaactaatccaggagcagaaaacagtaaatacagttcctattgaaatgcctagttcagggacacctcccttgctgaataagagcgaaagacttgtagggcgtaacgttgtaatcgttgagcagccctttcctcgtaatcaggcgttcgtggtcaaccaggagttcgaacagagaattagcctcaccaatgaagtcaacgtcgctccaagcgtcatcaattacatactgtatctcacttag

SEQ ID NO: 320138 - DNA, 3074 bp, Artificial Sequence
  derived and/or modified sequence
gaaacttgcgagtgtcgcgtctgcagtgtgtggggttcgcggggcggcgggtagagttgagcatttttgtcatctgcaaataattttagccaggtggcaagtgtatggactgtggagtaagaagtacctgcctctgcctctgacttgggttctggcctataggaacaagacattttcagtaatggaagaaggagcttccaggctggggaagatcatcatttccagtggtagcttgacctgagatgatacctgaccaccacttctgggaaggcccagaatagacagaagagagagaacatactagagttgctagcccctaagagttgaacgaaatgggcaaggcccagctgaaataacaggaaacacatgaaaaatgccacgattgtaatgtctgtgaggagagagcaaggcagttcttcaggggaggggtcattgtcattcgaagatgtggctgtgggcttcaccagggaggagtggcagtttttggaccagtctcagaaggtcttgtacaaggaagtaatgttggagaactacatcaacctagtatcaatagggtatcgaggcaccaagccagattcgctcttcaagttggagcaaggagaacccccagggatagcagaaggagcagcccacagtcaaatctgtccaggttttgtaatccagagtagaagatatgcaggaaaagattctgatgcatttggtggatatgggagatcatgcctccatatcaagcgtgacaaaactcttactggagttaaataccatagatgtgttaaacccagcagccctaaatcacagctcaatgacctacaaaaaatttgtgcaggagggaaaccacatgaatgcagtgtgtgcgggagagccttctccaggaaagcacagcttattcaacatcagagaactgaaagaggagagaaaccccatggatgtggtgaatgtgggaaaacattcatgaggaagattcagctcactgagcatcagagaactcacacaggagagaagccccatgaatgtagtgaatgtggaaaagccttctccagaaagtcacagctcatggtccatcagagaacccatacaggagagaaaccctacagatgcagcaaatgcggaaaagccttcagccggaagtgccggctcaatagacatcagcgatcacatactggagagaaactctatgggtgcagtgtgtgtgggaaagccttttctcagaaggcatacctcactgcacaccagagacttcacacaggagataagccttataaatgcagtgattgtggaagaaccttctattttaagtcagacctgaccagacatcagaggattcatacgggagagaaaccttatgaatgtagtgagtgtgaaaaagcctttagaagcaagtcgaagctcattcagcatcagcgtactcacactggagagagaccatattcatgcagagaatgtggcaaagcctttgcccacatgtcagtcctcattaaacatgagaaaactcacataagagagacagccataaattcactgacggtggagaaaccttcctcaaggagtcatacctccttatacatgagcgaactcatacaagagcaaaagactgtgaacacagtacctatagaaatgccttcctcaggaaccccgccattgttaaacaagagtgagcgcctagtgggcagaaatgtagtgattgtggaacaaccttttccaagaaatcaagcctttgtagttaatcaggaatttgaacagagaataagcctcacaaatgaagtgaatgtggccccatcagtaataaattatatcttgtatcttacagatattgtatcagaataaatcttctgataccagaaaggtgggaaaatctttagtaggaatcctccagccattatatcccagagagctcatttagggctgaaacactgtggaggcagtggttgtggaggacatttctgtgagaagtcaaacctgttaaacaccattgaaatcatgttgggtagaaatgcagctgttatgaggaagtctttacctggagatgatatctcaattggtatcaaaagaattcttacaggaatatttatgaaagattgtgatggtgcttttagcgctaaattgtgcctcgtgtgccaaagaaacatagacaactgtagaggcaatggatatggaaaacatttttcgtaaaatatgggagaatttgtagaaaagaaaaactcttgaaagtaagaaatgatggcaactcaccaaattaactcatgtatcatacttttatgtcttgagagtcttggagggacgtgtttaatgaaatcttgaaccccaggaatagtattatgtaatgaaaacctatgaatataacaaatatggaagtaaaattgtgttagttttttatgagtgttgcaccaaactaacacaaatttaatggcttaaaacaacacaaaatcattatcttacagttctggaggactgaagtccaaatgcatctcacggggctacatcaagctgttgacagggctgcttttctttttggaggctctaggggagcgtctttctttgcccttccagcttctagaagctgcccaaattctgtggtttggggcctcctttcaaaaccagcaatggccaatcagtcttacatcactcaaacacttgagtgttctgtctccctcttccatgtttgaggacccttgtgattacactgtgaaaacccagataagccaggataatctccctatcttattatgaggcaagtatgttaagattttattctataatcagagaatcttatgctatgattgttatatgtgagcattatagatgctcttgaaatgttaaaatcacatcagcactggaaaataactcctaaatgtccaaaaagaacatgagatttatggtgcttgaaatgttgctaaacgtaaatttgtatctattctgaaattatataaattaacctacctggccaggcacagtggctcacacctgtaatctcagcactttgggaggccaaggcaggaagatcacttgagcccgcaagtttgagaccaccctgggcaacatagcgagactacctctacaaaaaaaaaaaaaaataa

SEQ ID NO: 320139 - DNA, 2758 bp, Artificial Sequence
  derived and/or modified sequence
ggggttcgcggggcggcgggtagaggcgagtgtttagagacttcgggtccctgactcgcctccagcagtggagacaggtcatcggtctggtctgcgtgggcttctgggaatgtttcaggggcagggagagcgcgcttttttttttctgttgttcgctagcgcgtgaggtccgtgttgcggggagctctcggggagtcctcgctcggagttcgtttcgcagtcgtgttggagttcccagagtctgggagcccatggtctccgcattggaaccagtgcttgggaggtcttcgttgcacagtagcgctagggcgtcgtggtggggaagcgaatcgtgtcagtgttggagactgctctgggcagttcgtgttcattgcttatcacatgcgtacttaaaaaggggtctgctggtccccttgcttccctgctgctgtatattctgtagaaaatgggttttcaggttcattgcgacccaagtaataacatccccatcattttaaatactcctccagaaaataactctggtttagtgtatttcatgtttaatgttgggatcaggtgtctaggtattggtataattttattcgtctttaataacatcttgtcaacttcgtattcccatattacatgctctttgagagttttttaaattgctgcagtttcatcaagtggttgctttaatttgggtagaattgatgtagatctagatacaacactttcaggaacatgtgatggatttctattaacccaatatttttatttgtttgactatctgtagtgtttttccatacgtatcttggacatttctggttatgcttatttctacatagttaatactttttgttgtaaatcgtgactttttttttgcataagacccctccccctttccttttttgttcctaattttacttagttgacaagaacagaagttaaaaatatatatgtttattctgtcacttcattgtactcatgtcattacatataacttataaattgacgtcttttttctagttgagcatttttgtcatctgcaaataattttagccaggtggcaagtgtatggactgtggagtaagaagtacctgcctctgcctctgacttgggttctggcctataggaacaagacattttcagtaatggaagaaggagcttccaggctggggaagatcatcatttccagtggtagcttgacctgagatgatacctgaccaccacttctgggaaggcccagaatagacagaagagagagaacatactagagttgctagcccctaagagttgaacgaaatgggcaaggcccagctgaaataacaggaaacacatgaaaaatgccacgattgtaatgtctgtgaggagagagcaaggcagttcttcaggggaggggtcattgtcattcgaagatgtggctgtgggcttcaccagggaggagtggcagtttttggaccagtctcagaaggtcttgtacaaggaagtaatgttggagaactacatcaacctagtatcaatagggtatcgaggcaccaagccagattcgctcttcaagttggagcaaggagaacccccagggatagcagaaggagcagcccacagtcaaatctgtccaggttttgtaatccagagtagaagatatgcaggaaaagattctgatgcatttggtggatatgggagatcatgcctccatatcaagcgtgacaaaactcttactggagttaaataccatagatgtgttaaacccagcagccctaaatcacagctcaatgacctacaaaaaatttgtgcaggagggaaaccacatgaatgcagtgtgtgcgggagagccttctccaggaaagcacagcttattcaacatcagagaactgaaagaggagagaaaccccatggatgtggtgaatgtgggaaaacattcatgaggaagattcagctcactgagcatcagagaactcacacaggagagaagccccatgaatgtagtgaatgtggaaaagccttctccagaaagtcacagctcatggtccatcagagaacccatacaggagagaaaccctacagatgcagcaaatgcggaaaagccttcagccggaagtgccggctcaatagacatcagcgatcacatactggagagaaactctatgggtgcagtgtgtgtgggaaagccttttctcagaaggcatacctcactgcacaccagagacttcacacaggagataagccttataaatgcagtgattgtggaagaaccttctattttaagtcagacctgaccagacatcagaggattcatacgggagagaaaccttatgaatgtagtgagtgtgaaaaagcctttagaagcaagtcgaagctcattcagcatcagcgtactcacactggagagagaccatattcatgcagagaatgtggcaaagcctttgcccacatgtcagtcctcattaaacatgagaaaactcacataagagagacagccataaattcactgacggtggagaaaccttcctcaaggagtcatacctccttatacatgagcgaactcatacaagagcaaaagactgtgaacacagtacctatagaaatgccttcctcaggaaccccgccattgttaaacaagagtgagcgcctagtgggcagaaatgtagtgattgtggaacaaccttttccaagaaatcaagcctttgtagttaatcaggaatttgaacagagaataagcctcacaaatgaagtgaatgtggccccatcagtaataaattatatcttgtatcttaca

SEQ ID NO: 320140 - DNA, 1380 bp, Artificial Sequence
  derived and/or modified sequence
atggtgcccttcggccccttcgccttcatgcccggcaagctggtgcacaccaacgaggtgaccgtgctgctgggcgacaactggttcgccaagtgcagcgccaagcaggccgtgggcctggtggagcacagaaaggagcacgtgagaaagaccatcgacgacctgaagaaggtgatgaagaacttcgagagcagagtggagttcaccgaggacctgcagaagatgagcgacgccgccggcgacatcgtggacatcagagaggagatcaagtgcgacttcgagttcaaggccaagcacagaatcgcccacaagccccacagcaagcccaagaccagcgacatcttcgaggccgacatcgccaacgacgtgaagagcaaggacctgctggccgacaaggagctgtgggccagactggaggagctggagagacaggaggagctgctgggcgagctggacagcaagcccgacaccgtgatcgccaacggcgaggacaccaccagcagcgaggaggagaaggaggacagaaacaccaacgtgaacgccatgcaccaggtgaccgacagccacaccccctgccacaaggacgtggccagcagcgagcccttcagcggccaggtgaacagccagctgaactgcagcgtgaacggcagcagcagctaccacagcgacgacgacgacgacgacgacgacgacgacgacgacgacaacatcgacgacgacgacggcgacaacgaccacgaggccctgggcgtgggcgacaacagcatccccaccatctacttcagccacaccgtggagcccaagagagtgagaatcaacaccggcaagaacaccaccctgaagttcagcgagaagaaggaggaggccaagagaaagagaaagaacagcaccggcagcggccacagcgcccaggagctgcccaccatcagaacccccgccgacatctacagagccttcgtggacgtggtgaacggcgagtacgtgcccagaaagagcatcctgaagagcagaagcagagagaacagcgtgtgcagcgacaccagcgagagcagcgccgccgagttcgacgacagaagaggcgtgctgagaagcatcagctgcgaggaggccacctgcagcgacaccagcgagagcatcctggaggaggagccccaggagaaccagaagaagctgctgcccctgagcgtgacccccgaggccttcagcggcaccgtgatcgagaaggagttcgtgagccccagcctgacccccccccccgccatcgcccaccccgccctgcccaccatccccgagagaaaggaggtgctgctggaggccagcgaggagaccggcaagagagtgagcaagttcaaggccgccagactgcagcagaaggactag

SEQ ID NO: 320141 - DNA, 1488 bp, Artificial Sequence
  derived and/or modified sequence
atgtggaggggctgtgcccgctcgcgtaagcgcaaaaaggtcgacaacgactacaatgcactgcgcgaaagactcagtaccctcccagacaagttatcatataacattatggtgcctttcggcccattcgcctttatgcctgggaaactggtgcataccaacgaggtgacagtcttacttggcgacaattggtttgccaagtgcagtgccaagcaggcagtggggctggtagaacatcgcaaggaacacgtgaggaaaacgatcgatgacctgaagaaggtaatgaaaaatttcgagagtcgggtggagtttactgaagatctacagaagatgtcagacgccgcaggtgatatagtggatatacgcgaggaaattaagtgtgattttgaatttaaagccaaacatcggattgcccataagcctcattctaagcccaagactagcgacatcttcgaggcagacatcgctaatgatgttaagagcaaagacctcttagctgacaaagaactttgggccagactggaggaacttgaacgtcaggaagaactgttgggggagctggattctaaacctgatacagtgatcgccaatggggaggataccacctctagtgaagaggagaaggaggatcggaacacaaacgttaacgctatgcaccaggtgaccgattcacacaccccctgccataaagacgtggcttcctccgagccttttagcggccaggttaattcccagctgaactgctctgtaaatggatcaagctcataccactccgatgacgacgacgatgacgacgacgatgacgacgatgataatatcgatgatgacgacggtgataacgaccatgaggctctgggagtgggtgacaatagtatccctacaatctatttctctcacaccgtcgagcccaaacgggtgcggataaacaccgggaagaatacaacgctgaaattttccgagaagaaagaagaggcaaaaaggaagcggaagaattcgaccgggagcggacacagcgcccaggaattgcctaccatacgcacccctgcagacatttaccgcgcattcgtggacgtggtcaatggcgagtatgtcccgagaaagagcatcctcaagtcaaggtcacgcgagaactctgtgtgctctgataccagtgagtcctctgcggctgaattcgacgacaggcgaggcgtgctgcgctccatctcgtgtgaagaggccacatgctccgatacttcagaatctattttagaagaggaacctcaggagaaccaaaaaaagctcctacctctttccgtcactcccgaagcattctcaggcaccgttattgaaaaagagttcgtttctccatccctcaccccgccaccggctatcgctcatcccgcgctacccaccatcccggagagaaaagaagtgctcctcgaggcctccgaagagacaggcaaacgggttagcaaattcaaggccgctcgcctgcaacagaaggactag

SEQ ID NO: 320142 - DNA, 1380 bp, Artificial Sequence
  derived and/or modified sequence
atggtcccttttggcccctttgctttcatgcccggcaaactggtccatacgaacgaggttaccgtcctccttggtgataattggttcgcaaaatgttcagccaaacaggccgtcggtctggtagaacatcgaaaggagcacgttagaaagaccatcgacgatttaaagaaggtgatgaagaattttgaaagtagagtcgaatttaccgaggacctccaaaagatgagcgatgctgccggtgatatcgtggatattcgtgaggagattaagtgcgattttgagttcaaggccaagcaccggattgctcacaaaccccattccaaaccaaagacgagtgacattttcgaggccgacattgcgaacgatgtgaagtctaaggatcttctggcagacaaagaattgtgggcacggctcgaggagctggagaggcaggaggaattgctgggagagctcgatagcaaaccggatacggtcattgccaatggcgaggacacaacaagttctgaagaagaaaaggaagatcggaatacgaacgtgaatgctatgcaccaggtaacagacagccacacaccgtgtcataaggatgtggcgtccagcgaacctttctcaggccaggtcaacagtcagttgaactgctcagtaaatggatcctcctcttatcattcagacgacgacgacgatgatgacgacgatgatgacgatgataatattgacgatgatgatggagacaacgatcacgaagcactaggggtgggggataattctataccgaccatctatttttcacatacagtggaacctaagagagtgcggattaacactggaaagaacaccaccctcaaattctccgagaagaaggaggaggccaaaaggaagaggaaaaacagcaccggttctggacactccgcacaggagctccccacaattagaacgcccgcagacatttaccgcgcgtttgttgatgtggtgaacggtgaatatgttcctcggaaaagcatcctaaaatcccgatcaagggagaacagcgtctgcagcgacacttcggagtcttccgccgccgagttcgacgataggaggggggttcttcgctctatcagttgtgaagaagctacctgctcggatacctccgagtccatattggaagaggagccccaagagaaccagaagaaacttttgccccttagcgtcactccagaagctttttctggcacagtgattgagaaagaattcgtcagccccagtctgaccccccctcccgccatcgcccatccagcactgcccacgattccagaacgcaaagaagtgctcttggaggcctctgaagaaaccggaaagcgggtgagtaagtttaaagccgcgagattacagcaaaaagactag

SEQ ID NO: 320143 - DNA, 1488 bp, Artificial Sequence
  derived and/or modified sequence
atgtggaggggctgtgcccggagcaggaagaggaagaaggtggacaatgactacaatgccctgcgggagcggctgagcaccctgcctgacaagctgagctacaacatcatggtgcccttcggcccctttgccttcatgcctgggaagctggtgcacaccaatgaggtgacagtgctgctgggggacaactggtttgccaagtgcagcgccaagcaggccgtgggcctggtggagcacaggaaggagcacgtgaggaagaccattgatgacctgaagaaggtgatgaagaactttgagagccgggtggagttcacagaggacctgcagaagatgtctgatgctgctggggacatcgtggacatccgggaggagatcaagtgtgactttgagttcaaggccaagcacagaattgcccacaagccccacagcaagcccaagaccagtgacatctttgaagctgacatcgccaatgatgtgaagagcaaggacctgctggccgacaaggagctgtgggcccggctggaggagctggagcggcaggaggagctgctgggggagctggacagcaagccagacacagtgattgccaatggagaggacaccaccagcagcgaggaggagaaggaggacaggaacaccaacgtgaatgccatgcaccaggtgacagacagccacaccccctgccacaaggatgtggccagcagcgagcccttcagcggccaggtgaacagccagctgaactgcagcgtgaatggcagcagcagctaccacagtgatgatgatgatgatgatgatgatgatgatgatgatgacaacattgatgatgatgatggagacaatgaccacgaggccctgggcgtgggggacaacagcatccccaccatctacttcagccacacagtggagcccaagagggtgcgcatcaacacaggcaagaacaccaccctgaagttcagcgagaagaaggaggaggccaagaggaagaggaagaacagcactggaagtggccacagcgcccaggagctgcccaccatccgcaccccagctgacatctaccgggcctttgtggatgtggtgaatggagaatatgtgcccaggaagagcatcctgaagagccgcagccgggagaacagcgtgtgcagcgacaccagcgagagcagcgctgctgagtttgatgaccggcggggcgtgctgcggagcatcagctgtgaggaggccacctgcagcgacaccagcgagagcatcctggaggaggagccccaggagaaccagaagaagctgctgcccctgtctgtgaccccagaggccttcagcggcaccgtcatcgagaaggagtttgtgagccccagcctgaccccacctccagccatcgcccacccagccctgcccaccatccctgagaggaaggaggtgctgctggaggccagcgaggagaccgggaagagggtgtccaagttcaaggccgcccggctgcagcagaaggactag

SEQ ID NO: 320144 - DNA, 1380 bp, Artificial Sequence
  derived and/or modified sequence
atggtgcccttcggcccctttgccttcatgcctgggaagctggtgcacaccaatgaggtgacagtgctgctgggggacaactggtttgccaagtgcagcgccaagcaggccgtgggcctggtggagcacaggaaggagcacgtgaggaagaccattgatgacctgaagaaggtgatgaagaactttgagagccgggtggagttcacagaggacctgcagaagatgtctgatgctgctggggacatcgtggacatccgggaggagatcaagtgtgactttgagttcaaggccaagcacagaattgcccacaagccccacagcaagcccaagaccagtgacatctttgaagctgacatcgccaatgatgtgaagagcaaggacctgctggccgacaaggagctgtgggcccggctggaggagctggagcggcaggaggagctgctgggggagctggacagcaagccagacacagtgattgccaatggagaggacaccaccagcagcgaggaggagaaggaggacaggaacaccaacgtgaatgccatgcaccaggtgacagacagccacaccccctgccacaaggatgtggccagcagcgagcccttcagcggccaggtgaacagccagctgaactgcagcgtgaatggcagcagcagctaccacagtgatgatgatgatgatgatgatgatgatgatgatgatgacaacattgatgatgatgatggagacaatgaccacgaggccctgggcgtgggggacaacagcatccccaccatctacttcagccacacagtggagcccaagagggtgcgcatcaacacaggcaagaacaccaccctgaagttcagcgagaagaaggaggaggccaagaggaagaggaagaacagcactggaagtggccacagcgcccaggagctgcccaccatccgcaccccagctgacatctaccgggcctttgtggatgtggtgaatggagaatatgtgcccaggaagagcatcctgaagagccgcagccgggagaacagcgtgtgcagcgacaccagcgagagcagcgctgctgagtttgatgaccggcggggcgtgctgcggagcatcagctgtgaggaggccacctgcagcgacaccagcgagagcatcctggaggaggagccccaggagaaccagaagaagctgctgcccctgtctgtgaccccagaggccttcagcggcaccgtcatcgagaaggagtttgtgagccccagcctgaccccacctccagccatcgcccacccagccctgcccaccatccctgagaggaaggaggtgctgctggaggccagcgaggagaccgggaagagggtgtccaagttcaaggccgcccggctgcagcagaaggactag

SEQ ID NO: 320145 - DNA, 1488 bp, Artificial Sequence
  derived and/or modified sequence
atgtggcggggctgcgcccggagccggaagcggaagaaggtggacaatgactacaatgcgctgagggagaggctttccactttaccggacaagctgtcttacaacatcatggttccatttggcccttttgcgtttatgcccggaaagttggtccacacgaatgaggtcacagtgctccttggcgataactggtttgcaaagtgcagcgctaaacaagccgtggggctagtggagcatcggaaagagcacgtccgaaaaacaatagatgatctcaagaaagtaatgaagaacttcgagagccgggtggaatttacagaggatctgcaaaaaatgtctgacgctgcaggagatatcgtggacatccgggaagaaatcaagtgtgatttcgaatttaaggcaaaacatcggatcgcccacaagccacactcgaaacccaagacttccgatatttttgaggctgatatcgcgaatgatgtgaaatcaaaagatttgttggctgacaaagaactatgggcccgactggaggagctggagagacaggaagagctgctgggcgaattggatagcaagcccgataccgtgatcgctaatggtgaagacacaacatcatctgaggaagaaaaagaagacagaaacacaaacgtcaacgcaatgcaccaggtgaccgacagccatacaccctgccacaaggacgtggctagtagtgagcctttctccggacaggtgaatagccagcttaactgttctgttaacggcagctcatcgtatcactccgatgatgatgatgacgacgacgacgatgatgacgatgataatatcgacgacgatgatggggataatgaccatgaggctctgggggtcggcgataacagcattcctactatctatttttctcacaccgtggaaccaaagcgggtgcgtatcaacacaggaaagaatactaccctcaaattttccgaaaaaaaagaagaagcaaagaggaaaagaaagaattctactggctcgggacactccgcacaagagctgcctactatccgcactcccgcggacatctaccgtgcttttgtggatgtggtgaacggggagtacgttcccaggaaatccatcttaaagtccagatcccgggaaaatagcgtttgctctgataccagtgagtcaagtgctgccgagttcgatgatagacgaggagtgctgagaagtatctcctgtgaagaagctacgtgtagcgacacaagcgaatcgatcctggaggaggagccccaggagaatcagaagaagttgctcccactgtcagttacccccgaagctttttctggaaccgtcattgagaaagaatttgtctctcccagtttaactccacccccagctatcgcacaccccgctcttcccacgataccagaacgcaaagaggttctgttagaagccagcgaggaaaccggtaagagggttagtaaattcaaggccgctagactgcagcaaaaggattag

SEQ ID NO: 320146 - DNA, 1380 bp, Artificial Sequence
  derived and/or modified sequence
atggtgcccttcggccccttcgccttcatgcccggcaagctggtgcacacaaatgaggtcacagtcctgcttggcgataattggttcgcaaagtgttcggcaaagcaagccgtcggcctggtggagcaccggaaagagcacgtgaggaaaacaatagatgacttaaaaaaggtgatgaaaaattttgagagccgggtcgagtttacagaagatctgcaaaagatgtctgatgcagctggcgatattgttgatattagggaggaaataaagtgtgacttcgagttcaaggccaagcaccggattgcccataagccccattcaaagccaaagacttcagatattttcgaggctgatattgccaatgatgtcaagagcaaagatctgctcgctgacaaagaattgtgggcgaggctggaagaacttgaaaggcaggaagagttgctcggagaactggactcaaaacctgataccgttattgccaatggcgaggataccacaagctcagaagaggagaaagaggatagaaacaccaatgtcaatgccatgcatcaggtgaccgattcacacacaccctgtcataaggatgtcgcatcttctgagccattttcggggcaggttaactcacagctgaattgcagtgtcaacggatcttccagctatcattccgacgacgacgacgacgacgacgatgatgacgacgatgataatattgacgacgacgatggcgataacgatcatgaggcgctgggcgtcggcgataattctattcccaccatctatttctcccatacagtcgagccaaaaagggtccgaatcaacactggtaaaaacaccactctgaaattttcagaaaaaaaagaggaggcaaagcgcaagcggaaaaatagtactggctcaggtcattccgctcaggagttgcctaccatcagaactccagccgacatctacagggcctttgttgacgttgtgaatggagagtacgtgcctaggaaaagcatcctgaagagtaggagcagggaaaattccgtatgctccgatacatcggagagtagtgcagccgaatttgacgacagaagaggggtgctgaggagtatttcctgcgaagaggcgacctgcagcgatacatcagagagcatcctggaggaagagccccaggagaaccagaagaagcttttgccactctccgtcactccagaagcatttagcgggactgtgatcgagaaggagttcgtgtctccgagtcttacacctccccctgccatcgcacaccctgcattgccaacaattccggagagaaaggaggttctccttgaggcgagcgaggaaactgggaaacgcgtcagcaaattcaaggctgcgagactccagcagaaagattag

SEQ ID NO: 320147 - DNA, 1488 bp, Artificial Sequence
  derived and/or modified sequence
atgtggaggggttgtgccaggtcaagaaaaagaaagaaggttgacaacgattataatgcactgcgtgagcgtctgagtacccttcctgacaagttgagctataatataatggtccctttcggcccattcgctttcatgccgggaaagctggtccataccaatgaagtgacagttcttcttggggataattggtttgctaaatgcagcgcgaagcaggcagtcggcttggtggagcatcgcaaagaacacgtacggaagacaatcgatgacctgaaaaaggtgatgaagaatttcgagtctcgggttgaattcaccgaagaccttcaaaagatgagcgatgccgctggtgatattgtggatattcgggaagagatcaaatgtgacttcgagttcaaggcaaagcacaggatagcccacaagccccactcgaagccaaaaacttctgatattttcgaggccgacatagcaaatgatgtgaaatctaaggatctgctggccgacaaggagctgtgggcccgactggaggagctagagaggcaagaggaactgctgggtgagttggatagcaaacccgataccgtgattgccaatggtgaggatacaacaagtagtgaggaggagaaggaggacagaaataccaatgtaaacgccatgcaccaggttaccgactctcatactccatgtcataaagacgtggcaagcagtgagcccttttcaggacaggtcaatagtcagctgaactgttctgtgaatgggtcgtcctcctaccactccgacgatgacgatgacgatgacgatgatgatgatgacgacaatatcgacgacgatgacggagataatgatcatgaggccctgggtgtgggagacaactcaataccgactatttactttagccataccgtggaacctaagcgagttaggatcaacacaggaaagaatactacccttaaattttccgaaaagaaggaagaagccaagcgcaaacggaaaaactcaacgggaagtggtcacagcgcccaggaattacccacaatccgcacgccagctgatatttaccgcgcatttgttgacgtggtgaacggagagtatgtgccacgaaagagcatcttgaagagtcggtctagagagaattcggtgtgctccgacacttccgagtctagcgccgcagagttcgatgacaggcgaggtgtcctcaggtctatatcttgtgaggaagccacttgcagcgacacatccgagagtattctggaggaggaaccccaagaaaaccagaagaagctgctcccactgagtgtcacacccgaggcttttagcggcaccgtcatcgagaaagaattcgtctctccttccttaacccccccacccgctatcgcccacccagctctgcccacaattcctgaaagaaaagaggtgcttctggaggccagtgaggagaccgggaagagagtcagtaagtttaaagccgctcgattgcagcagaaggattag

SEQ ID NO: 320148 - DNA, 1380 bp, Artificial Sequence
  derived and/or modified sequence
atggttcccttcggcccatttgcctttatgcccggaaaactcgtgcacaccaatgaggtcacggtgctattaggggacaactggtttgcaaagtgcagtgcaaaacaggccgtgggcctcgtggagcatcgtaaggagcatgtgagaaaaaccatcgacgatctgaagaaggtaatgaagaatttcgaaagtcgggtagaattcactgaggatctgcagaagatgtctgacgccgcaggtgacattgtggatattcgcgaagagatcaaatgtgattttgagttcaaagcaaagcatcggattgcacacaagccccacagcaaacccaaaaccagtgacatctttgaggccgatatcgcaaacgacgtaaagtctaaggatcttttggcagataaagagctgtgggctcggctggaggaactcgagcgccaggaggagctgcttggagagctggatagcaaacccgacacggtgatcgccaatggcgaggacactactagctccgaggaggagaaagaagatagaaacaccaacgtgaacgcaatgcaccaggtgaccgatagccacactccgtgtcacaaagatgtggcgagcagtgagcctttttccggacaagtgaatagtcagttaaactgcagcgttaatggcagttcctcctaccactcggacgacgacgacgacgacgatgacgacgacgacgatgataacattgacgacgatgacggcgacaacgatcatgaagctcttggggtgggagataactctattccaactatatacttttcccatacagtggagcccaagcgcgtgcggatcaacacaggcaaaaatactactctaaaattctccgagaaaaaagaggaggcaaagagaaaacgcaagaattctaccggctcgggtcacagtgctcaggagttgcccacgattaggacccctgctgatatctacagagcctttgtcgacgtggtgaacggagaatatgttcctcgcaaaagcatcctcaagtcaagatcaagagaaaacagtgtttgctccgatacaagcgagagttctgccgctgaatttgatgatcgtaggggcgtgctgagatcaatctcgtgcgaggaagcaacctgcagcgacacaagcgaaagcatactggaagaagagcctcaggagaaccaaaaaaagctcctccccctgtctgtgacacctgaggctttttccggcacggttatcgaaaaggagtttgtgtctccctccctgactccacccccagctatcgcgcaccctgccttaccaacaattccggagcgcaaggaggtcctgttagaggcatccgaagagacggggaaacgcgtaagtaagtttaaggccgcaagactacagcagaaggattag

SEQ ID NO: 320149 - DNA, 2238 bp, Artificial Sequence
  derived and/or modified sequence
acacgccgcgctgaggcccgcgggcccgtcatggaggcgcccaccgtggagacgccccccgacccctcgcccccttcggccccggcccctgccctggttccgttgcgcgccccggatgtggcgcggctgcgcgaggagcaggaaaaggaagaaggtagataatgactataatgcccttcgagaaagactcagcaccttgcctgataaattgtcttataatataatggtaccatttggcccttttgccttcatgccaggaaaacttgtccatactaatgaagtcactgttttactgggggacaactggtttgcaaagtgctcagcaaagcaggctgtaggtttagttgagcaccggaaagaacatgtaagaaaaacaatagatgacttaaaaaaagtgatgaaaaattttgaatccagagttgaattcacagaagatttgcagaaaatgagcgatgctgcaggtgatattgttgacatacgagaagaaattaaatgtgacttcgaatttaaagcaaaacaccgaattgctcataaaccgcattccaaaccaaaaacttcagatatttttgaagcagatattgcaaatgatgtgaaatccaaggatttgctagctgataaagaactgtgggctcgacttgaagaactagagagacaggaagaattgctgggtgaacttgatagtaagcctgatactgtgattgcaaatggagaagatacgacatcttctgaagaggaaaaggaagatcgtaacacaaatgtgaatgcgatgcatcaagtaacagactctcatactccttgtcataaggatgttgcaagttcagaaccattcagtggtcaagtgaatagtcagttgaactgttcagtgaatggttccagttcttaccacagtgatgatgatgatgatgatgatgatgacgacgacgacgacaacattgacgacgatgatggtgataacgaccatgaggctttaggggttggagataattctataccaacaatatatttttcacatactgttgagcctaagagggtccgaataaatactggaaagaataccactttaaaattcagtgaaaagaaagaagaagccaaacgtaaacgaaagaacagcactggcagtggccactctgcccaggagctgccgaccatcaggacgcctgcagacatttacagagcctttgttgatgttgtgaatggagaatatgtccctcgcaaatccatcctgaagtctcgaagtagagagaatagtgtgtgtagcgacactagtgaaagcagtgctgctgaatttgatgataggcggggagttttgaggagtatcagctgcgaagaagccacttgcagtgacaccagtgagagcattttggaagaggaaccacaagaaaatcaaaagaaacttttgcccttatcagtaacacctgaggctttttctggaactgttatagaaaaagaatttgtatcaccttccttaacaccacccccagccattgctcatcccgcactacccactattccagaacgaaaggaagttctgttggaagcatctgaagaaactggaaagagggtttcaaagtttaaagctgccagattgcaacagaaagactaggccctgtctaggaaatgggaatttacatcctaaaacctagttgttcatttgtttagagtatctatagcaaaataggttacatgtagtttgaaataaggtatcctgagttactttggcaacaagttcttttacccttacccgtggtatttgaaaaaaatcaaggtaactgtctgaatactttaatatcagcttgttttgtgaattctctgaatactgtcaacactcttatctaagtttgcctttatgatgcagtggcagcattttgaattacttttcaaagaatactgttcatatgcattgtttttgtgtttcaaactaaatacaggcagttttgtgccagctgtgatattgtgcataccatatggaccattttaaagaaaattttaaaatttcaaatagattcaacaattacattacttgctttcacattttaaaggcactttaaaaaaatctacttctcttgtaggttttgcggctagttggctattcaagaaacctcgcccctctgaatgtcatactgtaatctttaaggaagaaagctacatgaattaattgtactctatgggaaaatttctttggaaagatattttgtaaaacttttttttccaagtaaaaactttatgaaacttggtctc

SEQ ID NO: 320150 - DNA, 1488 bp, Artificial Sequence
  derived and/or modified sequence
atgtggagaggctgcgccagaagcagaaagagaaagaaggtggacaacgactacaacgccctgagagagagactgagcaccctgcccgacaagctgagctacaacatcatggtgcccttcggccccttcgccttcatgcccggcaagctggtgcacaccaacgaggtgaccgtgctgctgggcgacaactggttcgccaagtgcagcgccaagcaggccgtgggcctggtggagcacagaaaggagcacgtgagaaagaccatcgacgacctgaagaaggtgatgaagaacttcgagagcagagtggagttcaccgaggacctgcagaagatgagcgacgccgccggcgacatcgtggacatcagagaggagatcaagtgcgacttcgagttcaaggccaagcacagaatcgcccacaagccccacagcaagcccaagaccagcgacatcttcgaggccgacatcgccaacgacgtgaagagcaaggacctgctggccgacaaggagctgtgggccagactggaggagctggagagacaggaggagctgctgggcgagctggacagcaagcccgacaccgtgatcgccaacggcgaggacaccaccagcagcgaggaggagaaggaggacagaaacaccaacgtgaacgccatgcaccaggtgaccgacagccacaccccctgccacaaggacgtggccagcagcgagcccttcagcggccaggtgaacagccagctgaactgcagcgtgaacggcagcagcagctaccacagcgacgacgacgacgacgacgacgacgacgacgacgacgacaacatcgacgacgacgacggcgacaacgaccacgaggccctgggcgtgggcgacaacagcatccccaccatctacttcagccacaccgtggagcccaagagagtgagaatcaacaccggcaagaacaccaccctgaagttcagcgagaagaaggaggaggccaagagaaagagaaagaacagcaccggcagcggccacagcgcccaggagctgcccaccatcagaacccccgccgacatctacagagccttcgtggacgtggtgaacggcgagtacgtgcccagaaagagcatcctgaagagcagaagcagagagaacagcgtgtgcagcgacaccagcgagagcagcgccgccgagttcgacgacagaagaggcgtgctgagaagcatcagctgcgaggaggccacctgcagcgacaccagcgagagcatcctggaggaggagccccaggagaaccagaagaagctgctgcccctgagcgtgacccccgaggccttcagcggcaccgtgatcgagaaggagttcgtgagccccagcctgacccccccccccgccatcgcccaccccgccctgcccaccatccccgagagaaaggaggtgctgctggaggccagcgaggagaccggcaagagagtgagcaagttcaaggccgccagactgcagcagaaggactag

SEQ ID NO: 320151 - protein, 818 aa, Artificial Sequence
  derived and/or modified sequence
MALTQVRLTFRDVAIEFSQEEWKCLDPAQRILYRDVMLENYWNLVSLGLCHFDMNIISMLEEGKEPWTVKSCVKIARKPRTPECVKGVVTDIPPKCTIKDLLPKEKSSTEAVFHTVVLERHESPDIEDFSFKEPQKNVHDFECQWRDDTGNYKGVLMAQKEGKRDQRDRRDIENKLMNNQLGVSFHSHLPELQLFQGEGKMYECNQVEKSTNNGSSVSPLQQIPSSVQTHRSKKYHELNHFSLLTQRRKANSCGKPYKCNECGKAFTQNSNLTSHRRIHSGEKPYKCSECGKTFTVRSNLTIHQVIHTGEKPYKCHECGKVFRHNSYLATHRRIHTGEKPYKCNECGKAFRGHSNLTTHQLIHTGEKPFKCNECGKLFTQNSHLISHWRIHTGEKPYKCNECGKAFSVRSSLAIHQTIHTGEKPYKCNECGKVFRYNSYLGRHRRVHTGEKPYKCNECGKAFSMHSNLATHQVIHTGTKPFKCNECSKVFTQNSQLANHRRIHTGEKPYKCNECGKAFSVRSSLTTHQAIHSGEKPYKCIECGKSFTQKSHLRSHRGIHSGEKPYKCNECGKVFAQTSQLARHWRVHTGEKPYKCNDCGRAFSDRSSLTFHQAIHTGEKPYKCHECGKVFRHNSYLATHRRIHTGEKPYKCNECGKAFSMHSNLTTHKVIHTGEKPYKCNQCGKVFTQNSHLANHQRTHTGEKPYRCNECGKAFSVRSSLTTHQAIHTGKKPYKCNECGKVFTQNAHLANHRRIHTGEKPYRCTECGKAFRVRSSLTTHMAIHTGEKRYKCNECGKVFRQSSNLASHHRMHTGEKPYK

SEQ ID NO: 320152 - DNA, 2457 bp, Artificial Sequence
  derived and/or modified sequence
atggccctgacccaggtgagactgaccttcagagacgtggccatcgagttcagccaggaggagtggaagtgcctggaccccgcccagagaatcctgtacagagacgtgatgctggagaactactggaacctggtgagcctgggcctgtgccacttcgacatgaacatcatcagcatgctggaggagggcaaggagccctggaccgtgaagagctgcgtgaagatcgccagaaagcccagaacccccgagtgcgtgaagggcgtggtgaccgacatcccccccaagtgcaccatcaaggacctgctgcccaaggagaagagcagcaccgaggccgtgttccacaccgtggtgctggagagacacgagagccccgacatcgaggacttcagcttcaaggagccccagaagaacgtgcacgacttcgagtgccagtggagagacgacaccggcaactacaagggcgtgctgatggcccagaaggagggcaagagagaccagagagacagaagagacatcgagaacaagctgatgaacaaccagctgggcgtgagcttccacagccacctgcccgagctgcagctgttccagggcgagggcaagatgtacgagtgcaaccaggtggagaagagcaccaacaacggcagcagcgtgagccccctgcagcagatccccagcagcgtgcagacccacagaagcaagaagtaccacgagctgaaccacttcagcctgctgacccagagaagaaaggccaacagctgcggcaagccctacaagtgcaacgagtgcggcaaggccttcacccagaacagcaacctgaccagccacagaagaatccacagcggcgagaagccctacaagtgcagcgagtgcggcaagaccttcaccgtgagaagcaacctgaccatccaccaggtgatccacaccggcgagaagccctacaagtgccacgagtgcggcaaggtgttcagacacaacagctacctggccacccacagaagaatccacaccggcgagaagccctacaagtgcaacgagtgcggcaaggccttcagaggccacagcaacctgaccacccaccagctgatccacaccggcgagaagcccttcaagtgcaacgagtgcggcaagctgttcacccagaacagccacctgatcagccactggagaatccacaccggcgagaagccctacaagtgcaacgagtgcggcaaggccttcagcgtgagaagcagcctggccatccaccagaccatccacaccggcgagaagccctacaagtgcaacgagtgcggcaaggtgttcagatacaacagctacctgggcagacacagaagagtgcacaccggcgagaagccctacaagtgcaacgagtgcggcaaggccttcagcatgcacagcaacctggccacccaccaggtgatccacaccggcaccaagcccttcaagtgcaacgagtgcagcaaggtgttcacccagaacagccagctggccaaccacagaagaatccacaccggcgagaagccctacaagtgcaacgagtgcggcaaggccttcagcgtgagaagcagcctgaccacccaccaggccatccacagcggcgagaagccctacaagtgcatcgagtgcggcaagagcttcacccagaagagccacctgagaagccacagaggcatccacagcggcgagaagccctacaagtgcaacgagtgcggcaaggtgttcgcccagaccagccagctggccagacactggagagtgcacaccggcgagaagccctacaagtgcaacgactgcggcagagccttcagcgacagaagcagcctgaccttccaccaggccatccacaccggcgagaagccctacaagtgccacgagtgcggcaaggtgttcagacacaacagctacctggccacccacagaagaatccacaccggcgagaagccctacaagtgcaacgagtgcggcaaggccttcagcatgcacagcaacctgaccacccacaaggtgatccacaccggcgagaagccctacaagtgcaaccagtgcggcaaggtgttcacccagaacagccacctggccaaccaccagagaacccacaccggcgagaagccctacagatgcaacgagtgcggcaaggccttcagcgtgagaagcagcctgaccacccaccaggccatccacaccggcaagaagccctacaagtgcaacgagtgcggcaaggtgttcacccagaacgcccacctggccaaccacagaagaatccacaccggcgagaagccctacagatgcaccgagtgcggcaaggccttcagagtgagaagcagcctgaccacccacatggccatccacaccggcgagaagagatacaagtgcaacgagtgcggcaaggtgttcagacagagcagcaacctggccagccaccacagaatgcacaccggcgagaagccctacaagtag

SEQ ID NO: 320153 - DNA, 2457 bp, Artificial Sequence
  derived and/or modified sequence
atggccctgacacaggtcagactgactttcagggacgtcgcaatagaattctcccaggaggagtggaagtgtctcgacccagcgcagcgcattttataccgcgacgtgatgctcgagaactattggaacctggtaagtttagggctctgccacttcgacatgaacatcatttcaatgctggaggagggcaaagaaccttggacagtcaagagctgtgtgaaaattgcacgcaagcctcgaactcctgaatgtgtaaagggggtcgtgactgatatccccccgaagtgcactattaaggacctgctccccaaagagaagtcttcaacagaggctgtgtttcacaccgtggtgctggagcggcacgaatctcctgatattgaggattttagctttaaggaaccccagaaaaacgttcatgacttcgagtgccagtggcgagacgacactgggaattataaaggtgtcttgatggcacaaaaagaaggtaaacgcgatcagcgggatcgacgggacatcgagaacaagttgatgaacaatcaactgggagtttcttttcacagccatctgcctgagctgcagctgtttcagggggaggggaagatgtatgaatgtaaccaggtagaaaaaagcaccaacaatggtagttcggtgtctcctcttcagcagattccaagcagtgtccagacccatcgttccaagaagtatcatgaactcaaccacttttctctgctgactcaacggcggaaggccaactcttgcggcaagccatataagtgcaacgagtgtggcaaggcatttactcagaactctaatctgaccagtcaccgaaggattcatagtggtgagaaaccctataagtgttccgagtgcggcaagacgttcaccgtccgctctaaccttacgatccaccaggtaatccatacaggagagaagccatacaaatgccatgaatgcggtaaggttttcaggcacaatagttacctggctacacacagaaggatccatacaggagaaaagccctacaagtgcaacgagtgcggcaaggctttcaggggacactccaacctgacaacccatcagctaatccacacaggtgagaagccattcaaatgcaatgagtgcggcaagctctttacacagaacagccatcttatttctcactggaggatacacaccggcgaaaaaccctacaaatgcaacgagtgtggcaaggccttttcagtgagaagcagcctcgctatccatcagacaatacataccggagaaaagccatacaagtgcaacgaatgcgggaaggtcttccggtataatagttaccttggcaggcatcggcgcgtgcataccggggagaaaccatacaagtgtaatgagtgtgggaaagcttttagcatgcactctaatctcgcgacgcaccaggtaatacacacaggaacaaaaccattcaagtgtaatgaatgcagcaaagttttcactcagaattcccagctggcaaaccaccggaggatacacacaggcgagaagccctataagtgtaacgaatgtggcaaagccttctctgtgagatcgagcctaactacgcaccaggccattcacagcggcgaaaagccatacaaatgcatagaatgcggcaagagcttcacacagaaatcacacctgcgctctcacagaggaatccactcgggtgagaaaccctacaagtgcaacgagtgcgggaaggtttttgcacagactagccagctggcccgccattggcgagtccatactggcgagaagccatataagtgtaacgattgtggaagggcctttagtgaccggagttccctgactttccatcaggctatacatactggggaaaagccatacaagtgtcacgaatgtggaaaggtgttccgtcacaacagctacctcgcaactcaccgacgcatccacactggggagaaaccttataaatgcaacgaatgcggcaaggcattcagtatgcacagtaacctgaccactcataaggtgatacacaccggcgaaaagccatacaaatgcaaccagtgtggcaaagtgtttacccagaattctcacttagccaaccaccagagaacccacactggcgaaaagccctatcgttgcaatgagtgtggtaaggcattttctgtgcggagctcactgacaacacatcaagctatccacacaggaaaaaagccatataagtgcaacgaatgtggaaaagtcttcacccagaatgcccacttagcaaatcaccggcgcatccacactggggagaagccttacaggtgcactgagtgtgggaaggcattcagggtcagaagtagcctgacaactcatatggcaatccacactggcgagaagagatacaagtgtaacgaatgcggaaaagtcttcagacagtccagcaaccttgcgtcacaccaccgaatgcataccggcgaaaaaccctacaagtag

SEQ ID NO: 320154 - DNA, 2457 bp, Artificial Sequence
  derived and/or modified sequence
atggcccttacacaggtcaggttgacgtttagggacgtcgctattgaattctcccaagaagagtggaaatgccttgaccccgcccagcgcattctgtatagagacgtaatgctggaaaactattggaatctggtgagcctgggactgtgccatttcgatatgaacataatatctatgctggaggaaggtaaggaaccttggaccgtaaagtcttgcgtgaagattgctagaaaacctcgaacacctgaatgtgtgaaaggtgtggttaccgatatcccacccaaatgcactatcaaagacttgctgcctaaggagaagagctccacagaagctgtttttcacaccgtcgttttggagaggcatgaaagccccgatatagaggatttctcatttaaagagcctcagaagaacgttcacgattttgagtgccagtggcgggacgacaccggcaattataaaggagttctgatggctcaaaaggagggtaaaagggaccaacgggatcgacgggatattgagaacaagctgatgaacaaccagctgggcgtcagtttccatagccatctgcccgagctgcagctgttccagggcgagggaaagatgtacgagtgtaaccaggtggaaaaatctacaaataacgggtcgtctgtgtctcctctacagcaaatccccagcagcgtgcagacacaccgcagcaagaagtaccacgagttaaaccattttagcctccttacccagcgtcggaaggctaactcttgcggaaagccttataaatgcaatgagtgtggcaaggcttttacccagaactcaaatctgacctcccaccgacgcattcattctggcgagaagccctacaaatgttcagagtgtgggaagacctttacagtgaggagcaacctgactattcatcaggtgatccatacaggggagaagccatataagtgccacgagtgtgggaaagtgtttcgtcataactcttatctggctacccatcgcagaatccacaccggggaaaagccatacaagtgtaacgagtgtgggaaagcctttcgaggacactctaatttaactacacaccaactcatccacactggggaaaagcccttcaagtgcaacgaatgcggcaagctgttcacccaaaattctcacctcattagtcattggcgtatccacacaggagagaagccttataaatgtaacgagtgtggcaaagccttcagtgtcagaagttctctggccattcaccagacaatacacactggagaaaaaccgtacaaatgcaatgagtgtgggaaagtttttaggtataattcctacctcgggagacaccggcgtgtgcacacaggagagaaaccctataaatgcaatgagtgtgggaaagctttctccatgcatagcaacctagcaacccaccaggtcatccacacagggacgaaacccttcaaatgcaatgaatgtagcaaagtgttcacccagaattcacagctggccaatcaccgccgcatccacacgggtgaaaaaccctacaaatgcaacgaatgcggaaaagccttcagcgtgagatcctcactgactactcaccaagcgatacacagcggagagaagccttacaaatgtattgagtgtggtaaaagttttacccagaagtcgcacctccgcagccatcgcggcatacacagcggagagaaaccttacaaatgcaacgaatgcgggaaagtcttcgcccagacatcccagcttgcccgacactggcgtgtgcataccggggaaaaaccttacaaatgcaatgattgcggcagagctttcagtgatcgctcctctctcacatttcatcaggccatacacaccggggagaaaccatacaagtgtcacgaatgcggcaaagtcttccgtcacaactcatacctcgccacacaccggcgcatccatactggggaaaaaccttacaagtgcaatgagtgcgggaaagcctttagtatgcactcgaaccttaccactcataaggtgatccacactggagagaaaccatacaagtgcaaccagtgtggaaaggttttcacccagaattctcatctggccaaccaccagagaacccacacaggcgagaaaccctaccgctgcaacgagtgtggtaaggccttttccgttagatcaagcctgactactcaccaggctattcatactgggaaaaagccatacaagtgcaacgaatgcggcaaggtgttcacccaaaacgcacaccttgcgaaccatcgcagaatccatactggggagaagccttacagatgtacagagtgcggaaaagcattccgggtcagatctagcctgacgacacacatggctatccacaccggagaaaaacggtataagtgcaatgaatgtggcaaggtctttcgccagtctagtaatctcgccagccatcatcggatgcatacgggagaaaaaccttataagtag

SEQ ID NO: 320155 - DNA, 2457 bp, Artificial Sequence
  derived and/or modified sequence
atggccctcactcaagtacggctgacatttagggacgttgcaattgagtttagccaggaggaatggaaatgtctagaccctgcccaacggatcctgtaccgcgacgtcatgttggaaaactactggaatctagtgtcactgggcctttgccattttgatatgaatataatcagcatgctggaggagggcaaagagccatggactgtgaagagttgtgtgaaaattgctagaaaaccgaggacgcccgagtgtgtaaaaggagtggtgaccgatatcccccccaaatgcactataaaagatttgttgccaaaagagaaaagttccaccgaggctgtttttcatacggttgtcttagagcggcacgagagtcccgatatcgaagatttttcatttaaagagccacagaagaatgtccacgattttgaatgtcaatggcgtgatgacaccggtaattataaaggggtgttgatggctcagaaggagggaaaacgcgaccagcgggatagacgggatattgaaaacaaactgatgaacaatcaattaggggtatcgttccacagccacctccccgaactccaactttttcagggagaggggaaaatgtacgagtgcaaccaggttgaaaaaagcactaataatggatcatcagtgagcccacttcaacagattcccagcagtgtccagacacatcgcagcaagaagtatcacgagttgaaccatttcagcctgttgacccagcgacgaaaggcgaatagctgtggcaagccttacaaatgtaacgagtgtgggaaggctttcacacagaattccaacctcacctcacatcgaaggatacatagtggagagaaaccatacaaatgctctgagtgcggcaagaccttcacggttcggtctaacctaactattcaccaagtgatccataccggtgagaagccatataagtgccatgagtgtggaaaggtctttaggcacaatagttacctggcaacccaccgacggatccataccggagaaaagccatataagtgcaacgagtgtggtaaggcttttcgcgggcacagcaatctgactacccaccagctcatacacacgggagagaagccttttaagtgcaacgagtgtggcaagttgtttacacagaacagccatctcatttcacattggcgcattcatactggcgaaaagccctataagtgcaacgagtgtggtaaggcttttagcgttaggagttccctggcgattcaccagaccatccatacaggtgagaagccctacaaatgtaacgagtgtgggaaagtgttcaggtataacagttacctcggaaggcatagacgagtgcataccggagagaaaccgtataagtgtaacgagtgcgggaaggccttcagtatgcattccaacttggccacccaccaagtcatccatacgggaactaagccttttaagtgtaacgaatgtagtaaggtttttacacagaattcacagctggcgaatcacagacggattcacactggcgagaagccctataaatgcaatgagtgcggcaaagcattcagcgtgagatcatccctcaccacgcaccaagccatccactctggcgagaagccatacaagtgcatcgagtgtgggaaaagtttcacacagaagtcgcacctccgaagccaccgcgggatacactcgggagaaaaaccctataaatgtaacgagtgcggcaaggtcttcgcccaaacctcccagttggcacgccactggagagtgcacaccggggagaagccctacaagtgcaacgactgtggcagagcttttagtgaccggtcctcattaacatttcatcaagcaattcacaccggggagaaaccatacaaatgccatgaatgcggaaaggtgttccggcataattcctatctcgcaactcacaggagaatccacacaggagagaagccctataaatgcaatgagtgtggtaaggcgttcagtatgcattctaatctcactactcataaggtaattcacaccggggaaaagccatataaatgtaaccagtgcggcaaggtttttacccagaattcccacctggctaatcatcagaggacgcacacaggagagaagccttacagatgtaacgagtgcggcaaggccttcagcgtgcgaagttcccttactacacatcaggccatccacactggcaagaagccctacaagtgtaacgaatgcgggaaagtgtttacccagaacgcccacctggctaatcatcgccggatccatacgggagagaagccctaccgctgtactgagtgtggcaaggccttccgggttaggtcttccttgactactcatatggcgatacataccggggagaagaggtataagtgcaacgagtgtggcaaagtcttccgccaatcctccaatctggcaagtcatcacagaatgcataccggcgaaaaaccctacaaatag

SEQ ID NO: 320156 - DNA, 2457 bp, Artificial Sequence
  derived and/or modified sequence
atggccctgacccaggtgcggctgaccttcagagatgtggccatcgagttcagccaggaggagtggaagtgcctggaccctgcccagaggatcctgtacagagatgtgatgctggagaactactggaacctggtgtccctgggcctgtgccactttgacatgaacatcatctccatgctggaggagggcaaggagccctggacagtgaagagctgtgtgaagatcgccaggaagcccaggaccccagaatgtgtgaagggcgtggtgacagacatcccccccaagtgcaccatcaaggacctgctgcccaaggagaagagcagcacagaagctgtgttccacacagtggtgctggagagacatgagagcccagacatcgaggacttctccttcaaggagccccagaagaatgtgcatgactttgagtgccagtggagagatgacaccggcaactacaagggcgtgctgatggcccagaaggagggcaagagggaccagagggacagaagagacatcgagaacaagctgatgaacaaccagctgggcgtgtccttccacagccacctgcctgagctgcagctgttccagggcgagggcaagatgtatgagtgcaaccaggtggagaagagcaccaacaacggcagctctgtgagccccctgcagcagatccccagctctgtgcagacccacaggagcaagaagtaccacgagctgaaccacttcagcctgctgacccagaggaggaaggccaacagctgtgggaagccctacaagtgcaatgaatgtgggaaggccttcacccagaacagcaacctgaccagccaccggcgcatccacagcggggagaagccctacaagtgcagtgaatgtgggaagaccttcaccgtgcgcagcaacctgaccatccaccaggtgatccacactggagagaagccctacaagtgccatgaatgtgggaaggtgttccgccacaacagctacctggccacccaccggcgcatccacactggagagaagccctacaagtgcaatgaatgtgggaaggccttccggggccacagcaacctgaccacccaccagctgatccacactggagagaagcccttcaagtgcaatgaatgtgggaagctgttcacccagaacagccacctgatcagccactggaggatccacactggagagaagccctacaagtgcaatgaatgtgggaaggccttctctgtgcgcagcagcctggccatccaccagaccatccacactggagagaagccctacaagtgcaatgaatgtgggaaggtgttccgctacaacagctacctgggccgccaccggcgggtgcacactggagagaagccctacaagtgcaatgaatgtgggaaggccttctccatgcacagcaacctggccacccaccaggtgatccacacaggcaccaagcccttcaagtgcaatgaatgttccaaggtgttcacccagaacagccagctggccaaccaccggcgcatccacactggagagaagccctacaagtgcaatgaatgtgggaaggccttctctgtgcgcagcagcctgaccacccaccaggccatccacagcggggagaagccctacaagtgcattgaatgtgggaagagcttcacccagaagagccacctgcggagccaccggggcatccacagcggggagaagccctacaagtgcaatgaatgtgggaaggtgtttgcccagaccagccagctggcccggcactggagggtgcacactggagagaagccctacaagtgcaatgactgtggccgggccttcagtgacaggagcagcctgaccttccaccaggccatccacactggagagaagccctacaagtgccatgaatgtgggaaggtgttccgccacaacagctacctggccacccaccggcgcatccacactggagagaagccctacaagtgcaatgaatgtgggaaggccttctccatgcacagcaacctgaccacccacaaggtgatccacactggagagaagccctacaagtgcaaccagtgtgggaaggtgttcacccagaacagccacctggccaaccaccagaggacccacactggagagaagccctaccgctgcaatgaatgtgggaaggccttctctgtgcgcagcagcctgaccacccaccaggccatccacacaggcaagaagccctacaagtgcaatgaatgtgggaaggtgttcacccagaatgcccacctggccaaccaccggcgcatccacactggagagaagccctaccgctgcacagaatgtgggaaggccttccgggtgcgcagcagcctgaccacccacatggccatccacactggagagaagcgctacaagtgcaatgaatgtgggaaggtgttccggcagagcagcaacctggccagccaccacaggatgcacactggagagaagccctacaagtag

SEQ ID NO: 320157 - DNA, 2457 bp, Artificial Sequence
  derived and/or modified sequence
atggccctgacccaggtgcggctgaccttccgggacgtggccatcgaattttctcaggaagaatggaaatgcctggatccggcacagagaatcctgtacagggacgtcatgctagagaattactggaatttagtatcattaggactgtgccacttcgatatgaatattatctcaatgctggaagagggtaaggagccctggacagttaagtcgtgcgtgaagatcgcacgcaaaccacgcactccagaatgcgtgaagggcgtcgtgacagacattcctcctaagtgcacaattaaggatctgttacctaaggagaaaagtagcacagaggcggtgtttcacaccgtcgtcttggaacgccacgaaagccctgatatcgaggatttctcatttaaagagccccaaaaaaacgtgcatgatttcgaatgccaatggagggacgacaccggcaattataaaggagtactgatggctcaaaaggagggaaagcgcgaccagcgtgataggagggatatagaaaataaacttatgaacaaccagctcggagtgtccttccactctcatctgcccgagctccagctgttccagggggagggtaaaatgtacgagtgcaaccaggtcgaaaagtcaacgaataacggtagcagcgtgtctccgttgcagcagattccctcaagcgtgcaaacacacagatcaaaaaagtatcacgaactgaatcatttctctctgctcactcaacggcgaaaggccaactcctgcggcaagccctataagtgtaacgaatgtggcaaggctttcacgcaaaatagcaatctgactagtcatcggagaatccactccggcgaaaaaccatataagtgctctgagtgcggcaagaccttcaccgtgcggtcaaatctgacaatccaccaggtgatccatacaggtgaaaagccttacaaatgccacgaatgcggaaaagtttttaggcataattcttatttagccactcatcggcgtatacataccggggagaagccctacaagtgcaacgagtgtggcaaggcctttagaggtcatagcaacctcaccactcaccagctgatccacacaggcgagaagccattcaaatgtaacgagtgtgggaaacttttcacacagaattctcatctgataagccattggcggattcacacgggagagaagccatacaagtgtaacgaatgcgggaaggctttcagtgtgagatctagtctggcgatccaccagactatccacaccggcgagaaaccctataaatgtaatgaatgcggtaaggtgttccgttacaactcgtatctggggcgacaccgacgggtgcatacaggtgagaaaccgtacaaatgcaatgagtgtggtaaagccttcagcatgcactcaaacctcgccacccatcaggtcattcataccgggactaagccctttaaatgcaacgaatgttccaaggtttttactcagaatagtcagttagctaatcaccgaaggattcatacgggcgagaagccctacaagtgcaacgaatgtgggaaagcattcagcgttcgttctagcttgactacccaccaggcaatccattccggcgaaaagccatacaagtgtatcgagtgcggtaagtcctttacccagaaatcccacctacggagccatagggggattcatagcggcgagaagccttataagtgcaacgagtgtggcaaggtctttgcacagactagccaacttgccaggcactggcgggttcacacaggagaaaaaccttataaatgtaacgactgcgggagagcattcagcgataggtcaagtctaacattccatcaggccatccataccggtgagaaaccatataagtgccacgaatgtggaaaagtgttccggcacaatagctaccttgctacccatcgccgcattcacaccggcgaaaaaccatataaatgtaacgaatgtggtaaggcgttttctatgcactcaaacctgacaacccacaaagtaatccatacaggtgaaaaaccatacaaatgcaaccaatgcggaaaagtcttcactcagaattcccatctcgcaaatcaccaacggacccatactggagaaaagccctatcggtgtaacgagtgcggcaaagccttcagtgtgagaagttcattgactacacatcaggctattcacaccggcaaaaaaccttacaagtgcaacgagtgcggcaaagtcttcacacagaacgcacatctcgcaaatcaccggagaatccatacaggagaaaagccatacagatgcactgagtgcgggaaagcttttcgagtcaggagcagcttgactacccacatggccatccacacaggcgagaaacgatacaaatgcaatgagtgcggcaaagttttccggcagtcttcaaacctggccagtcatcaccgcatgcatacaggcgaaaagccttataagtag

SEQ ID NO: 320158 - DNA, 2457 bp, Artificial Sequence
  derived and/or modified sequence
atggccctgacccaggtgcggctgaccttccgggacgtggccatcgagtttagtcaagaagagtggaagtgcctcgacccggcccaaagaattctgtatcgggacgtcatgttagagaattactggaacttggtgtctctggggctttgccacttcgacatgaacattataagtatgctcgaagagggtaaggagccctggaccgtgaagtcttgcgttaagatcgcaaggaagcccagaacacccgagtgcgttaagggggtggtgacagatatccccccgaagtgtactataaaggatctgctgccgaaggaaaaatctagcaccgaagcagtgttccacaccgttgtcctggagaggcatgaaagccccgacatcgaggacttctctttcaaagaaccccagaagaacgtgcacgattttgaatgtcagtggagagacgacacagggaattataagggggttctgatggcccaaaaagagggaaagcgggaccaacgagatcgtagggatattgagaacaagctgatgaacaaccagctcggtgtgtcatttcactctcacctgccagagctccagttatttcagggcgaggggaaaatgtacgagtgtaatcaagtggaaaagtcaaccaataatggaagttccgtctcacctctccagcagattcccagttctgttcagacccacagaagtaagaagtatcacgagcttaatcacttcagcctcctgacacagcggaggaaggcaaactcttgtgggaagccatacaaatgcaatgaatgtggtaaggcctttacacaaaatagtaatctgacgtcccatcgccggatccattctggggagaaaccgtataagtgcagcgagtgtgggaagactttcaccgtccgctcaaatttgacaattcatcaggtcatccatactggcgaaaagccttataagtgtcatgagtgcgggaaagtgtttcggcataattcgtaccttgccacccatcgccgcatccatactggagagaagccctataaatgtaacgaatgcggcaaggcttttaggggccactctaacctgaccacacatcagctaatccataccggcgagaagccctttaaatgcaatgagtgtggaaagctgtttacacagaacagtcatctgatcagccactggaggatccacacgggtgaaaaaccatacaagtgcaacgagtgcggaaaagcattcagcgtgcgctccagtttggccattcatcagaccatacatacaggagagaagccctataaatgtaacgagtgcgggaaagtctttcgctataactcttacttgggaagacatcgtcgagtgcatacaggcgagaaaccctacaagtgtaacgagtgcggaaaggctttctccatgcactctaatctggctacacaccaggtaattcacacaggaactaagccatttaagtgcaacgagtgcagcaaggttttcacacagaattcccagcttgccaatcacagacggattcacaccggcgagaagccttacaagtgtaatgaatgcgggaaagctttttctgtgcgatcgtccctaactactcatcaggcaatccatagcggcgagaaaccgtataaatgtatagaatgcgggaaaagctttactcagaaatcgcatttacgctcacatcgagggattcactcaggcgaaaaaccttacaagtgtaacgaatgtggcaaggtgtttgcccagacgtcgcagcttgctagacactggcgggtgcacactggcgagaaaccctacaaatgtaacgattgtggacgcgcattctcagatcgctcttccttgacctttcaccaggccattcacaccggcgagaagccgtataaatgccacgaatgtgggaaggtctttaggcacaattcctatctggccacccacagaaggatacataccggcgaaaagccctataaatgtaacgagtgcggaaaggctttttcaatgcactctaacctgactacccacaaggttatccacactggcgaaaagccttacaagtgtaatcagtgcggtaaagtgtttacccaaaatagtcacttagctaaccatcagcggacccataccggcgagaagccctaccgctgtaatgaatgtggtaaggccttctccgttagaagttctcttacaactcaccaagccattcatacaggcaaaaagccttataagtgcaacgagtgcggcaaagtgtttactcagaatgctcatctggctaatcaccggcgcatccacactggggagaagccataccgctgtacggaatgcggcaaagcctttcgggtccgctccagcctgacgacacatatggcaatccataccggggaaaaacgctataagtgtaacgagtgcggaaaggtttttcggcagagctctaatctcgcaagtcatcaccgcatgcatacaggggaaaagccatacaaatag

SEQ ID NO: 320159 - DNA, 2457 bp, Artificial Sequence
  derived and/or modified sequence
atggccctgacccaggtgcggctgaccttccgggacgtggccatcgagttcagccaggaggagtggaagtgtctcgatccagcccaacgaattttatatcgggatgtgatgcttgagaattactggaatctcgtgtcattaggcttgtgccattttgacatgaacatcatcagcatgctcgaagaggggaaagagccttggaccgtgaagtcttgcgtaaagatcgcgagaaagccccggacccccgagtgtgtgaaaggagtagttaccgatattccaccaaaatgtaccatcaaggatctgctgcccaaagagaagtcatctacagaagccgtgtttcatacagttgttttagaaaggcacgaatcccctgatatcgaggacttttcttttaaggaaccacagaagaacgttcatgatttcgagtgtcagtggcgagatgataccgggaactataaaggggtcctcatggcccagaaggaaggcaagagggatcagcgagatcgcagggacatagaaaataaattgatgaataaccaacttggagtgagcttccatagccatcttccagagcttcagcttttccagggggagggtaaaatgtatgagtgtaatcaggtcgagaagagcaccaataatggtagcagcgtgtcccccctgcaacaaataccctcctcggtgcaaacacaccgctctaaaaagtaccacgaattgaatcatttctctctactgactcaacggaggaaagctaacagctgcggcaagccctacaagtgtaacgaatgcggcaaagcctttacccagaattcaaaccttacatcacaccggcggattcacagtggcgagaaaccttataaatgcagcgaatgtggcaaaacgttcacagtgcgaagtaaccttactatccaccaagtaattcatacaggcgaaaagccttacaagtgccatgaatgcggaaaggtgttcagacacaactcctacctggctacccacaggcggatccacacgggcgagaaaccttataagtgcaatgaatgcggaaaggccttccgcgggcatagcaacctgaccacacatcagcttattcacactggtgaaaagccgttcaagtgtaatgaatgcggaaagcttttcacccagaacagtcacctgatcagccactggaggatacataccggggaaaaaccatacaaatgcaacgagtgtggtaaggctttctcagtccgatcttctttagccattcatcaaacaatccatactggagagaagccctataaatgtaacgaatgtggcaaggtgttcagatataacagttaccttggaaggcacaggagagtccacacgggagagaagccgtataaatgcaatgagtgtggaaaagcattttctatgcactcaaacttggcaacccaccaagtgatccatactggaactaaaccattcaagtgtaatgagtgtagcaaagtcttcacacaaaatagccagttagccaaccataggcggatacacacaggagagaagccttacaagtgcaatgaatgtgggaaggcattcagcgtgaggagctctctgacaacacatcaagccatacactctggcgagaagccttacaaatgtattgagtgtggcaagagtttcacccagaagagtcacctgagaagtcatagaggtatccactctggcgagaagccctacaagtgcaatgagtgcggcaaagtattcgcccaaacatctcagcttgctagacactggcgtgtacatactggcgaaaagccatataaatgcaacgactgcgggcgagcatttagtgatcgctcatcattgacattccaccaagccatccatacaggagagaagccttataagtgtcacgaatgtggcaaagtcttcagacataacagctatctggctactcaccgccggatccacactggagagaagccatataagtgtaatgagtgtggaaaggcattttccatgcatagcaacctgactactcacaaagtgatacacactggcgagaaaccttacaagtgtaaccaatgcggcaaagtttttacccagaattcgcatctagcaaatcaccaaaggactcacacgggtgaaaagccctatcggtgcaatgaatgcgggaaagcattctcagttcggagctcgctgactactcatcaggcgattcatacagggaaaaaaccttataaatgcaacgagtgcggcaaggtattcactcagaacgcgcacctagcaaatcaccgtagaatccacacaggtgagaaaccttatagatgcacggagtgtggaaaggcctttcgtgtgcgaagcagcctgacgacccatatggctatccacacgggcgaaaagcgctataagtgcaatgagtgcggaaaggtgttccgacaaagttccaacctggctagccatcataggatgcataccggagagaaaccttataaatag

SEQ ID NO: 320160 - DNA, 2457 bp, Artificial Sequence
  derived and/or modified sequence
atggcactgacccaggtgcgtcttacttttcgtgatgtcgctatcgagtttagtcaggaggaatggaaatgcctggatcctgcacaaagaatactgtacagagacgtcatgctggaaaattactggaatctcgtgtcattagggttgtgccactttgacatgaatatcatctcgatgttagaagaaggaaaagaaccttggaccgtgaaatcctgcgttaaaatcgcacggaagccaagaactcccgagtgcgttaaaggtgtcgtgactgacatcccgccaaaatgtactattaaagacctcctgccgaaggagaagagtagcactgaggctgtcttccataccgtggtgttggagagacatgagtcacctgatatagaagatttttcctttaaagaacctcagaaaaatgtacacgattttgagtgccagtggcgggatgacaccggcaactataaaggcgtgttgatggcgcagaaggagggaaaaagggatcagcgagaccgtagagatatcgaaaataaactaatgaacaaccagctcggggtctcttttcatagtcacctgcctgagcttcaactgtttcagggtgagggaaaaatgtacgagtgcaaccaggtggaaaagtccacgaataatgggagctcagtgtccccattgcagcagatccctagtagtgttcagacccaccgatccaaaaaatatcacgaactcaaccactttagtctgctgacacaaaggaggaaggccaattcgtgcgggaaaccatataagtgcaatgaatgcggcaaggcttttactcaaaactccaatcttactagtcatcgtcgaatccactccggagagaaaccctacaaatgctctgaatgtgggaagacttttacagtgcgatcaaatcttaccatacatcaggtcatccacaccggtgaaaagccgtataaatgccacgagtgtggcaaggtgttcaggcataattcttaccttgccactcataggaggattcacactggcgagaaaccttacaaatgcaacgaatgcgggaaagccttccgaggccactctaatctgaccactcaccagcttattcacaccggtgagaagccatttaagtgcaacgagtgcggcaagctgtttactcagaacagccatttgatatcgcattggcgcatccacactggcgagaagccctataagtgtaatgagtgtggcaaggcattctcagtgcgttcctctctggcaatacaccagaccatacacacaggcgaaaagccctataagtgcaacgaatgcgggaaggtgtttagatataattcgtacctcgggaggcacagacgagtacacactggtgaaaaaccctataagtgtaacgaatgcggaaaggccttcagcatgcattccaatttagccactcaccaagtcatccacaccggcaccaagccatttaagtgcaacgaatgctcaaaagtattcactcagaactcgcagttagccaaccaccggagaattcacactggggaaaaaccatacaagtgtaatgagtgtggcaaagccttttctgtcaggagcagcctaaccacacaccaggcaattcacagcggcgaaaagccatacaaatgtattgagtgtggtaaaagtttcactcagaagagccacctgagatcccaccggggtattcacagcggcgagaagccctacaaatgcaatgaatgcggaaaagtgttcgcacagacgtcacagctggctagacactggcgggttcacacgggagagaaaccatataagtgcaatgactgcgggcgagccttctctgacagatcatcccttacgttccatcaagccatccacacaggagagaaaccctacaagtgccacgagtgtgggaaagtctttaggcacaacagctaccttgctactcaccgcagaatccataccggagaaaagccttacaagtgtaacgaatgcggcaaggccttttccatgcactccaatctgactacccataaggtgatccacacgggtgagaagccctataagtgtaaccagtgcgggaaagtcttcacccaaaactcacatctggccaaccaccagcggacacatactggagagaagccatatcggtgtaacgaatgcggaaaggcgttctcagtgcgttcttcccttacaactcaccaggccattcacactgggaagaaaccgtacaaatgtaatgagtgtggaaaggtatttacccagaatgcccatctggctaatcacagaagaatccatactggggagaaaccataccgatgtaccgaatgcggtaaggcttttcgtgtgcgaagcagcctgaccactcatatggcgatccacaccggcgagaagcgttacaagtgtaatgaatgtggtaaggtgttccgccagtcatctaacttggcttcgcatcaccggatgcacaccggggagaagccctacaaatag

SEQ ID NO: 320161 - DNA, 2457 bp, Artificial Sequence
  derived and/or modified sequence
atggcgttgacgcaagtgcggctgactttcagagacgtggccatagaattctctcaggaagaatggaaatgtttggaccccgctcagaggattctctacagagatgtgatgctggagaactattggaatttagtttctctgggcttatgccactttgatatgaacattatcagcatgctggaggaggggaaggagccgtggaccgttaagtcttgcgtgaagatcgctaggaagccaagaactcctgagtgtgtgaagggcgtcgtaacagatattcctccaaaatgcacgattaaggatctgctgcctaaggagaagagtagtaccgaagcagtctttcacaccgttgtgttggagcgacatgagtcccctgacatcgaagatttttcctttaaggagccacaaaagaatgtgcatgatttcgagtgccagtggcgggacgacaccggaaattataaaggagttctaatggctcagaaggaggggaaaagggatcagagggatcgaagagacatcgagaataagcttatgaacaatcagctcggggtttctttccatagtcatcttcccgagttgcagctatttcagggcgagggcaagatgtacgaatgtaatcaggtggagaagagcacaaataatggatctagcgtgtcaccactgcagcagataccatcttcagttcagacccacagatccaagaagtaccacgagctgaaccatttctcactgctgacccaacggcgtaaggctaattcctgtgggaagccctacaagtgtaacgaatgcggtaaggccttcacacagaactcgaacctgacatcacacagacggattcactccggagagaaaccctacaagtgctccgagtgtggaaaaacatttactgtgaggtccaatctcaccatccaccaggttattcatactggggaaaagccctacaagtgtcacgaatgtggcaaggtgttcaggcacaacagttacctggccacacatcggagaatccacactggcgaaaagccgtataagtgcaatgagtgcggtaaagcttttagggggcacagcaatctcactactcatcagctcattcacaccggagaaaagcctttcaaatgcaacgaatgcggcaagctgttcacccagaactctcatctcattagccattggcgaattcacaccggagagaaaccatataaatgcaatgaatgtgggaaagcgttttccgtccgcagcagcttagctatccaccaaacaatccataccggcgagaagccctataaatgcaacgagtgtgggaaggtgtttcggtataacagctatttaggcaggcatcgccgtgttcacaccggagagaagccatataagtgcaatgagtgcgggaaggccttctcgatgcactcgaacctggcaacgcatcaagtgattcacacaggtaccaaaccatttaaatgtaatgaatgttctaaggtgtttacccaaaactcacaattggctaaccaccgaaggatccacaccggcgaaaagccgtacaagtgcaacgagtgtggcaaagccttttcagttcgctcatctctcacaactcatcaggccatacatagcggagaaaagccgtacaaatgcatagagtgtggcaaatctttcacacaaaagtcccatctgaggagccatcggggtatccatagcggcgagaagccttacaaatgcaatgaatgcgggaaagtgttcgcccaaacgtcacagctagctcgccattggcgcgttcatactggcgaaaaaccatacaaatgtaatgattgcggacgtgcatttagtgacaggtctagtctgacttttcaccaagccatccataccggagagaagccttataagtgtcacgaatgtggcaaagtgtttagacataactcgtacctggctacccaccggaggattcacaccggcgagaaaccctacaagtgtaacgagtgtggaaaggctttttccatgcactccaatctaacaactcacaaggtgatccacactggcgagaaaccttacaaatgtaatcaatgcggaaaggtatttacacagaactcccacctcgcaaatcatcagcgaacccacacaggggaaaaaccctaccgctgtaatgaatgtggaaaggctttttcagtgagatcgagccttacaacccaccaggctatccataccgggaagaaaccctataaatgtaatgagtgtgggaaggtgtttactcaaaacgcccacctggccaatcatagaaggatccacactggcgaaaaaccctacaggtgcactgagtgcgggaaggcctttagagtccggagtagccttaccacccacatggctatccacaccggcgaaaagaggtacaaatgtaacgagtgcggcaaggtctttcggcagtcatcgaatctggcgtcccatcacaggatgcacactggagaaaaaccatacaaatag

SEQ ID NO: 320162 - DNA, 2457 bp, Artificial Sequence
  derived and/or modified sequence
atggcactcacccaggtacgcctgacgttccgggacgtggctatcgaattcagccaggaagagtggaagtgtctggatcccgcacagcgtatcctctaccgcgatgtgatgcttgagaactactggaacttggtttccctgggtttgtgtcacttcgacatgaatatcatcagtatgctggaagaaggcaaggagccatggactgtgaaatcatgcgtcaaaattgcccgaaaaccccgaactcctgagtgtgtgaagggtgtagtaaccgacatcccaccaaaatgtaccattaaggacctgcttccaaaagagaagagtagcaccgaggcagtcttccatactgtcgtcctcgagcggcatgaaagccctgacatagaggattttagttttaaggagccccaaaagaacgtgcacgatttcgaatgtcaatggcgcgatgacaccggaaattacaaaggcgtcttaatggctcaaaaggaaggaaaaagggaccaacgggataggagagatatcgaaaataagctcatgaacaatcagctgggagtgagtttccactcacacctgccagaactgcaactcttccagggcgaagggaaaatgtatgagtgtaatcaggtggagaagagcaccaataatggtagttctgtgtcccccctgcagcaaatcccttccagcgtgcagacccaccggtccaaaaaatatcacgaactgaaccacttctctcttcttacacagcgcaggaaagctaattcctgcggaaaaccctataaatgtaacgaatgtgggaaggccttcacccagaatagtaatctgacctcacacaggaggatccacagtggggaaaagccgtacaagtgcagtgagtgcggcaaaaccttcaccgtgcgaagtaacctgactatacaccaggtaatccatactggggaaaaaccctacaagtgccatgaatgtggaaaagtgttcaggcacaacagctaccttgcaacacacaggcgtatacataccggagaaaagccgtacaagtgcaatgaatgcggtaaggcatttagaggtcactctaacttgacaacacatcagcttatccacaccggcgaaaagccttttaaatgcaacgaatgtggaaaattgttcacacaaaactcccatctgatcagccactggaggatacacactggagaaaaaccttacaagtgtaatgaatgcggaaaggccttttctgttcgtagttcgctcgcgattcaccagaccatccacaccggtgagaagccctacaagtgtaatgaatgcgggaaggtctttcgctacaacagctatctggggagacatagaagggtgcacacaggagaaaagccctataagtgtaacgaatgcggcaaggctttcagcatgcactccaacctagcaacgcatcaagtaatccacactggcaccaaaccctttaaatgcaacgagtgtagcaaggttttcacacagaactcgcagctggccaatcatcggaggatccacaccggcgagaagccgtataagtgtaacgagtgtggaaaagctttctctgttcgcagctcgcttacaacccaccaggccattcatagcggcgagaaaccttataaatgcatcgagtgtggtaagtcattcactcagaaaagccatctgcgatctcaccgcggaatccattccggagagaagccttacaagtgtaacgagtgtggtaaagtgtttgcccagacgtcccagctggccaggcactggcgggtccacacgggggagaaaccctataaatgcaacgattgcggtagagccttctctgatcgcagctccctgacatttcatcaggctatccataccggtgaaaagccatataagtgccacgagtgcgggaaggtgttcagacacaactcatacctggccacccatagaagaattcatacgggggagaagccttataagtgcaatgagtgtggaaaagctttctctatgcactctaatctaactacgcataaggttatccacactggcgaaaagccctacaaatgcaaccagtgcggcaaggtgtttacacagaatagccatctggctaaccatcagagaacccacacgggcgagaaaccttaccgatgcaatgagtgcgggaaggccttttcagtgaggtcttccctcacaactcatcaagccattcataccgggaagaaaccctacaagtgtaatgaatgcgggaaggtgtttacccagaatgctcacctggcgaatcaccgccgtatccacacaggggaaaagccataccgctgtacagaatgcgggaaggccttcagggttcggtcaagccttacaacccacatggctattcacactggagaaaaaagatataagtgcaacgagtgtggaaaggtgtttcgacagtcctctaacttagccagccatcataggatgcatacaggagaaaagccttacaaatag

SEQ ID NO: 320163 - DNA, 4219 bp, Artificial Sequence
  derived and/or modified sequence
gcagttgcccacagacccggaagtggatcgtgcggagcaagcatcacaccatggcgtatgagtgttcctctgtgtagactcaacctgcgcctcgccgtcccccattcgcacacccgatgcccgggggtcgctacggacttaaaatctccgcaccgcaccctccacctcagaaacgttcctggatccgaacactgccccctgacgacctagagagatcccggctcccagcccactgagtggcttcagcctcgctggaagaagtctggaagaagaggaagaggaaagaaaaggagtcagggatggcccttactcaggtacggttgacatttagggatgtggccatagaattctctcaggaggagtggaaatgcctggaccctgctcagaggatcttatacagggacgtgatgttggagaactactggaaccttgtttctctgggactgtgtcattttgatatgaatattatctccatgttggaggaagggaaagagccctggactgtgaagagctgtgtgaaaatagcaagaaaaccaagaacgccggaatgtgtcaaaggcgtggtcacagatatccctcctaaatgtacaatcaaggatttgctaccaaaagagaagagcagtacagaagcagtattccacacagtggtgttggaaagacacgaaagccctgacattgaagacttttccttcaaggaaccccagaaaaatgtgcatgattttgagtgtcaatggagagatgacacaggaaattacaagggagtgcttatggcccagaaagaaggtaaaagagatcaacgcgacagaagagacatagaaaacaagcttatgaacaatcagcttggagtaagctttcattctcatctgcctgaactgcagctatttcaaggtgaggggaaaatgtatgaatgtaatcaagttgagaagtctaccaacaatggttcctcagtgtcaccacttcaacaaattccttctagtgtccaaacccacaggtctaaaaaatatcatgaacttaaccatttttcattactcacacaaagacgaaaagcaaacagttgtggaaaaccttataaatgtaatgaatgtggcaaggcgttcactcagaattcgaaccttacaagtcataggagaattcatagtggagagaagccttacaaatgcagtgagtgcggcaaaacctttactgttcgttcaaatctaactattcatcaggtcatccatactggagaaaaaccttacaaatgtcatgagtgtggcaaggtcttcaggcacaattcataccttgcaactcatcggcgaattcatactggagagaaaccttacaagtgtaatgagtgtggaaaagcctttagaggacattcaaacctaactacccatcagttaattcatactggagaaaaaccgttcaaatgtaatgaatgtggcaagctcttcactcaaaattcacaccttataagtcattggagaattcacactggagagaaaccttacaagtgcaatgagtgcggcaaagcctttagtgttcgttcaagcctagcaatccatcagacaatccacactggagaaaaaccttacaaatgtaatgaatgtggcaaagtctttaggtacaattcatacctcggaaggcatcggagagttcatactggtgagaaaccttacaagtgtaatgaatgtggcaaagccttcagtatgcattcaaacctagctacccatcaggtcatccatactggaacaaaacctttcaaatgcaatgaatgcagcaaggttttcactcaaaattcacaacttgcaaatcatcgaagaattcatactggagagaaaccttacaagtgtaatgagtgtgggaaagccttcagtgttcgttcaagtctgactacccatcaggcaatccattctggagagaaaccttacaaatgtattgaatgtggcaagagcttcactcaaaaatcacaccttagaagtcatcggggaattcattctggagagaaaccttacaagtgtaatgaatgtggtaaagtcttcgctcaaacatcacaacttgcaaggcattggagagttcatactggagaaaaaccttacaagtgtaatgactgtggcagagcctttagtgatcgttcaagcctaacttttcatcaggcaatacatactggagagaaaccttacaaatgtcatgaatgcggcaaggtttttaggcacaattcataccttgcaactcatcggcgaattcatactggagagaaaccttacaagtgtaatgagtgtgggaaagcctttagtatgcattcaaacctaactacccataaggtcatccatactggagagaagccttacaaatgtaatcaatgtggcaaggtcttcactcagaactcacaccttgcaaatcatcaaaggactcacaccggagagaaaccttaccgatgcaatgagtgtgggaaagccttcagtgttcgttcaagcctaaccacccatcaggcaatccatactgggaaaaaaccttacaaatgtaatgaatgtggcaaggtctttactcaaaatgctcacctggcaaatcaccgaagaattcatactggggagaaaccttacaggtgtacagagtgtgggaaagcctttagggtaagatcaagtctaactacccatatggcaatccacactggagaaaagcgttacaaatgtaatgagtgtggcaaggtcttcaggcagagttcaaatcttgcaagtcatcacagaatgcataccggagagaaaccttacaaatgagtgtggtgaggtcattaggtacaattcactcctttcacatcagttaatttcattcttgacagaatccttacaaatgtagtgacagtggccaatccctcatgagttgaagcattaatagatatgagaggccataagcaagagacatcatgtaaacatatgtggcagagggtctatccaggcctcgcaggttactaggcatcaagatttatatctttgatgaaacgaaacaaatgtaatatgcatcctgaggccattacccagtgaccgatggtaagtgaggattcctaggaggaataacagtctctggtttccctgtttgcctttgatattatacactgtagaatactcacaagtccaaatatgctaaaaattatatatttttaactcacatacgaaaaggttgcaggatatttgtaggcagtcagttaccttcaccttatgaaatgtttcactgagttatttgaggttttttggaaagcctactattgcgtttcaatgtgaactttgaaatcttattgtgcatccttacacaccttccatggtgctttcttggaaagatcattgggatggaaggatcattgattgggtgaagatcattgattaggtgaaggattatttctatccaatttgtgaagaaggaggactttgcttttaaaattaagtatcatctgaattagcatttgggagtggcgaaaaacaatgtaaaactatgatgtcactcaccattctgataatgttcagggtgcctttctcctaccaggagagtactgtggcttagaggaaagaaatggtctatcaactgaacatgaaatggagcaggccaagaccttaggacattgggatttttgtgggaggagagtaataggtaattagacactgattgtgtggtagaaatactgcaggggaaaaggtcgccctcttatgcatcaaagagcaatacctgttgtttagcaaagagtgatgaaaaattgatcttgttttgaaattgaagagagaggccaggcgcggtggctcacacctgtaatcccagcactttgggaggctgaggcaggtggatcacctgaggtcgggagttcgagaccagcctgaccaacatggagaaaccccaattgtactaaaaatacaaaattagccgggcgtggtggcaggtgcctgtaatcccagctacttgggaggctgaggcaggagagtgcttgaacccaggaggcggaggttgtggtgagccaagatcatgccactgcactccagcctgggcaacaagaacaaaactccatctaaagaagaaaaagaaaaactgaagagagagtagttgtcagagtgaagagtttaatcaacagaagtagagtaacatattctttagtagaactcacattatctgcttgaagcacattttgctaatgttttattcagaatgtatcatagatataatgttttaactaataaaatagaatggtttttctcta

SEQ ID NO: 320164 - DNA, 4336 bp, Artificial Sequence
  derived and/or modified sequence
gcagttgcccacagacccggaagtggatcgtgcggagcaagcatcacaccatggcgtatgagtgttcctctgtgtagactcaacctgcgcctcgccgtcccccattcgcacacccgatgcccgggggtcgctacggacttaaaatctccgcaccgcaccctccacctcagaaacgttcctggatccgaacactgccccctgacgacctagagagatcccggctcccagcccactgagtggcttcagcctcgctggcacctcccaactcctggcctctctgcacgaggcgcctgccccgggccccgcctacaggggacccagctcttcttgcagccactggaagctgatcacctggagtgaagacctcacacgaagaagtctggaagaagaggaagaggaaagaaaaggagtcagggatggcccttactcaggtacggttgacatttagggatgtggccatagaattctctcaggaggagtggaaatgcctggaccctgctcagaggatcttatacagggacgtgatgttggagaactactggaaccttgtttctctgggactgtgtcattttgatatgaatattatctccatgttggaggaagggaaagagccctggactgtgaagagctgtgtgaaaatagcaagaaaaccaagaacgccggaatgtgtcaaaggcgtggtcacagatatccctcctaaatgtacaatcaaggatttgctaccaaaagagaagagcagtacagaagcagtattccacacagtggtgttggaaagacacgaaagccctgacattgaagacttttccttcaaggaaccccagaaaaatgtgcatgattttgagtgtcaatggagagatgacacaggaaattacaagggagtgcttatggcccagaaagaaggtaaaagagatcaacgcgacagaagagacatagaaaacaagcttatgaacaatcagcttggagtaagctttcattctcatctgcctgaactgcagctatttcaaggtgaggggaaaatgtatgaatgtaatcaagttgagaagtctaccaacaatggttcctcagtgtcaccacttcaacaaattccttctagtgtccaaacccacaggtctaaaaaatatcatgaacttaaccatttttcattactcacacaaagacgaaaagcaaacagttgtggaaaaccttataaatgtaatgaatgtggcaaggcgttcactcagaattcgaaccttacaagtcataggagaattcatagtggagagaagccttacaaatgcagtgagtgcggcaaaacctttactgttcgttcaaatctaactattcatcaggtcatccatactggagaaaaaccttacaaatgtcatgagtgtggcaaggtcttcaggcacaattcataccttgcaactcatcggcgaattcatactggagagaaaccttacaagtgtaatgagtgtggaaaagcctttagaggacattcaaacctaactacccatcagttaattcatactggagaaaaaccgttcaaatgtaatgaatgtggcaagctcttcactcaaaattcacaccttataagtcattggagaattcacactggagagaaaccttacaagtgcaatgagtgcggcaaagcctttagtgttcgttcaagcctagcaatccatcagacaatccacactggagaaaaaccttacaaatgtaatgaatgtggcaaagtctttaggtacaattcatacctcggaaggcatcggagagttcatactggtgagaaaccttacaagtgtaatgaatgtggcaaagccttcagtatgcattcaaacctagctacccatcaggtcatccatactggaacaaaacctttcaaatgcaatgaatgcagcaaggttttcactcaaaattcacaacttgcaaatcatcgaagaattcatactggagagaaaccttacaagtgtaatgagtgtgggaaagccttcagtgttcgttcaagtctgactacccatcaggcaatccattctggagagaaaccttacaaatgtattgaatgtggcaagagcttcactcaaaaatcacaccttagaagtcatcggggaattcattctggagagaaaccttacaagtgtaatgaatgtggtaaagtcttcgctcaaacatcacaacttgcaaggcattggagagttcatactggagaaaaaccttacaagtgtaatgactgtggcagagcctttagtgatcgttcaagcctaacttttcatcaggcaatacatactggagagaaaccttacaaatgtcatgaatgcggcaaggtttttaggcacaattcataccttgcaactcatcggcgaattcatactggagagaaaccttacaagtgtaatgagtgtgggaaagcctttagtatgcattcaaacctaactacccataaggtcatccatactggagagaagccttacaaatgtaatcaatgtggcaaggtcttcactcagaactcacaccttgcaaatcatcaaaggactcacaccggagagaaaccttaccgatgcaatgagtgtgggaaagccttcagtgttcgttcaagcctaaccacccatcaggcaatccatactgggaaaaaaccttacaaatgtaatgaatgtggcaaggtctttactcaaaatgctcacctggcaaatcaccgaagaattcatactggggagaaaccttacaggtgtacagagtgtgggaaagcctttagggtaagatcaagtctaactacccatatggcaatccacactggagaaaagcgttacaaatgtaatgagtgtggcaaggtcttcaggcagagttcaaatcttgcaagtcatcacagaatgcataccggagagaaaccttacaaatgagtgtggtgaggtcattaggtacaattcactcctttcacatcagttaatttcattcttgacagaatccttacaaatgtagtgacagtggccaatccctcatgagttgaagcattaatagatatgagaggccataagcaagagacatcatgtaaacatatgtggcagagggtctatccaggcctcgcaggttactaggcatcaagatttatatctttgatgaaacgaaacaaatgtaatatgcatcctgaggccattacccagtgaccgatggtaagtgaggattcctaggaggaataacagtctctggtttccctgtttgcctttgatattatacactgtagaatactcacaagtccaaatatgctaaaaattatatatttttaactcacatacgaaaaggttgcaggatatttgtaggcagtcagttaccttcaccttatgaaatgtttcactgagttatttgaggttttttggaaagcctactattgcgtttcaatgtgaactttgaaatcttattgtgcatccttacacaccttccatggtgctttcttggaaagatcattgggatggaaggatcattgattgggtgaagatcattgattaggtgaaggattatttctatccaatttgtgaagaaggaggactttgcttttaaaattaagtatcatctgaattagcatttgggagtggcgaaaaacaatgtaaaactatgatgtcactcaccattctgataatgttcagggtgcctttctcctaccaggagagtactgtggcttagaggaaagaaatggtctatcaactgaacatgaaatggagcaggccaagaccttaggacattgggatttttgtgggaggagagtaataggtaattagacactgattgtgtggtagaaatactgcaggggaaaaggtcgccctcttatgcatcaaagagcaatacctgttgtttagcaaagagtgatgaaaaattgatcttgttttgaaattgaagagagaggccaggcgcggtggctcacacctgtaatcccagcactttgggaggctgaggcaggtggatcacctgaggtcgggagttcgagaccagcctgaccaacatggagaaaccccaattgtactaaaaatacaaaattagccgggcgtggtggcaggtgcctgtaatcccagctacttgggaggctgaggcaggagagtgcttgaacccaggaggcggaggttgtggtgagccaagatcatgccactgcactccagcctgggcaacaagaacaaaactccatctaaagaagaaaaagaaaaactgaagagagagtagttgtcagagtgaagagtttaatcaacagaagtagagtaacatattctttagtagaactcacattatctgcttgaagcacattttgctaatgttttattcagaatgtatcatagatataatgttttaactaataaaatagaatggtttttctcta

SEQ ID NO: 320165 - DNA, 4229 bp, Artificial Sequence
  derived and/or modified sequence
cctgcgcctcgccgtcccccattcgcacacccgatgcccgggggtcgctacggacttaaaatctccgcaccgcaccctccacctcagaaacgttcctggatccgaacactgccccctgacgacctagagagatcccggctcccagcccactgagtggcttcagcctcgctggcgcctgccccgggccccgcctacaggggacccagctcttcttgcagccactggaagctgatcacctggagtgaagacctcacacgaagaagtctggaagaagaggaagaggaaagaaaaggagtcagggatggcccttactcaggtacggttgacatttagggatgtggccatagaattctctcaggaggagtggaaatgcctggaccctgctcagaggatcttatacagggacgtgatgttggagaactactggaaccttgtttctctgggactgtgtcattttgatatgaatattatctccatgttggaggaagggaaagagccctggactgtgaagagctgtgtgaaaatagcaagaaaaccaagaacgccggaatgtgtcaaaggcgtggtcacagatatccctcctaaatgtacaatcaaggatttgctaccaaaagagaagagcagtacagaagcagtattccacacagtggtgttggaaagacacgaaagccctgacattgaagacttttccttcaaggaaccccagaaaaatgtgcatgattttgagtgtcaatggagagatgacacaggaaattacaagggagtgcttatggcccagaaagaaggtaaaagagatcaacgcgacagaagagacatagaaaacaagcttatgaacaatcagcttggagtaagctttcattctcatctgcctgaactgcagctatttcaaggtgaggggaaaatgtatgaatgtaatcaagttgagaagtctaccaacaatggttcctcagtgtcaccacttcaacaaattccttctagtgtccaaacccacaggtctaaaaaatatcatgaacttaaccatttttcattactcacacaaagacgaaaagcaaacagttgtggaaaaccttataaatgtaatgaatgtggcaaggcgttcactcagaattcgaaccttacaagtcataggagaattcatagtggagagaagccttacaaatgcagtgagtgcggcaaaacctttactgttcgttcaaatctaactattcatcaggtcatccatactggagaaaaaccttacaaatgtcatgagtgtggcaaggtcttcaggcacaattcataccttgcaactcatcggcgaattcatactggagagaaaccttacaagtgtaatgagtgtggaaaagcctttagaggacattcaaacctaactacccatcagttaattcatactggagaaaaaccgttcaaatgtaatgaatgtggcaagctcttcactcaaaattcacaccttataagtcattggagaattcacactggagagaaaccttacaagtgcaatgagtgcggcaaagcctttagtgttcgttcaagcctagcaatccatcagacaatccacactggagaaaaaccttacaaatgtaatgaatgtggcaaagtctttaggtacaattcatacctcggaaggcatcggagagttcatactggtgagaaaccttacaagtgtaatgaatgtggcaaagccttcagtatgcattcaaacctagctacccatcaggtcatccatactggaacaaaacctttcaaatgcaatgaatgcagcaaggttttcactcaaaattcacaacttgcaaatcatcgaagaattcatactggagagaaaccttacaagtgtaatgagtgtgggaaagccttcagtgttcgttcaagtctgactacccatcaggcaatccattctggagagaaaccttacaaatgtattgaatgtggcaagagcttcactcaaaaatcacaccttagaagtcatcggggaattcattctggagagaaaccttacaagtgtaatgaatgtggtaaagtcttcgctcaaacatcacaacttgcaaggcattggagagttcatactggagaaaaaccttacaagtgtaatgactgtggcagagcctttagtgatcgttcaagcctaacttttcatcaggcaatacatactggagagaaaccttacaaatgtcatgaatgcggcaaggtttttaggcacaattcataccttgcaactcatcggcgaattcatactggagagaaaccttacaagtgtaatgagtgtgggaaagcctttagtatgcattcaaacctaactacccataaggtcatccatactggagagaagccttacaaatgtaatcaatgtggcaaggtcttcactcagaactcacaccttgcaaatcatcaaaggactcacaccggagagaaaccttaccgatgcaatgagtgtgggaaagccttcagtgttcgttcaagcctaaccacccatcaggcaatccatactgggaaaaaaccttacaaatgtaatgaatgtggcaaggtctttactcaaaatgctcacctggcaaatcaccgaagaattcatactggggagaaaccttacaggtgtacagagtgtgggaaagcctttagggtaagatcaagtctaactacccatatggcaatccacactggagaaaagcgttacaaatgtaatgagtgtggcaaggtcttcaggcagagttcaaatcttgcaagtcatcacagaatgcataccggagagaaaccttacaaatgagtgtggtgaggtcattaggtacaattcactcctttcacatcagttaatttcattcttgacagaatccttacaaatgtagtgacagtggccaatccctcatgagttgaagcattaatagatatgagaggccataagcaagagacatcatgtaaacatatgtggcagagggtctatccaggcctcgcaggttactaggcatcaagatttatatctttgatgaaacgaaacaaatgtaatatgcatcctgaggccattacccagtgaccgatggtaagtgaggattcctaggaggaataacagtctctggtttccctgtttgcctttgatattatacactgtagaatactcacaagtccaaatatgctaaaaattatatatttttaactcacatacgaaaaggttgcaggatatttgtaggcagtcagttaccttcaccttatgaaatgtttcactgagttatttgaggttttttggaaagcctactattgcgtttcaatgtgaactttgaaatcttattgtgcatccttacacaccttccatggtgctttcttggaaagatcattgggatggaaggatcattgattgggtgaagatcattgattaggtgaaggattatttctatccaatttgtgaagaaggaggactttgcttttaaaattaagtatcatctgaattagcatttgggagtggcgaaaaacaatgtaaaactatgatgtcactcaccattctgataatgttcagggtgcctttctcctaccaggagagtactgtggcttagaggaaagaaatggtctatcaactgaacatgaaatggagcaggccaagaccttaggacattgggatttttgtgggaggagagtaataggtaattagacactgattgtgtggtagaaatactgcaggggaaaaggtcgccctcttatgcatcaaagagcaatacctgttgtttagcaaagagtgatgaaaaattgatcttgttttgaaattgaagagagaggccaggcgcggtggctcacacctgtaatcccagcactttgggaggctgaggcaggtggatcacctgaggtcgggagttcgagaccagcctgaccaacatggagaaaccccaattgtactaaaaatacaaaattagccgggcgtggtggcaggtgcctgtaatcccagctacttgggaggctgaggcaggagagtgcttgaacccaggaggcggaggttgtggtgagccaagatcatgccactgcactccagcctgggcaacaagaacaaaactccatctaaagaagaaaaagaaaaactgaagagagagtagttgtcagagtgaagagtttaatcaacagaagtagagtaacatattctttagtagaactcacattatctgcttgaagcacattttgctaatgttttattcagaatgtatcatagatataatgttttaactaataaaatagaatggtttttctctatgaatgaa

SEQ ID NO: 320166 - protein, 147 aa, Artificial Sequence
  derived and/or modified sequence
MALTQVRLTFRDVAIEFSQEEWKCLDPAQRILYRDVMLENYWNLVSLGLCHFDMNIISMLEEGKEPWTVKSCVKIARKPRTPECVKGVVTDLLRRWKHWLLLLGICCPKPHGRVSSRLRLSRSLGHFFHSAFATFMGVCDKRVGSIF

SEQ ID NO: 320167 - DNA, 444 bp, Artificial Sequence
  derived and/or modified sequence
atggccctgacccaggtgagactgaccttcagagacgtggccatcgagttcagccaggaggagtggaagtgcctggaccccgcccagagaatcctgtacagagacgtgatgctggagaactactggaacctggtgagcctgggcctgtgccacttcgacatgaacatcatcagcatgctggaggagggcaaggagccctggaccgtgaagagctgcgtgaagatcgccagaaagcccagaacccccgagtgcgtgaagggcgtggtgaccgacctgctgagaagatggaagcactggctgctgctgctgggcatctgctgccccaagccccacggcagagtgagcagcagactgagactgagcagaagcctgggccacttcttccacagcgccttcgccaccttcatgggcgtgtgcgacaagagagtgggcagcatcttctag

SEQ ID NO: 320168 - DNA, 444 bp, Artificial Sequence
  derived and/or modified sequence
atggcattgactcaggttcgcctgaccttccgggacgttgctattgaatttagccaggaagagtggaagtgcttggatcccgcgcaacggattctctacagagatgtgatgttggaaaactattggaacctcgttagcctcggcctctgtcactttgacatgaatatcatttccatgctcgaagaggggaaggaaccctggacagtgaaatcctgtgttaaaattgctagaaagcctcggactcctgagtgtgtcaagggcgtggtgacagacctgttgcggcgatggaagcactggctgctgctcctgggcatttgctgccccaaaccacacggacgtgtgtctagcaggctgcgtctgtcccgcagcctggggcacttttttcattcagccttcgcgaccttcatgggggtctgtgataaaagggttggtagtatcttttag

SEQ ID NO: 320169 - DNA, 444 bp, Artificial Sequence
  derived and/or modified sequence
atggccctgacccaggtgcggctgaccttcagagatgtggccatcgagttcagccaggaggagtggaagtgcctggaccctgcccagaggatcctgtacagagatgtgatgctggagaactactggaacctggtgtccctgggcctgtgccactttgacatgaacatcatctccatgctggaggagggcaaggagccctggacagtgaagagctgtgtgaagatcgccaggaagcccaggaccccagaatgtgtgaagggcgtggtgacagacctgctgcggcgctggaagcactggctgctgctgctgggcatctgctgccccaagccccacggccgggtgagcagccggctgcggctgagccgcagcctgggccacttcttccacagcgcctttgccaccttcatgggcgtgtgtgacaagagggtgggcagcatcttctag

SEQ ID NO: 320170 - DNA, 444 bp, Artificial Sequence
  derived and/or modified sequence
atggccctgacccaggtgcggctgaccttccgggacgtggccatcgagttctctcaggaggaatggaaatgcctggacccagcgcagagaatcctttacagggatgtaatgcttgaaaattattggaatctcgtgtcactgggtctgtgccacttcgacatgaatatcatttccatgttagaggagggcaaggaaccctggacagtcaagagttgcgtgaaaattgcccggaagccccgcactccagagtgtgtgaaaggcgtcgtcactgatttacttcgtcgatggaagcactggttgctcctcctagggatctgctgtccaaaaccacatggacgcgtcagctcacggctcagattatctcggagtttgggtcactttttccacagtgcctttgctacattcatgggggtgtgcgacaaacgtgtcgggtccattttctag

SEQ ID NO: 320171 - DNA, 444 bp, Artificial Sequence
  derived and/or modified sequence
atggccctcactcaagtgaggctcacgtttcgggacgtcgctatcgaatttagccaggaagagtggaagtgccttgatcccgcacagaggatcctgtaccgggatgtgatgctcgaaaattactggaacctggtgagcctcggtctgtgccatttcgatatgaatatcataagtatgctcgaagaagggaaagaaccgtggactgtgaaatcttgcgtgaagatagcgaggaaaccgagaacccctgaatgcgttaagggcgtcgttactgaccttctccggaggtggaagcattggctcctcttgctcggtatttgttgccccaaaccacatggacgggtgtcttctaggctgagactatctaggagccttggccacttttttcattcagcttttgccacattcatgggggtctgtgataaacgcgtcgggtcgatcttctag

SEQ ID NO: 320172 - DNA, 1295 bp, Artificial Sequence
  derived and/or modified sequence
gcggagcaagcatcacaccatggcgtatgagtgttcctctgtgtagactcaacctgcgcctcgccgtcccccattcgcacacccgatgcccgggggtcgctacggacttaaaatctccgcaccgcaccctccacctcagaaacgttcctggatccgaacactgccccctgacgacctagagagatcccggctcccagcccactgagtggcttcagcctcgctgtcccccgcccacttcatccctcaggcacctcccaactcctggcctctctgcacgaggcgcctgccccgggccccgcctacaggggacccagctcttcttgcagccactggaagctgatcacctggagtgaagacctcacacgaagaagtctggaagaagaggaagaggaaagaaaaggagtcagggatggcccttactcaggtacggttgacatttagggatgtggccatagaattctctcaggaggagtggaaatgcctggaccctgctcagaggatcttatacagggacgtgatgttggagaactactggaaccttgtttctctgggactgtgtcattttgatatgaatattatctccatgttggaggaagggaaagagccctggactgtgaagagctgtgtgaaaatagcaagaaaaccaagaacgccggaatgtgtcaaaggcgtggtcacagacctgctcaggagatggaaacattggctgctgctccttggcatctgctgccccaaacctcatggaagagtctccagccgtctccgcctgtcgaggtccctcggccatttcttccattctgcttttgccactttcatgggggtgtgtgataagcgagtgggttctatcttctaagattgttctcagcataaccgtaaagacacctaacaaaatccttctgtcattgatcctcagtcttacatggggtgcgtattctgtttttccaggcttcagcacagaaatacaagtactgcatgttgtcacttacatttggaatctaaaccaataaaactaatagcagcaaagagtagaatgtgggttaccacaggttggggactggagggaatagggagatgttggtcactgggtgaaaacattaggagtaaatgataggtttttgagatgacttatatggtaataggcttgtttccatcagtccatattgtatacctataacagaatatcagtttgtttcctgtaaatatatataactataatttgtcaatatagaatttttttaaaaatcatattccagttcttattgtgttggttctaaataaaaatgcttctttctctt

SEQ ID NO: 320173 - DNA, 2448 bp, Artificial Sequence
  derived and/or modified sequence
gggatgggggcggagtccagggcgtgggggggccggtttgttgtggtcgccattttgctggttgcattactgggtaatcggggccctggcttgccgcgtccgccggataccctcagccagtgggcaggtctgagctcgggctccccgagcagtttgagtccccttgcccgctccttcaggtctcagcggcggtggcagccgaggtgcaggatgcaagaaggcgccccccggccgggctcccgctccaggcctcgctcccctgcggccctctgagcccaccatggccgtcccaccgggccatggtcccttctctggcttcccagggccccaggagcacacgcaggtattgcctgatgtgcggctactgcctcggaggctgcccctggccttccgggatgcaacctcagccccgctgcgtaagctctctgtggacctcatcaagacctacaagcacatcaatgaggtatactatgcgaagaagaagcggcgggcccagcaggcgccaccccaggattcgagcaacaagaaggagaagaaggtcctgaaccatggttatgatgacgacaaccatgactacatcgtgcgcagtggcgagcgctggctggagcgctacgaaattgactcgctcattggcaaaggctcctttggccaggtggtgaaagcctatgatcatcagacccaggagcttgtggccatcaagatcatcaagaacaaaaaggctttcctgaaccaggcccagattgagctgcggctgctggagctgatgaaccagcatgacacggagatgaagtactatatagtacacctgaagcggcacttcatgttccggaaccacctgtgcctggtatttgagctgctgtcctacaacctgtacgacctcctgcgcaacacccacttccgcggcgtctcgctgaacctgacccggaagctggcgcagcagctctgcacggcactgctctttctggccacgcctgagctcagcatcattcactgcgacctcaagcccgaaaacatcttgctgtgcaaccccaagcgcagcgccatcaagattgtggacttcggcagctcctgccagcttggccagaggatctaccagtatatccagagccgcttctaccgctcacctgaggtgctcctgggcacaccctacgacctggccattgacatgtggtccctgggctgcatccttgtggagatgcacaccggagagcccctcttcagtggctccaatgaggtcgaccagatgaaccgcattgtggaggtgctgggcatcccaccggccgccatgctggaccaggcgcccaaggctcgcaagtactttgaacggctgcctgggggtggctggaccctacgaaggacgaaagaactcaggaaggattaccagggccccgggacacggcggctgcaggaggacctggtgctgcgcatgctggagtatgagcccgccgcccgcatcagccccctgggggctctgcagcacggcttcttccgccgcacggccgacgaggccaccaacacgggcccggcaggcagcagtgcctccacctcgcccgcgcccctcgacacctgcccctcttccagcaccgccagctccatctccagttctggaggctccagtggctcctccagtgacaaccggacctaccgctacagcaaccgatattgtgggggccctgggccccctatcacagactgtgagatgaacagcccccaggtcccaccctcccagccgctgcggccctgggcagggggtgatgtgccccacaagacacatcaagcccctgcctctgcctcgtcactgcctgggaccggggcccagttacccccccagccccgataccttggtcgtcccccatcaccaacctcaccaccacccccggagctgatggatgtgagcctggtgggcggccctgctgactgctccccacctcacccagcgcctgccccccagcacccggctgcctcagccctccggactcggatgactggaggtcgtccacccctcccgcctcctgatgaccctgccactctggggcctcacctgggcctccgtggtgtaccccagagcacagcagccagctcgtgaccctgccccctccctggggcccctcctgaagccataccctcccccatctgggggccctgggctcccatcctcatctctctccttgactggaattgctgctacccagctggggtgggtgaggcctgcactgattggggcctggggcaggggggtcaaggagagggttttggccgctccctccccactaaggactggacccttgggcccctctccccctttttttctatttattgtaccaaagacagtggtggtccggtggagggaagaccccccctcaccccaggaccctaggagggggtgggggcaggtagggggagatggccttgctcctcctcgctgtacccccagtaaagagctttctc

SEQ ID NO: 320174 - DNA, 2412 bp, Artificial Sequence
  derived and/or modified sequence
gggatgggggcggagtccagggcgtgggggggccggtttgttgtggtcgccattttgctggttgcattactgggtaatcggggccctggcttgccgcgtccgccggataccctcagccagtgggcaggtctgagctcgggctccccgagcagtttgagtccccttgcccgctccttcaggtctcagcggcggtggcagccgaggtgcaggatgcaagaaggcgccccccggccgggctcccgctccaggcctcgctcccctgcggccctctgagcccaccatggccgtcccaccgggccatggtcccttctctggcttcccagggccccaggagcacacgcaggtattgcctgatgtgcggctactgcctcggaggctgcccctggccttccgggatgcaacctcagccccgctgcgtaagctctctgtggacctcatcaagacctacaagcacatcaatgaggtatactatgcgaagaagaagcggcgggcccagcaggcgccaccccaggattcgagcaacaagaaggagaagaaggtcctgaaccatggttatgatgacgacaaccatgactacatcgtgcgcagtggcgagcgctggctggagcgctacgaaattgactcgctcattggcaaaggctcctttggccaggtggtgaaagcctatgatcatcagacccaggagcttgtggccatcaagatcatcaagaacaaaaaggctttcctgaaccaggcccagattgagctgcggctgctggagctgatgaaccagcatgacacggagatgaagtactatatagtacacctgaagcggcacttcatgttccggaaccacctgtgcctggtatttgagctgctgtcctacaacctgtacgacctcctgcgcaacacccacttccgcggcgtctcgctgaacctgacccggaagctggcgcagcagctctgcacggcactgctctttctggccacgcctgagctcagcatcattcactgcgacctcaagcccgaaaacatcttgctgtgcaaccccaagcgcagcgccatcaagattgtggacttcggcagctcctgccagcttggccagaggatctaccagtatatccagagccgcttctaccgctcacctgaggtgctcctgggcacaccctacgacctggccattgacatgtggtccctgggctgcatccttgtggagatgcacaccggagagcccctcttcagtggctccaatgaggtcgaccagatgaaccgcattgtggaggtgctgggcatcccaccggccgccatgctggaccaggcgcccaaggctcgcaagtactttgaacggctgcctgggggtggctggaccctacgaaggacgaaagaactcaggaaggacctggtgctgcgcatgctggagtatgagcccgccgcccgcatcagccccctgggggctctgcagcacggcttcttccgccgcacggccgacgaggccaccaacacgggcccggcaggcagcagtgcctccacctcgcccgcgcccctcgacacctgcccctcttccagcaccgccagctccatctccagttctggaggctccagtggctcctccagtgacaaccggacctaccgctacagcaaccgatattgtgggggccctgggccccctatcacagactgtgagatgaacagcccccaggtcccaccctcccagccgctgcggccctgggcagggggtgatgtgccccacaagacacatcaagcccctgcctctgcctcgtcactgcctgggaccggggcccagttacccccccagccccgataccttggtcgtcccccatcaccaacctcaccaccacccccggagctgatggatgtgagcctggtgggcggccctgctgactgctccccacctcacccagcgcctgccccccagcacccggctgcctcagccctccggactcggatgactggaggtcgtccacccctcccgcctcctgatgaccctgccactctggggcctcacctgggcctccgtggtgtaccccagagcacagcagccagctcgtgaccctgccccctccctggggcccctcctgaagccataccctcccccatctgggggccctgggctcccatcctcatctctctccttgactggaattgctgctacccagctggggtgggtgaggcctgcactgattggggcctggggcaggggggtcaaggagagggttttggccgctccctccccactaaggactggacccttgggcccctctccccctttttttctatttattgtaccaaagacagtggtggtccggtggagggaagaccccccctcaccccaggaccctaggagggggtgggggcaggtagggggagatggccttgctcctcctcgctgtacccccagtaaagagctttctc

SEQ ID NO: 320175 - protein, 287 aa, Artificial Sequence
  derived and/or modified sequence
MSQAWWHTSVSPATQEAKAGGLLQPRRQRLWLKRCRISSSACEDLSAALIANKNLTRMDLSGNGVGFPGMMLLCEGLRHPQCRLQMIQLRKCQLESGACQEMASVLGTNPHLVELDLTGNALEDLGLRLLCQGLRHPVCRLRTLWLKICRLTAAACDELASTLSVNQSLRELDLSLNELGDLGVLLLCEGLRHPTCKLQTLRLDSCGLTAKACENLYFTLGINQTLTDLYLTNNALGDTGVRLLCKRLSHPGCKLRVLWLFGMDLNKMTHSRLAALRVTKPYLDIGC

SEQ ID NO: 320176 - protein, 949 aa, Artificial Sequence
  derived and/or modified sequence
MLRTAGRDGLCRLSTYLEELEAVELKKFKLYLGTATELGEGKIPWGSMEKAGPLEMAQLLITHFGPEEAWRLALSTFERINRKDLWERGQREDLVRDTPPGGPSSLGNQSTCLLEVSLVTPRKDPQETYRDYVRRKFRLMEDRNARLGECVNLSHRYTRLLLVKEHSNPMQVQQQLLDTGRGHARTVGHQASPIKIETLFEPDEERPEPPRTVVMQGAAGIGKSMLAHKVMLDWADGKLFQGRFDYLFYINCREMNQSATECSMQDLIFSCWPEPSAPLQELIRVPERLLFIIDGFDELKPSFHDPQGPWCLCWEEKRPTELLLNSLIRKKLLPELSLLITTRPTALEKLHRLLEHPRHVEILGFSEAERKEYFYKYFHNAEQAGQVFNYVRDNEPLFTMCFVPLVCWVVCTCLQQQLEGGGLLRQTSRTTTAVYMLYLLSLMQPKPGAPRLQPPPNQRGLCSLAADGLWNQKILFEEQDLRKHGLDGEDVSAFLNMNIFQKDINCERYYSFIHLSFQEFFAAMYYILDEGEGGAGPDQDVTRLLTEYAFSERSFLALTSRFLFGLLNEETRSHLEKSLCWKVSPHIKMDLLQWIQSKAQSDGSTLQQGSLEFFSCLYEIQEEEFIQQALSHFQVIVVSNIASKMEHMVSSFCLKRCRSAQVLHLYGATYSADGEDRARCSAGAHTLLVQLPERTVLLDAYSEHLAAALCTNPNLIELSLYRNALGSRGVKLLCQGLRHPNCKLQNLRLKRCRISSSACEDLSAALIANKNLTRMDLSGNGVGFPGMMLLCEGLRHPQCRLQMIQLRKCQLESGACQEMASVLGTNPHLVELDLTGNALEDLGLRLLCQGLRHPVCRLRTLWLQLDSCGLTAKACENLYFTLGINQTLTDLYLTNNALGDTGVRLLCKRLSHPGCKLRVLWLFGMDLNKMTHSRLAALRVTKPYLDIGC

SEQ ID NO: 320177 - protein, 892 aa, Artificial Sequence
  derived and/or modified sequence
MLRTAGRDGLCRLSTYLEELEAVELKKFKLYLGTATELGEGKIPWGSMEKAGPLEMAQLLITHFGPEEAWRLALSTFERINRKDLWERGQREDLVRDTPPGGPSSLGNQSTCLLEVSLVTPRKDPQETYRDYVRRKFRLMEDRNARLGECVNLSHRYTRLLLVKEHSNPMQVQQQLLDTGRGHARTVGHQASPIKIETLFEPDEERPEPPRTVVMQGAAGIGKSMLAHKVMLDWADGKLFQGRFDYLFYINCREMNQSATECSMQDLIFSCWPEPSAPLQELIRVPERLLFIIDGFDELKPSFHDPQGPWCLCWEEKRPTELLLNSLIRKKLLPELSLLITTRPTALEKLHRLLEHPRHVEILGFSEAERKEYFYKYFHNAEQAGQVFNYVRDNEPLFTMCFVPLVCWVVCTCLQQQLEGGGLLRQTSRTTTAVYMLYLLSLMQPKPGAPRLQPPPNQRGLCSLAADGLWNQKILFEEQDLRKHGLDGEDVSAFLNMNIFQKDINCERYYSFIHLSFQEFFAAMYYILDEGEGGAGPDQDVTRLLTEYAFSERSFLALTSRFLFGLLNEETRSHLEKSLCWKVSPHIKMDLLQWIQSKAQSDGSTLQQGSLEFFSCLYEIQEEEFIQQALSHFQVIVVSNIASKMEHMVSSFCLKRCRSAQVLHLYGATYSADGEDRARCSAGAHTLLVQLPERTVLLDAYSEHLAAALCTNPNLIELSLYRNALGSRGVKLLCQGLRHPNCKLQNLRLKRCRISSSACEDLSAALIANKNLTRMDLSGNGVGFPGMMLLCEGLRHPQCRLQMIQLRKCQLESGACQEMASVLGTNPHLVELDLTGNALEDLGLRLLCQGLRHPVCRLRTLCWMLFGMDLNKMTHSRLAALRVTKPYLDIGC

SEQ ID NO: 320178 - protein, 892 aa, Artificial Sequence
  derived and/or modified sequence
MLRTAGRDGLCRLSTYLEELEAVELKKFKLYLGTATELGEGKIPWGSMEKAGPLEMAQLLITHFGPEEAWRLALSTFERINRKDLWERGQREDLVRDTPPGGPSSLGNQSTCLLEVSLVTPRKDPQETYRDYVRRKFRLMEDRNARLGECVNLSHRYTRLLLVKEHSNPMQVQQQLLDTGRGHARTVGHQASPIKIETLFEPDEERPEPPRTVVMQGAAGIGKSMLAHKVMLDWADGKLFQGRFDYLFYINCREMNQSATECSMQDLIFSCWPEPSAPLQELIRVPERLLFIIDGFDELKPSFHDPQGPWCLCWEEKRPTELLLNSLIRKKLLPELSLLITTRPTALEKLHRLLEHPRHVEILGFSEAERKEYFYKYFHNAEQAGQVFNYVRDNEPLFTMCFVPLVCWVVCTCLQQQLEGGGLLRQTSRTTTAVYMLYLLSLMQPKPGAPRLQPPPNQRGLCSLAADGLWNQKILFEEQDLRKHGLDGEDVSAFLNMNIFQKDINCERYYSFIHLSFQEFFAAMYYILDEGEGGAGPDQDVTRLLTEYAFSERSFLALTSRFLFGLLNEETRSHLEKSLCWKVSPHIKMDLLQWIQSKAQSDGSTLQQGSLEFFSCLYEIQEEEFIQQALSHFQVIVVSNIASKMEHMVSSFCLKRCRSAQVLHLYGATYSADGEDRARCSAGAHTLLVQLRPERTVLLDAYSEHLAAALCTNPNLIELSLYRNALGSRGVKLLCQGLRHPNCKLQNLRLKRCRISSSACEDLSAALIANKNLTRMDLSGNGVGFPGMMLLCEGLRHPQCRLQMIQLRKCQLESGACQEMASVLGTNPHLVELDLTGNALEDLGLRLLCQGLRHPVCRLRTLWWLFGMDLNKMTHSRLAALRVTKPYLDIGC

SEQ ID NO: 320179 - DNA, 2850 bp, Artificial Sequence
  derived and/or modified sequence
atgctgagaaccgccggcagagacggcctgtgcagactgagcacctacctggaggagctggaggccgtggagctgaagaagttcaagctgtacctgggcaccgccaccgagctgggcgagggcaagatcccctggggcagcatggagaaggccggccccctggagatggcccagctgctgatcacccacttcggccccgaggaggcctggagactggccctgagcaccttcgagagaatcaacagaaaggacctgtgggagagaggccagagagaggacctggtgagagacaccccccccggcggccccagcagcctgggcaaccagagcacctgcctgctggaggtgagcctggtgacccccagaaaggacccccaggagacctacagagactacgtgagaagaaagttcagactgatggaggacagaaacgccagactgggcgagtgcgtgaacctgagccacagatacaccagactgctgctggtgaaggagcacagcaaccccatgcaggtgcagcagcagctgctggacaccggcagaggccacgccagaaccgtgggccaccaggccagccccatcaagatcgagaccctgttcgagcccgacgaggagagacccgagccccccagaaccgtggtgatgcagggcgccgccggcatcggcaagagcatgctggcccacaaggtgatgctggactgggccgacggcaagctgttccagggcagattcgactacctgttctacatcaactgcagagagatgaaccagagcgccaccgagtgcagcatgcaggacctgatcttcagctgctggcccgagcccagcgcccccctgcaggagctgatcagagtgcccgagagactgctgttcatcatcgacggcttcgacgagctgaagcccagcttccacgacccccagggcccctggtgcctgtgctgggaggagaagagacccaccgagctgctgctgaacagcctgatcagaaagaagctgctgcccgagctgagcctgctgatcaccaccagacccaccgccctggagaagctgcacagactgctggagcaccccagacacgtggagatcctgggcttcagcgaggccgagagaaaggagtacttctacaagtacttccacaacgccgagcaggccggccaggtgttcaactacgtgagagacaacgagcccctgttcaccatgtgcttcgtgcccctggtgtgctgggtggtgtgcacctgcctgcagcagcagctggagggcggcggcctgctgagacagaccagcagaaccaccaccgccgtgtacatgctgtacctgctgagcctgatgcagcccaagcccggcgcccccagactgcagcccccccccaaccagagaggcctgtgcagcctggccgccgacggcctgtggaaccagaagatcctgttcgaggagcaggacctgagaaagcacggcctggacggcgaggacgtgagcgccttcctgaacatgaacatcttccagaaggacatcaactgcgagagatactacagcttcatccacctgagcttccaggagttcttcgccgccatgtactacatcctggacgagggcgagggcggcgccggccccgaccaggacgtgaccagactgctgaccgagtacgccttcagcgagagaagcttcctggccctgaccagcagattcctgttcggcctgctgaacgaggagaccagaagccacctggagaagagcctgtgctggaaggtgagcccccacatcaagatggacctgctgcagtggatccagagcaaggcccagagcgacggcagcaccctgcagcagggcagcctggagttcttcagctgcctgtacgagatccaggaggaggagttcatccagcaggccctgagccacttccaggtgatcgtggtgagcaacatcgccagcaagatggagcacatggtgagcagcttctgcctgaagagatgcagaagcgcccaggtgctgcacctgtacggcgccacctacagcgccgacggcgaggacagagccagatgcagcgccggcgcccacaccctgctggtgcagctgcccgagagaaccgtgctgctggacgcctacagcgagcacctggccgccgccctgtgcaccaaccccaacctgatcgagctgagcctgtacagaaacgccctgggcagcagaggcgtgaagctgctgtgccagggcctgagacaccccaactgcaagctgcagaacctgagactgaagagatgcagaatcagcagcagcgcctgcgaggacctgagcgccgccctgatcgccaacaagaacctgaccagaatggacctgagcggcaacggcgtgggcttccccggcatgatgctgctgtgcgagggcctgagacacccccagtgcagactgcagatgatccagctgagaaagtgccagctggagagcggcgcctgccaggagatggccagcgtgctgggcaccaacccccacctggtggagctggacctgaccggcaacgccctggaggacctgggcctgagactgctgtgccagggcctgagacaccccgtgtgcagactgagaaccctgtggctgcagctggacagctgcggcctgaccgccaaggcctgcgagaacctgtacttcaccctgggcatcaaccagaccctgaccgacctgtacctgaccaacaacgccctgggcgacaccggcgtgagactgctgtgcaagagactgagccaccccggctgcaagctgagagtgctgtggctgttcggcatggacctgaacaagatgacccacagcagactggccgccctgagagtgaccaagccctacctggacatcggctgctag

SEQ ID NO: 320180 - DNA, 2679 bp, Artificial Sequence
  derived and/or modified sequence
atgctgagaaccgccggcagagacggcctgtgcagactgagcacctacctggaggagctggaggccgtggagctgaagaagttcaagctgtacctgggcaccgccaccgagctgggcgagggcaagatcccctggggcagcatggagaaggccggccccctggagatggcccagctgctgatcacccacttcggccccgaggaggcctggagactggccctgagcaccttcgagagaatcaacagaaaggacctgtgggagagaggccagagagaggacctggtgagagacaccccccccggcggccccagcagcctgggcaaccagagcacctgcctgctggaggtgagcctggtgacccccagaaaggacccccaggagacctacagagactacgtgagaagaaagttcagactgatggaggacagaaacgccagactgggcgagtgcgtgaacctgagccacagatacaccagactgctgctggtgaaggagcacagcaaccccatgcaggtgcagcagcagctgctggacaccggcagaggccacgccagaaccgtgggccaccaggccagccccatcaagatcgagaccctgttcgagcccgacgaggagagacccgagccccccagaaccgtggtgatgcagggcgccgccggcatcggcaagagcatgctggcccacaaggtgatgctggactgggccgacggcaagctgttccagggcagattcgactacctgttctacatcaactgcagagagatgaaccagagcgccaccgagtgcagcatgcaggacctgatcttcagctgctggcccgagcccagcgcccccctgcaggagctgatcagagtgcccgagagactgctgttcatcatcgacggcttcgacgagctgaagcccagcttccacgacccccagggcccctggtgcctgtgctgggaggagaagagacccaccgagctgctgctgaacagcctgatcagaaagaagctgctgcccgagctgagcctgctgatcaccaccagacccaccgccctggagaagctgcacagactgctggagcaccccagacacgtggagatcctgggcttcagcgaggccgagagaaaggagtacttctacaagtacttccacaacgccgagcaggccggccaggtgttcaactacgtgagagacaacgagcccctgttcaccatgtgcttcgtgcccctggtgtgctgggtggtgtgcacctgcctgcagcagcagctggagggcggcggcctgctgagacagaccagcagaaccaccaccgccgtgtacatgctgtacctgctgagcctgatgcagcccaagcccggcgcccccagactgcagcccccccccaaccagagaggcctgtgcagcctggccgccgacggcctgtggaaccagaagatcctgttcgaggagcaggacctgagaaagcacggcctggacggcgaggacgtgagcgccttcctgaacatgaacatcttccagaaggacatcaactgcgagagatactacagcttcatccacctgagcttccaggagttcttcgccgccatgtactacatcctggacgagggcgagggcggcgccggccccgaccaggacgtgaccagactgctgaccgagtacgccttcagcgagagaagcttcctggccctgaccagcagattcctgttcggcctgctgaacgaggagaccagaagccacctggagaagagcctgtgctggaaggtgagcccccacatcaagatggacctgctgcagtggatccagagcaaggcccagagcgacggcagcaccctgcagcagggcagcctggagttcttcagctgcctgtacgagatccaggaggaggagttcatccagcaggccctgagccacttccaggtgatcgtggtgagcaacatcgccagcaagatggagcacatggtgagcagcttctgcctgaagagatgcagaagcgcccaggtgctgcacctgtacggcgccacctacagcgccgacggcgaggacagagccagatgcagcgccggcgcccacaccctgctggtgcagctgcccgagagaaccgtgctgctggacgcctacagcgagcacctggccgccgccctgtgcaccaaccccaacctgatcgagctgagcctgtacagaaacgccctgggcagcagaggcgtgaagctgctgtgccagggcctgagacaccccaactgcaagctgcagaacctgagactgaagagatgcagaatcagcagcagcgcctgcgaggacctgagcgccgccctgatcgccaacaagaacctgaccagaatggacctgagcggcaacggcgtgggcttccccggcatgatgctgctgtgcgagggcctgagacacccccagtgcagactgcagatgatccagctgagaaagtgccagctggagagcggcgcctgccaggagatggccagcgtgctgggcaccaacccccacctggtggagctggacctgaccggcaacgccctggaggacctgggcctgagactgctgtgccagggcctgagacaccccgtgtgcagactgagaaccctgtgctggatgctgttcggcatggacctgaacaagatgacccacagcagactggccgccctgagagtgaccaagccctacctggacatcggctgctag

SEQ ID NO: 320181 - DNA, 2679 bp, Artificial Sequence
  derived and/or modified sequence
atgctgagaaccgccggcagagacggcctgtgcagactgagcacctacctggaggagctggaggccgtggagctgaagaagttcaagctgtacctgggcaccgccaccgagctgggcgagggcaagatcccctggggcagcatggagaaggccggccccctggagatggcccagctgctgatcacccacttcggccccgaggaggcctggagactggccctgagcaccttcgagagaatcaacagaaaggacctgtgggagagaggccagagagaggacctggtgagagacaccccccccggcggccccagcagcctgggcaaccagagcacctgcctgctggaggtgagcctggtgacccccagaaaggacccccaggagacctacagagactacgtgagaagaaagttcagactgatggaggacagaaacgccagactgggcgagtgcgtgaacctgagccacagatacaccagactgctgctggtgaaggagcacagcaaccccatgcaggtgcagcagcagctgctggacaccggcagaggccacgccagaaccgtgggccaccaggccagccccatcaagatcgagaccctgttcgagcccgacgaggagagacccgagccccccagaaccgtggtgatgcagggcgccgccggcatcggcaagagcatgctggcccacaaggtgatgctggactgggccgacggcaagctgttccagggcagattcgactacctgttctacatcaactgcagagagatgaaccagagcgccaccgagtgcagcatgcaggacctgatcttcagctgctggcccgagcccagcgcccccctgcaggagctgatcagagtgcccgagagactgctgttcatcatcgacggcttcgacgagctgaagcccagcttccacgacccccagggcccctggtgcctgtgctgggaggagaagagacccaccgagctgctgctgaacagcctgatcagaaagaagctgctgcccgagctgagcctgctgatcaccaccagacccaccgccctggagaagctgcacagactgctggagcaccccagacacgtggagatcctgggcttcagcgaggccgagagaaaggagtacttctacaagtacttccacaacgccgagcaggccggccaggtgttcaactacgtgagagacaacgagcccctgttcaccatgtgcttcgtgcccctggtgtgctgggtggtgtgcacctgcctgcagcagcagctggagggcggcggcctgctgagacagaccagcagaaccaccaccgccgtgtacatgctgtacctgctgagcctgatgcagcccaagcccggcgcccccagactgcagcccccccccaaccagagaggcctgtgcagcctggccgccgacggcctgtggaaccagaagatcctgttcgaggagcaggacctgagaaagcacggcctggacggcgaggacgtgagcgccttcctgaacatgaacatcttccagaaggacatcaactgcgagagatactacagcttcatccacctgagcttccaggagttcttcgccgccatgtactacatcctggacgagggcgagggcggcgccggccccgaccaggacgtgaccagactgctgaccgagtacgccttcagcgagagaagcttcctggccctgaccagcagattcctgttcggcctgctgaacgaggagaccagaagccacctggagaagagcctgtgctggaaggtgagcccccacatcaagatggacctgctgcagtggatccagagcaaggcccagagcgacggcagcaccctgcagcagggcagcctggagttcttcagctgcctgtacgagatccaggaggaggagttcatccagcaggccctgagccacttccaggtgatcgtggtgagcaacatcgccagcaagatggagcacatggtgagcagcttctgcctgaagagatgcagaagcgcccaggtgctgcacctgtacggcgccacctacagcgccgacggcgaggacagagccagatgcagcgccggcgcccacaccctgctggtgcagctgagacccgagagaaccgtgctgctggacgcctacagcgagcacctggccgccgccctgtgcaccaaccccaacctgatcgagctgagcctgtacagaaacgccctgggcagcagaggcgtgaagctgctgtgccagggcctgagacaccccaactgcaagctgcagaacctgagactgaagagatgcagaatcagcagcagcgcctgcgaggacctgagcgccgccctgatcgccaacaagaacctgaccagaatggacctgagcggcaacggcgtgggcttccccggcatgatgctgctgtgcgagggcctgagacacccccagtgcagactgcagatgatccagctgagaaagtgccagctggagagcggcgcctgccaggagatggccagcgtgctgggcaccaacccccacctggtggagctggacctgaccggcaacgccctggaggacctgggcctgagactgctgtgccagggcctgagacaccccgtgtgcagactgagaaccctgtggtggctgttcggcatggacctgaacaagatgacccacagcagactggccgccctgagagtgaccaagccctacctggacatcggctgctag

SEQ ID NO: 320182 - DNA, 3516 bp, Artificial Sequence
  derived and/or modified sequence
attggtgagtggggcagggcaggagggaactgaagagtgagaaagcattatttcagcaaaaggtctttcctcccttgctctctcctccaaccactggctcagcctctccgcccgctgcctgtgaatgatgcaatggaaggtgtgctggggtcgccctgtgtcccgtgcataggagcatctcagcctccaggtcctctcctttggggctcacggcacccccatgctacgaaccgcaggcagggacggcctctgtcgcctgtccacctacttggaagaactcgaggctgtggaactgaagaagttcaagttatacctggggaccgcgacagagctgggagaaggcaagatcccctggggaagcatggagaaggccggtcccctggaaatggcccagctgctcatcacccacttcgggccagaggaggcctggaggttggctctcagcacctttgagcggataaacaggaaggacctgtgggagagaggacagagagaggacctggtgagggataccccacctggtggcccgtcctcacttgggaaccagtcaacatgccttctggaagtctctcttgtcactccaagaaaagatccccaggaaacctacagggactatgtccgcaggaaattccggctcatggaagaccgcaatgcgcgcctaggggaatgtgtcaacctcagccaccggtacacccggctcctgctggtgaaggagcactcaaaccccatgcaggtccagcagcagcttctggacacaggccggggacacgcgaggaccgtgggacaccaggctagccccatcaagatagagaccctctttgagccagacgaggagcgccccgagccaccgcgcaccgtggtcatgcaaggcgcggcagggataggcaagtccatgctggcacacaaggtgatgctggactgggcggacgggaagctcttccaaggcagatttgattatctcttctacatcaactgcagggagatgaaccagagtgccacggaatgcagcatgcaagacctcatcttcagctgctggcctgagcccagcgcgcctctccaggagctcatccgagttcccgagcgcctccttttcatcatcgacggcttcgatgagctcaagccttctttccacgatcctcagggaccctggtgcctctgctgggaggagaaacggcccacggagctgcttcttaacagcttaattcggaagaagctgctccctgagctatctttgctcatcaccacacggcccacggctttggagaagctccaccgtctgctggagcaccccaggcatgtggagatcctgggcttctctgaggcagaaaggaaggaatacttctacaagtatttccacaatgcagagcaggcgggccaagtcttcaattacgtgagggacaacgagcctctcttcaccatgtgcttcgtccccctggtgtgctgggtggtgtgtacctgcctccagcagcagctggagggtggggggctgttgagacagacgtccaggaccaccactgcagtgtacatgctctacctgctgagtctgatgcaacccaagccgggggccccgcgcctccagcccccacccaaccagagagggttgtgctccttggcggcagatgggctctggaatcagaaaatcctatttgaggagcaggacctccggaagcacggcctagacggggaagacgtctctgccttcctcaacatgaacatcttccagaaggacatcaactgtgagaggtactacagcttcatccacttgagtttccaggaattctttgcagctatgtactatatcctggacgagggggagggcggggcaggcccagaccaggacgtgaccaggctgttgaccgagtacgcgttttctgaaaggagcttcctggcactcaccagccgcttcctgtttggactcctgaacgaggagaccaggagccacctggagaagagtctctgctggaaggtctcgccgcacatcaagatggacctgttgcagtggatccaaagcaaagctcagagcgacggctccaccctgcagcagggctccttggagttcttcagctgcttgtacgagatccaggaggaggagtttatccagcaggccctgagccacttccaggtgatcgtggtcagcaacattgcctccaagatggagcacatggtctcctcgttctgtctgaagcgctgcaggagcgcccaggtgctgcacttgtatggcgccacctacagcgcggacggggaagaccgcgcgaggtgctccgcaggagcgcacacgctgttggtgcagctaccagagaggaccgttctgctggacgcctacagtgaacatctggcagcggccctgtgcaccaatccaaacctgatagagctgtctctgtaccgaaatgccctgggcagccggggggtgaagctgctctgtcaaggactcagacaccccaactgcaaacttcagaacctgaggctgaagaggtgccgcatctccagctcagcctgcgaggacctctctgcagctctcatagccaataagaatttgacaaggatggatctcagtggcaacggcgttggattcccaggcatgatgctgctttgcgagggcctgcggcatccccagtgcaggctgcagatgattcagttgaggaagtgtcagctggagtccggggcttgtcaggagatggcttctgtgctcggcaccaacccacatctggttgagttggacctgacaggaaatgcactggaggatttgggcctgaggttactatgccagggactgaggcacccagtctgcagactacggactttgtggttgcagctggatagctgtggcctcacagccaaggcttgtgagaatctttacttcaccctggggatcaaccagaccttgaccgacctttacctgaccaacaacgccctaggggacacaggtgtccgactgctttgcaagcggctgagccatcctggctgcaaactccgagtcctctggttatttgggatggacctgaataaaatgacccacagtaggttggcagcgcttcgagtaacaaaaccttatttggacattggctgctgaatggtcctatctgctggctctcccctgagatctggacagaggaagatgggagggtgctcatcacccccccagcataatgatcagcctccttcctagagacagactcatgcagattgagatcaaaagtccctctgcttgggatcaaattaatgtttgacagagctggccaggcgtggtggctcatgtatgtaatcctagcacttcgagaggccgaggcaggtggatcacgaggtcaggagtttgagattagcctggccaagatggtgaaaccctgtctctactaaaaataaaaaaaaattagccaggcatggtggcgggcacctgtagtcccagctactcaggaggctgaggcaggagaatcgcttgaacccgggaggtggaggttgcagtgagccgagatcgcgccactgcactccagcctgggcgacagagtgggactccatctc

SEQ ID NO: 320183 - DNA, 3345 bp, Artificial Sequence
  derived and/or modified sequence
attggtgagtggggcagggcaggagggaactgaagagtgagaaagcattatttcagcaaaaggtctttcctcccttgctctctcctccaaccactggctcagcctctccgcccgctgcctgtgaatgatgcaatggaaggtgtgctggggtcgccctgtgtcccgtgcataggagcatctcagcctccaggtcctctcctttggggctcacggcacccccatgctacgaaccgcaggcagggacggcctctgtcgcctgtccacctacttggaagaactcgaggctgtggaactgaagaagttcaagttatacctggggaccgcgacagagctgggagaaggcaagatcccctggggaagcatggagaaggccggtcccctggaaatggcccagctgctcatcacccacttcgggccagaggaggcctggaggttggctctcagcacctttgagcggataaacaggaaggacctgtgggagagaggacagagagaggacctggtgagggataccccacctggtggcccgtcctcacttgggaaccagtcaacatgccttctggaagtctctcttgtcactccaagaaaagatccccaggaaacctacagggactatgtccgcaggaaattccggctcatggaagaccgcaatgcgcgcctaggggaatgtgtcaacctcagccaccggtacacccggctcctgctggtgaaggagcactcaaaccccatgcaggtccagcagcagcttctggacacaggccggggacacgcgaggaccgtgggacaccaggctagccccatcaagatagagaccctctttgagccagacgaggagcgccccgagccaccgcgcaccgtggtcatgcaaggcgcggcagggataggcaagtccatgctggcacacaaggtgatgctggactgggcggacgggaagctcttccaaggcagatttgattatctcttctacatcaactgcagggagatgaaccagagtgccacggaatgcagcatgcaagacctcatcttcagctgctggcctgagcccagcgcgcctctccaggagctcatccgagttcccgagcgcctccttttcatcatcgacggcttcgatgagctcaagccttctttccacgatcctcagggaccctggtgcctctgctgggaggagaaacggcccacggagctgcttcttaacagcttaattcggaagaagctgctccctgagctatctttgctcatcaccacacggcccacggctttggagaagctccaccgtctgctggagcaccccaggcatgtggagatcctgggcttctctgaggcagaaaggaaggaatacttctacaagtatttccacaatgcagagcaggcgggccaagtcttcaattacgtgagggacaacgagcctctcttcaccatgtgcttcgtccccctggtgtgctgggtggtgtgtacctgcctccagcagcagctggagggtggggggctgttgagacagacgtccaggaccaccactgcagtgtacatgctctacctgctgagtctgatgcaacccaagccgggggccccgcgcctccagcccccacccaaccagagagggttgtgctccttggcggcagatgggctctggaatcagaaaatcctatttgaggagcaggacctccggaagcacggcctagacggggaagacgtctctgccttcctcaacatgaacatcttccagaaggacatcaactgtgagaggtactacagcttcatccacttgagtttccaggaattctttgcagctatgtactatatcctggacgagggggagggcggggcaggcccagaccaggacgtgaccaggctgttgaccgagtacgcgttttctgaaaggagcttcctggcactcaccagccgcttcctgtttggactcctgaacgaggagaccaggagccacctggagaagagtctctgctggaaggtctcgccgcacatcaagatggacctgttgcagtggatccaaagcaaagctcagagcgacggctccaccctgcagcagggctccttggagttcttcagctgcttgtacgagatccaggaggaggagtttatccagcaggccctgagccacttccaggtgatcgtggtcagcaacattgcctccaagatggagcacatggtctcctcgttctgtctgaagcgctgcaggagcgcccaggtgctgcacttgtatggcgccacctacagcgcggacggggaagaccgcgcgaggtgctccgcaggagcgcacacgctgttggtgcagctaccagagaggaccgttctgctggacgcctacagtgaacatctggcagcggccctgtgcaccaatccaaacctgatagagctgtctctgtaccgaaatgccctgggcagccggggggtgaagctgctctgtcaaggactcagacaccccaactgcaaacttcagaacctgaggctgaagaggtgccgcatctccagctcagcctgcgaggacctctctgcagctctcatagccaataagaatttgacaaggatggatctcagtggcaacggcgttggattcccaggcatgatgctgctttgcgagggcctgcggcatccccagtgcaggctgcagatgattcagttgaggaagtgtcagctggagtccggggcttgtcaggagatggcttctgtgctcggcaccaacccacatctggttgagttggacctgacaggaaatgcactggaggatttgggcctgaggttactatgccagggactgaggcacccagtctgcagactacggactttgtgctggatgttatttgggatggacctgaataaaatgacccacagtaggttggcagcgcttcgagtaacaaaaccttatttggacattggctgctgaatggtcctatctgctggctctcccctgagatctggacagaggaagatgggagggtgctcatcacccccccagcataatgatcagcctccttcctagagacagactcatgcagattgagatcaaaagtccctctgcttgggatcaaattaatgtttgacagagctggccaggcgtggtggctcatgtatgtaatcctagcacttcgagaggccgaggcaggtggatcacgaggtcaggagtttgagattagcctggccaagatggtgaaaccctgtctctactaaaaataaaaaaaaattagccaggcatggtggcgggcacctgtagtcccagctactcaggaggctgaggcaggagaatcgcttgaacccgggaggtggaggttgcagtgagccgagatcgcgccactgcactccagcctgggcgacagagtgggactccatctc

SEQ ID NO: 320184 - DNA, 2850 bp, Artificial Sequence
  derived and/or modified sequence
atgctgcgcactgcaggacgggacggcctctgcaggttgagcacttatttggaggagctggaggcagtcgaactgaaaaagtttaaactgtatctgggaacggctacagagcttggtgaagggaaaatcccgtgggggagcatggaaaaggcaggccccctcgagatggcacagttgctgatcacccatttcggacccgaggaggcatggcggcttgccttatccactttcgagaggataaatcggaaagatttgtgggagagaggccaaagggaggacctggtgcgggacactccaccaggcgggccaagctccttgggcaaccagagcacctgtctcctggaggtttcactggtcacccctaggaaagacccccaggagacgtacagagactatgtgcggcgtaagtttcgtcttatggaggaccggaatgcacgccttggcgagtgtgtcaacttgtcccatcggtacactcggttactgctcgtgaaggaacacagtaatccaatgcaggttcagcagcaactgctcgacacgggacgcggccacgctagaacggtcggccatcaagcatccccaattaagatcgaaaccctgtttgagcccgacgaggaacggcccgagccgccccggacggttgttatgcaaggggcagccggaattggtaagtccatgctcgctcacaaggtcatgctagattgggcagatggtaaattgtttcagggccgctttgattacctcttctatattaactgccgtgaaatgaaccagtccgccacagagtgcagcatgcaagacctaatcttctcctgctggccagaaccaagtgctccactgcaagagctcatacgtgttcctgaaagactgctgtttatcatcgatggcttcgatgagctgaaacccagcttccatgacccgcagggtccttggtgtctgtgttgggaagaaaaacggcccaccgagctgttactgaatagtctcattagaaagaaacttctacccgagctttccctgctaattacaacccgccctacggcgttagagaagctgcaccgcctcctcgaacaccctcgacatgtggagattcttggattttcagaagctgagcggaaggagtacttctacaagtacttccacaatgccgaacaggcaggccaagttttcaactatgtgcgagataatgagcccctcttcacgatgtgcttcgtcccactggtctgttgggttgtgtgtacctgcctacagcagcagctcgaggggggcggattgcttcgacagacgtctagaaccaccactgccgtctatatgctctacctgctgtccctgatgcaaccaaagccaggtgccccccgactccagccaccccccaatcagagggggctgtgtagcttagctgccgatggtctgtggaaccagaagatcttgttcgaagagcaggatctacgtaaacatggactagacggcgaagacgtctcagcctttctcaacatgaatatcttccagaaggatatcaattgtgagcggtattattctttcatccacctgagcttccaggagttctttgccgctatgtattacatcctggatgagggagagggcggggccggccctgatcaggacgtcacaagactgcttacggaatatgccttttctgagagaagcttcctggcccttacaagccgctttttatttggattactcaacgaagaaacacggtcacacctggaaaaatccctgtgttggaaggtctccccacatattaaaatggacttactgcagtggattcaaagcaaggcccagtcggacggcagcaccttgcaacaggggtcactcgagttctttagttgtttatatgagatacaggaagaagaattcatccagcaggccttgtcacacttccaggtaatcgtggtgtctaacattgccagtaaaatggagcacatggtctcttctttctgtctcaaaagatgccgttccgctcaggtcctacacctatatggagccacttattctgcggacggagaagaccgtgcaaggtgttctgccggcgcccacacgctcctagtgcagcttcctgaacggacggtactattagatgcctattccgagcacctggcagcagctctgtgtaccaaccctaaccttatagaactttctttataccgtaatgcgctcggaagcaggggtgtcaaactcctctgccagggtctgcgccacccaaactgcaaactccagaacctgcgcttgaaacgttgcaggataagctccagtgcgtgtgaggacttgagcgccgctctcattgctaacaagaacctaaccaggatggacctgtcaggaaatggggtaggattccctggcatgatgctgttatgcgagggcctaagacacccgcagtgccgcctgcagatgatccagctgcgcaagtgccaacttgagtctggggcctgtcaggagatggcctctgtgctgggcaccaacccccatctggtcgagctcgacctaaccgggaacgcgctggaggatctcggtctgcggctcctgtgccagggtctccgccaccccgtctgtcggctccgaacactgtggctccaactggactcctgcggactgactgccaaggcttgcgagaacctgtactttaccctgggcatcaaccagaccctgactgatctgtacctgacaaacaatgcactgggtgacaccggggtgcggctgctgtgtaagcggctctctcaccctggttgtaagctgcgcgtgctctggctgtttggcatggacctgaacaagatgactcactccaggcttgccgccctgcgggttacaaaaccatacctggacattggctgttag

SEQ ID NO: 320185 - DNA, 2679 bp, Artificial Sequence
  derived and/or modified sequence
atgctgcgcaccgccggcagggacggtctgtgtaggctgagcacttacctggaggaactggaggcagttgagttgaaaaaatttaaactgtacctcgggaccgccactgagctgggagaaggcaaaatcccttggggaagcatggaaaaggccggccccctggaaatggcccaactgctgatcacccacttcggtcctgaagaggcttggaggcttgcattgagcaccttcgagcgtattaatcgaaaagatctgtgggagagaggtcagcgagaagacctcgttcgcgatacgccccccggcggtccgtcatccttgggcaatcaaagcacctgtcttctcgaagtctccttagtcactccacgcaaagatccccaggaaacgtacagggactacgtgcggagaaagtttcgtttaatggaagatcggaacgccaggttaggcgagtgtgtgaacttgagccacagatacacaaggctcttgctggtaaaggaacacagtaaccctatgcaggtgcaacagcagctgctcgataccggtcgcggccatgccaggaccgtcggccaccaggctagccccatcaaaatcgagaccctgtttgaaccagacgaggagagacctgagcccccaagaaccgtagtgatgcagggagctgccggcatcgggaaatctatgctggcacacaaagtgatgctggattgggccgacgggaagctttttcagggccgcttcgactacctattttacatcaattgccgagagatgaatcagagcgctacagaatgcagtatgcaggatctgattttttcatgttggcctgagcccagcgcccctctgcaggagctcattagagtgccagaacggttacttttcattattgacggattcgatgaactgaagccgtcctttcacgacccacagggaccctggtgtctatgctgggaagaaaaaaggcccaccgagctcctgctgaatagcctgatccgaaaaaaactgctgccagaactgagcctgctcatcacaacaagacctacggcactggaaaagctccaccgattgcttgagcatcctagacacgtagaaattttggggttctcagaagcagagaggaaggagtatttttacaagtatttccacaatgcggagcaggcaggtcaggtgttcaactatgtacgcgataacgagccattattcaccatgtgcttcgtccctttggtgtgctgggtcgtgtgcacctgcttacaacagcagctcgaaggtgggggcctccttcggcaaaccagccgtacaaccaccgcagtgtatatgctctacctgctcagtctgatgcaaccgaaacctggtgctcccagactccagcccccaccgaaccagcgtggtctctgcagccttgcagcagatgggttatggaaccagaagattctgttcgaggaacaagacctgcggaaacatggcctagacggggaagacgtgagtgccttcttaaacatgaacatttttcagaaagacattaactgcgagaggtactacagttttatccacctcagcttccaagagttttttgccgcaatgtattatatactggatgaaggggaggggggcgccggaccagaccaggatgtgacacggcttttgaccgagtacgcattcagcgaaagatcatttctcgcacttacctctaggttcctgttcgggctgctgaatgaagaaacacgctctcacctggaaaagagcctgtgttggaaggtcagccctcacatcaagatggatctgcttcagtggatccagagcaaggcccagtccgatggatcaacgcttcagcagggaagcctcgagttcttctcctgtctatacgagattcaggaagaggaattcatccagcaggcactctctcactttcaggtgatcgtggtcagcaacatcgcaagcaaaatggaacacatggtcagtagcttctgcctgaaacgatgtaggtccgcccaggtgttgcacctatacggagccacctactcagcagacggggaggatagagcacggtgcagcgcaggtgcccataccctgctcgtgcagctgcctgaacgcacagtgctgctggacgcctattcagagcatctggcggccgccctgtgtacgaaccccaatttgatagaactgtctctctacagaaacgcgttgggaagtaggggcgtgaaattgctctgtcaagggttacgccatcccaactgcaaactacagaatctacgattgaagcgttgtaggatttcaagttcagcctgcgaagacctctccgccgcactgatcgccaataagaatcttactcgtatggacctcagtgggaacggcgtgggatttccggggatgatgctgttgtgtgaagggctaagacaccctcagtgtaggctacagatgatccagctgaggaagtgccagttggaaagtggcgcgtgtcaagaaatggcctcagtgctcgggactaatccacatcttgtagagctcgacctcacgggcaacgccttagaagaccttgggttgcggctcctgtgtcaggggctgcgtcatcccgtttgtcggctccgcactctatgctggatgctgtttggcatggatctgaacaagatgacccattcacggctcgccgcactcagggtcacaaagccctacctggatatcggctgctag

SEQ ID NO: 320186 - DNA, 2679 bp, Artificial Sequence
  derived and/or modified sequence
atgctgcggactgccggccgcgacggactgtgtcgattgtccacttatctggaggagttggaagccgtcgagctgaagaagtttaagctctatcttggtactgctactgaacttggcgaagggaagattccgtggggaagcatggaaaaagccggccctctcgaaatggcacagctcctgatcactcacttcggccccgaagaggcatggcggttggcactgtctacatttgagaggattaaccgcaaggatctctgggagcgcggtcagcgagaggatctcgtccgggatacgccaccaggcggcccttcgtctttgggaaaccagagcacttgcctgctggaggtttctcttgtgacaccccgtaaagacccgcaggaaacctacagggactatgttaggagaaagttccggctaatggaggacagaaatgccaggttaggcgagtgcgtaaacctcagccatcgatacacccgactcctgctggtgaaggagcatagcaacccaatgcaggttcaacagcagctgctggataccggacgcggacacgccaggaccgtgggacaccaggcctccccaataaaaattgagactctcttcgagcccgatgaagagaggcctgagcctccaagaacagtggtcatgcaaggagccgcaggcatcggcaaaagcatgctcgcacataaggtcatgcttgattgggctgacggcaagttgttccagggccgcttcgattatttgttctatattaattgcagggagatgaatcagtctgcgaccgagtgtagtatgcaggatctcattttctcatgctggcccgagccctctgctcctctgcaggaactgatccgcgttcccgaaaggttactgttcattattgatggctttgatgagctgaaaccctccttccatgatccccagggcccatggtgtctgtgttgggaggaaaaaaggccaactgaacttctgctgaatagcctgatcaggaagaagctcctgcccgaactgtcactacttattactacacgacccacagcgctggagaagcttcacagacttctggaacatccacgccacgtcgagatcttagggttctctgaagcagagcggaaagagtacttttataagtatttccataatgccgagcaagccggccaggtgttcaattacgtgcgtgacaatgagccactatttactatgtgttttgttcctttggtctgctgggtggtttgtacttgcctccaacagcaactagaaggaggcggcttgctgaggcaaacgtctcgaaccactaccgccgtctacatgctgtacttattgagccttatgcagccaaagccgggtgcaccacgcctgcagcctccccctaaccaacggggactctgcagccttgccgctgacggtctgtggaatcagaagattctgtttgaagagcaagatctgagaaaacacggcttggatggtgaggatgtgtccgccttcttaaatatgaatatattccagaaagatatcaactgtgagagatattacagttttatccatctctcttttcaggaatttttcgcagcgatgtattacatattggatgagggcgagggcggagccggccccgatcaagacgtgacacgcctgctgactgagtacgccttttccgagcggtcttttcttgctttgacgtctagattcctattcggactgttaaacgaggagactaggtcacacctcgaaaaatcactgtgctggaaagtaagtccccacatcaagatggatcttctgcaatggatacaatctaaggctcagtctgacgggtccaccctgcagcaagggagtttggagtttttcagctgcctctacgagatccaggaagaggagttcatccagcaagcactgtctcatttccaggtgatcgttgtatcaaatattgccagcaaaatggaacatatggtgtcctctttctgtttgaaacgttgtcggtccgcacaggtgctgcacctctacggcgccacttactctgccgacggcgaggatcgcgcacgctgctcggccggggcccacaccttattggttcagctgagaccagagagaactgttctgctggatgcttactctgaacacctcgcagcggccctgtgtacaaatcctaacctgatcgaactcagcctgtacaggaacgctctcggctccagaggcgtgaaactactctgccaggggctgcgacatccgaattgcaaactgcagaacctgcgactgaagagatgtagaatttcatcaagtgcctgcgaagacctctctgcggcactcattgcaaataagaacctcacgaggatggatctcagcggcaatggagtggggtttcccggaatgatgctgctgtgtgaggggcttaggcaccctcagtgcaggctacagatgatccagctgaggaagtgtcaattggagtccggagcgtgtcaggaaatggcctccgtcttagggaccaaccctcacctcgtggagttagatctgactggtaatgcccttgaagacttgggattgagactgttgtgtcagggtctgcgccacccggtgtgccgcctgcggactctctggtggctgttcgggatggacttaaataaaatgacacactctcgacttgccgcgctccgggtcaccaagccatatctggatattggctgctag

SEQ ID NO: 320187 - DNA, 2850 bp, Artificial Sequence
  derived and/or modified sequence
atgctgaggacagctggaagagatggcctgtgccgcctgagcacctacctggaggagctggaggccgtggagctgaagaagttcaagctgtacctgggcacagccacagagctgggggagggcaagatcccctggggctccatggagaaggccggccccctggagatggcccagctgctgatcacccacttcggccctgaggaggcctggaggctggccctgagcacctttgagcgcatcaacaggaaggacctgtgggagcggggccagcgggaggacctggtgcgggacaccccacctgggggccccagcagcctgggcaaccagagcacctgcctgctggaggtgtccctggtgacccccaggaaggacccccaggagacctacagagattatgtgcggaggaagttccggctgatggaggacagaaatgcccggctgggagaatgtgtgaacctgagccaccgctacacccggctgctgctggtgaaggagcacagcaaccccatgcaggtgcagcagcagctgctggacaccggccggggccacgccaggacagtgggccaccaggccagccccatcaagattgagaccctgtttgagccagatgaggagaggcctgagccccccaggacagtggtgatgcagggcgctgctggcatcggcaagtccatgctggcccacaaggtgatgctggactgggcagatggcaagctgttccagggccgctttgactacctgttctacatcaactgccgggagatgaaccagagcgccacagaatgttccatgcaggacctgatcttcagctgctggccagagcccagcgcccccctgcaggagctgatccgggtgcctgagcggctgctcttcatcattgatggctttgatgagctgaagcccagcttccatgacccccagggcccctggtgcctgtgctgggaggagaagaggcccacagagctgctgctgaacagcctcatcaggaagaagctgctgcctgagctgagcctgctgatcaccacccggcccacagccctggagaagctgcaccggctgctggagcaccccaggcatgtggagatcctgggcttcagcgaggccgagaggaaggagtacttctacaagtacttccacaatgctgagcaggccggccaggtgttcaactacgtgcgggacaatgagcccctcttcaccatgtgctttgtgcccctggtgtgctgggtggtgtgcacctgcctgcagcagcagctggagggcggcggcctgctgcggcagaccagcaggaccaccacagctgtgtacatgctgtacctgctgagcctgatgcagcccaagccaggggccccccggctgcagcccccacccaaccagaggggcctgtgcagcctggccgcagatggcctgtggaaccagaagatcctgtttgaggagcaggacctgaggaagcacggcctggatggagaagatgtgtctgccttcctgaacatgaacatcttccagaaggacatcaactgtgagcgctactacagcttcatccacctgtccttccaggagttctttgctgccatgtactacatcctggatgaaggagagggcggggccggccctgaccaggatgtgacccggctgctgacagaatatgccttcagcgagaggagcttcctggccctgaccagccgcttcctgtttggcctgctgaatgaggagaccaggagccacctggagaagagcctgtgctggaaggtgagcccccacatcaagatggacctgctgcagtggatccagagcaaggcccagagtgatggcagcaccctgcagcagggcagcctggagttcttcagctgcctgtatgagatccaggaggaggagttcatccagcaggccctgagccacttccaggtgattgtggtgagcaacatcgccagcaagatggagcacatggtgtcctccttctgcctgaagcgctgccgcagcgcccaggtgctgcacctgtatggagccacctacagcgcagatggagaagatcgggcccgctgcagcgctggggcccacaccctgctggtgcagctgcctgagaggacagtgctgctggatgcctacagcgagcacctggccgccgccctgtgcaccaaccccaacctgattgagctgagcctgtacagaaatgccctgggcagcagaggagtgaagctgctgtgccagggcctgcggcaccccaactgcaagctgcagaacctgcggctgaagcgctgccgcatcagcagcagcgcctgtgaggacctgtctgctgccctgattgccaacaagaacctgaccaggatggacctgtctggaaatggagtgggcttccctggcatgatgctgctgtgtgagggcctgcggcacccccagtgccgcctgcagatgatccagctgaggaagtgccagctggagagcggggcctgccaggagatggcctctgtgctgggcaccaacccccacctggtggagctggacctgactggaaatgccctggaggacctgggcctgcggctgctgtgccagggcctgcggcaccctgtgtgccgcctgcggaccctgtggctgcagctggacagctgtggcctgacagccaaggcctgtgagaacctgtacttcaccctgggcatcaaccagaccctgacagacctgtacctgaccaacaatgccctgggggacacaggagtgcggctgctgtgcaagaggctgagccaccctggctgcaagctgcgggtgctgtggctgtttggcatggacctgaacaagatgacccacagccggctggccgccctgcgggtgaccaagccctacctggacatcggctgctag

SEQ ID NO: 320188 - DNA, 2679 bp, Artificial Sequence
  derived and/or modified sequence
atgctgaggacagctggaagagatggcctgtgccgcctgagcacctacctggaggagctggaggccgtggagctgaagaagttcaagctgtacctgggcacagccacagagctgggggagggcaagatcccctggggctccatggagaaggccggccccctggagatggcccagctgctgatcacccacttcggccctgaggaggcctggaggctggccctgagcacctttgagcgcatcaacaggaaggacctgtgggagcggggccagcgggaggacctggtgcgggacaccccacctgggggccccagcagcctgggcaaccagagcacctgcctgctggaggtgtccctggtgacccccaggaaggacccccaggagacctacagagattatgtgcggaggaagttccggctgatggaggacagaaatgcccggctgggagaatgtgtgaacctgagccaccgctacacccggctgctgctggtgaaggagcacagcaaccccatgcaggtgcagcagcagctgctggacaccggccggggccacgccaggacagtgggccaccaggccagccccatcaagattgagaccctgtttgagccagatgaggagaggcctgagccccccaggacagtggtgatgcagggcgctgctggcatcggcaagtccatgctggcccacaaggtgatgctggactgggcagatggcaagctgttccagggccgctttgactacctgttctacatcaactgccgggagatgaaccagagcgccacagaatgttccatgcaggacctgatcttcagctgctggccagagcccagcgcccccctgcaggagctgatccgggtgcctgagcggctgctcttcatcattgatggctttgatgagctgaagcccagcttccatgacccccagggcccctggtgcctgtgctgggaggagaagaggcccacagagctgctgctgaacagcctcatcaggaagaagctgctgcctgagctgagcctgctgatcaccacccggcccacagccctggagaagctgcaccggctgctggagcaccccaggcatgtggagatcctgggcttcagcgaggccgagaggaaggagtacttctacaagtacttccacaatgctgagcaggccggccaggtgttcaactacgtgcgggacaatgagcccctcttcaccatgtgctttgtgcccctggtgtgctgggtggtgtgcacctgcctgcagcagcagctggagggcggcggcctgctgcggcagaccagcaggaccaccacagctgtgtacatgctgtacctgctgagcctgatgcagcccaagccaggggccccccggctgcagcccccacccaaccagaggggcctgtgcagcctggccgcagatggcctgtggaaccagaagatcctgtttgaggagcaggacctgaggaagcacggcctggatggagaagatgtgtctgccttcctgaacatgaacatcttccagaaggacatcaactgtgagcgctactacagcttcatccacctgtccttccaggagttctttgctgccatgtactacatcctggatgaaggagagggcggggccggccctgaccaggatgtgacccggctgctgacagaatatgccttcagcgagaggagcttcctggccctgaccagccgcttcctgtttggcctgctgaatgaggagaccaggagccacctggagaagagcctgtgctggaaggtgagcccccacatcaagatggacctgctgcagtggatccagagcaaggcccagagtgatggcagcaccctgcagcagggcagcctggagttcttcagctgcctgtatgagatccaggaggaggagttcatccagcaggccctgagccacttccaggtgattgtggtgagcaacatcgccagcaagatggagcacatggtgtcctccttctgcctgaagcgctgccgcagcgcccaggtgctgcacctgtatggagccacctacagcgcagatggagaagatcgggcccgctgcagcgctggggcccacaccctgctggtgcagctgcctgagaggacagtgctgctggatgcctacagcgagcacctggccgccgccctgtgcaccaaccccaacctgattgagctgagcctgtacagaaatgccctgggcagcagaggagtgaagctgctgtgccagggcctgcggcaccccaactgcaagctgcagaacctgcggctgaagcgctgccgcatcagcagcagcgcctgtgaggacctgtctgctgccctgattgccaacaagaacctgaccaggatggacctgtctggaaatggagtgggcttccctggcatgatgctgctgtgtgagggcctgcggcacccccagtgccgcctgcagatgatccagctgaggaagtgccagctggagagcggggcctgccaggagatggcctctgtgctgggcaccaacccccacctggtggagctggacctgactggaaatgccctggaggacctgggcctgcggctgctgtgccagggcctgcggcaccctgtgtgccgcctgcggaccctgtgctggatgctgtttggcatggacctgaacaagatgacccacagccggctggccgccctgcgggtgaccaagccctacctggacatcggctgctag

SEQ ID NO: 320189 - DNA, 2679 bp, Artificial Sequence
  derived and/or modified sequence
atgctgaggacagctggaagagatggcctgtgccgcctgagcacctacctggaggagctggaggccgtggagctgaagaagttcaagctgtacctgggcacagccacagagctgggggagggcaagatcccctggggctccatggagaaggccggccccctggagatggcccagctgctgatcacccacttcggccctgaggaggcctggaggctggccctgagcacctttgagcgcatcaacaggaaggacctgtgggagcggggccagcgggaggacctggtgcgggacaccccacctgggggccccagcagcctgggcaaccagagcacctgcctgctggaggtgtccctggtgacccccaggaaggacccccaggagacctacagagattatgtgcggaggaagttccggctgatggaggacagaaatgcccggctgggagaatgtgtgaacctgagccaccgctacacccggctgctgctggtgaaggagcacagcaaccccatgcaggtgcagcagcagctgctggacaccggccggggccacgccaggacagtgggccaccaggccagccccatcaagattgagaccctgtttgagccagatgaggagaggcctgagccccccaggacagtggtgatgcagggcgctgctggcatcggcaagtccatgctggcccacaaggtgatgctggactgggcagatggcaagctgttccagggccgctttgactacctgttctacatcaactgccgggagatgaaccagagcgccacagaatgttccatgcaggacctgatcttcagctgctggccagagcccagcgcccccctgcaggagctgatccgggtgcctgagcggctgctcttcatcattgatggctttgatgagctgaagcccagcttccatgacccccagggcccctggtgcctgtgctgggaggagaagaggcccacagagctgctgctgaacagcctcatcaggaagaagctgctgcctgagctgagcctgctgatcaccacccggcccacagccctggagaagctgcaccggctgctggagcaccccaggcatgtggagatcctgggcttcagcgaggccgagaggaaggagtacttctacaagtacttccacaatgctgagcaggccggccaggtgttcaactacgtgcgggacaatgagcccctcttcaccatgtgctttgtgcccctggtgtgctgggtggtgtgcacctgcctgcagcagcagctggagggcggcggcctgctgcggcagaccagcaggaccaccacagctgtgtacatgctgtacctgctgagcctgatgcagcccaagccaggggccccccggctgcagcccccacccaaccagaggggcctgtgcagcctggccgcagatggcctgtggaaccagaagatcctgtttgaggagcaggacctgaggaagcacggcctggatggagaagatgtgtctgccttcctgaacatgaacatcttccagaaggacatcaactgtgagcgctactacagcttcatccacctgtccttccaggagttctttgctgccatgtactacatcctggatgaaggagagggcggggccggccctgaccaggatgtgacccggctgctgacagaatatgccttcagcgagaggagcttcctggccctgaccagccgcttcctgtttggcctgctgaatgaggagaccaggagccacctggagaagagcctgtgctggaaggtgagcccccacatcaagatggacctgctgcagtggatccagagcaaggcccagagtgatggcagcaccctgcagcagggcagcctggagttcttcagctgcctgtatgagatccaggaggaggagttcatccagcaggccctgagccacttccaggtgattgtggtgagcaacatcgccagcaagatggagcacatggtgtcctccttctgcctgaagcgctgccgcagcgcccaggtgctgcacctgtatggagccacctacagcgcagatggagaagatcgggcccgctgcagcgctggggcccacaccctgctggtgcagctgcggcctgagaggacagtgctgctggatgcctacagcgagcacctggccgccgccctgtgcaccaaccccaacctgattgagctgagcctgtacagaaatgccctgggcagccggggcgtgaagctgctgtgccagggcctgcggcaccccaactgcaagctgcagaacctgcggctgaagcgctgccgcatcagcagcagcgcctgtgaggacctgtctgctgccctgattgccaacaagaacctgaccaggatggacctgtctggaaatggagtgggcttccctggcatgatgctgctgtgtgagggcctgcggcacccccagtgccgcctgcagatgatccagctgaggaagtgccagctggagagcggggcctgccaggagatggcctctgtgctgggcaccaacccccacctggtggagctggacctgactggaaatgccctggaggacctgggcctgcggctgctgtgccagggcctgcggcaccctgtgtgccgcctgcggaccctgtggtggctgtttggcatggacctgaacaagatgacccacagccggctggccgccctgcgggtgaccaagccctacctggacatcggctgctag

SEQ ID NO: 320190 - DNA, 3205 bp, Artificial Sequence
  derived and/or modified sequence
attggtgagtggggcagggcaggagggaactgaagagtgagaaagcattatttcagcaaaaggtctttcctcccttgctctctcctccaaccactggctcagcctctccgcccgctgcctgtgaatgatgcaatggaaggtgtgctggggtcgccctgtgtcccgtgcataggagcatctcagcctccaggtcctctcctttggggctcacggcacccccatgctacgaaccgcaggcagggacggcctctgtcgcctgtccacctacttggaagaactcgaggctgtggaactgaagaagttcaagttatacctggggaccgcgacagagctgggagaaggcaagatcccctggggaagcatggagaaggccggtcccctggaaatggcccagctgctcatcacccacttcgggccagaggaggcctggaggttggctctcagcacctttgagcggataaacaggaaggacctgtgggagagaggacagagagaggacctggtgagggataccccacctggtggcccgtcctcacttgggaaccagtcaacatgccttctggaagtctctcttgtcactccaagaaaagatccccaggaaacctacagggactatgtccgcaggaaattccggctcatggaagaccgcaatgcgcgcctaggggaatgtgtcaacctcagccaccggtacacccggctcctgctggtgaaggagcactcaaaccccatgcaggtccagcagcagcttctggacacaggccggggacacgcgaggaccgtgggacaccaggctagccccatcaagatagagaccctctttgagccagacgaggagcgccccgagccaccgcgcaccgtggtcatgcaaggcgcggcagggataggcaagtccatgctggcacacaaggtgatgctggactgggcggacgggaagctcttccaaggcagatttgattatctcttctacatcaactgcagggagatgaaccagagtgccacggaatgcagcatgcaagacctcatcttcagctgctggcctgagcccagcgcgcctctccaggagctcatccgagttcccgagcgcctccttttcatcatcgacggcttcgatgagctcaagccttctttccacgatcctcagggaccctggtgcctctgctgggaggagaaacggcccacggagctgcttcttaacagcttaattcggaagaagctgctccctgagctatctttgctcatcaccacacggcccacggctttggagaagctccaccgtctgctggagcaccccaggcatgtggagatcctgggcttctctgaggcagaaaggaaggaatacttctacaagtatttccacaatgcagagcaggcgggccaagtcttcaattacgtgagggacaacgagcctctcttcaccatgtgcttcgtccccctggtgtgctgggtggtgtgtacctgcctccagcagcagctggagggtggggggctgttgagacagacgtccaggaccaccactgcagtgtacatgctctacctgctgagtctgatgcaacccaagccgggggccccgcgcctccagcccccacccaaccagagagggttgtgctccttggcggcagatgggctctggaatcagaaaatcctatttgaggagcaggacctccggaagcacggcctagacggggaagacgtctctgccttcctcaacatgaacatcttccagaaggacatcaactgtgagaggtactacagcttcatccacttgagtttccaggaattctttgcagctatgtactatatcctggacgagggggagggcggggcaggcccagaccaggacgtgaccaggctgttgaccgagtacgcgttttctgaaaggagcttcctggcactcaccagccgcttcctgtttggactcctgaacgaggagaccaggagccacctggagaagagtctctgctggaaggtctcgccgcacatcaagatggacctgttgcagtggatccaaagcaaagctcagagcgacggctccaccctgcagcagggctccttggagttcttcagctgcttgtacgagatccaggaggaggagtttatccagcaggccctgagccacttccaggtgatcgtggtcagcaacattgcctccaagatggagcacatggtctcctcgttctgtctgaagcgctgcaggagcgcccaggtgctgcacttgtatggcgccacctacagcgcggacggggaagaccgcgcgaggtgctccgcaggagcgcacacgctgttggtgcagctcagaccagagaggaccgttctgctggacgcctacagtgaacatctggcagcggccctgtgcaccaatccaaacctgatagagctgtctctgtaccgaaatgccctgggcagccggggggtgaagctgctctgtcaaggactcagacaccccaactgcaaacttcagaacctgaggctgaagaggtgccgcatctccagctcagcctgcgaggacctctctgcagctctcatagccaataagaatttgacaaggatggatctcagtggcaacggcgttggattcccaggcatgatgctgctttgcgagggcctgcggcatccccagtgcaggctgcagatgattcagttgaggaagtgtcagctggagtccggggcttgtcaggagatggcttctgtgctcggcaccaacccacatctggttgagttggacctgacaggaaatgcactggaggatttgggcctgaggttactatgccagggactgaggcacccagtctgcagactacggactttgtggtggttatttgggatggacctgaataaaatgacccacagtaggttggcagcgcttcgagtaacaaaaccttatttggacattggctgctgaatggtcctatctgctggctctcccctgagatctggacagaggaagatgggagggtgctcatcacccccccagcataatgatcagcctccttcctagagacagactcatgcagattgagatcaaaagtccctctgcttgggatcaaattaatgtttgacagagctggccaggcgtggtggctcatgtatgtaatcctagcacttcgagaggccgaggcaggtggatcacgaggtcaggagtttgagattagcctggccaagatggtgaaaccctgtctctactaaaaataaaaaaaaattagccagg

SEQ ID NO: 320191 - DNA, 2850 bp, Artificial Sequence
  derived and/or modified sequence
atgctgcggaccgccggccgggacggcctgtgccggctgagcacctacctggaagaattggaggcagttgagctgaaaaaatttaagctgtacctgggcaccgccactgaattgggtgaggggaagataccttgggggagtatggagaaagccggccccctggagatggcccagctccttatcactcacttcgggccggaggaggcttggaggttggctctgagcaccttcgagagaattaatcgcaaggacctgtgggaaaggggtcagagagaagatctcgtcagagataccccgccgggcggaccctctagcttggggaaccagtcaacatgcctgctcgaagttagcttagtgacaccaaggaaggatccgcaggagacttatcgcgattacgtgcgccgaaagtttagactcatggaggacaggaatgcccgtttgggcgaatgcgtgaatctgagccaccgctacacaaggctcctcctagtgaaggaacactcaaaccctatgcaggtccagcagcagctgctcgacaccggacgggggcacgcacgcaccgtgggacaccaagccagtcccataaaaattgagaccctgttcgagccagacgaagaaagaccagagcctccaagaacagtggtcatgcagggcgctgcaggcattggcaagagcatgcttgcacacaaagtcatgctggactgggccgacggcaaactcttccagggccggtttgattatttattctacattaactgtcgggaaatgaaccagtcagcaacagagtgctcgatgcaggacctcatcttctcctgctggccagagccttccgcacctttacaggagctgatacgcgtgccagagagattgctttttatcattgatggcttcgacgaattgaagccgtcatttcacgatccccaaggcccctggtgtctgtgctgggaggagaaaaggccaacagaattgctgctgaatagcttaatcagaaagaaactcctgccagagctttcactcctcattaccactcgccccaccgcccttgagaagttacacaggttgcttgagcacccaagacacgtagaaattctgggtttcagtgaagctgagcggaaagagtatttttacaaatattttcataatgctgagcaggccggccaggtattcaattacgtgcgcgacaacgaacctctgtttacaatgtgtttcgtgcctcttgtgtgctgggtagtctgcacatgcctgcagcagcagcttgaaggcggcggattgttacgtcagacaagcagaactactacagccgtttatatgctgtatctgctatctctcatgcagccaaaacccggtgcaccccgcctgcagcctcctccgaaccaacggggcctctgcagccttgctgcagatggcctatggaatcagaagatactgtttgaagaacaggatctaaggaaacatggactggatggcgaggatgtatccgctttcttaaatatgaatatcttccaaaaggacataaattgtgagcgatactactcatttatacatctcagctttcaagagtttttcgccgcaatgtactatatccttgacgagggagagggcggcgctgggccagatcaagacgtgacaaggctgctgaccgagtatgccttcagtgagcgttcttttctcgccctcacctcgcggttcctgtttgggttgctaaatgaggagaccaggtcgcaccttgaaaagtcactttgctggaaggtgtcacctcatataaaaatggatctgctccagtggatacaatctaaagctcagagtgatggaagcactcttcaacaaggttccctggagttcttttcatgcttatacgagatccaggaagaggagttcatccagcaggctctgtcacattttcaggtgatcgtggtttccaacattgcatctaaaatggaacacatggtgtcgagcttctgcctgaagcggtgtcgatctgcgcaagtgctgcatttgtacggagctacatattcggctgacggagaagaccgcgcccgctgcagcgcaggcgcccacacactactggtgcagttgcccgaacgcaccgtcttactcgacgcatactcagagcatctggctgcggcgctttgcacaaatccgaatctgatcgaacttagtctctaccgcaatgctttgggtagccgcggcgtgaaactgctttgtcagggcttgcgccaccccaactgtaagctgcagaacttacggctgaagcggtgtaggatatccagtagcgcttgcgaggacctaagcgctgcactgatcgctaacaagaatctaacacggatggacctctccggcaatggtgtcggtttccctgggatgatgctcctgtgtgaaggcttgcgccatccccagtgtcgcctccagatgattcagttgagaaaatgccaactggaaagtggtgcgtgtcaggagatggcatcagtgctaggcaccaacccccacctggtcgaacttgatctgacagggaatgccttagaagatctgggcctccgtctgttatgccaggggctgagacatcctgtatgccgactgagaacattatggttacaattagatagttgtgggcttactgccaaggcttgtgagaacttgtactttaccctggggatcaatcagactctgactgatttgtacctcacaaataatgctcttggagatacgggcgtaaggctgctgtgtaaacggctgtcacacccaggttgtaagctccgtgtcttgtggctgtttggcatggatctgaacaaaatgacccattccagattggcggcgctgcgggtgacaaagccttaccttgacattggatgttag

SEQ ID NO: 320192 - DNA, 2679 bp, Artificial Sequence
  derived and/or modified sequence
atgctgcggaccgccggccgggacggcctgtgccggctgagcacctatcttgaggagctggaggcggttgaactcaagaagtttaagctctacctcgggaccgctacagagctgggcgagggcaaaatcccatggggtagcatggagaaggcaggaccgctggagatggcacaattgcttattacacattttggaccggaagaggcctggcgactcgcccttagcacattcgagcgcatcaaccggaaagacctgtgggaacgcggacaacgggaagacttggtgagagatacgccccccggcggcccgagcagcctggggaatcaatctacatgtttgctcgaggtgtctctagtgacccctcgaaaggaccctcaggagacgtaccgggactatgtgagaaggaaattcagactgatggaagaccgtaacgcaaggttgggggagtgcgtcaatctgtcccaccgatataccaggttactgcttgtcaaggagcattccaatcctatgcaggtgcagcaacagttacttgatactggcaggggccacgcgcggaccgttggccatcaggcgagtccgattaagatagagacactattcgagcctgacgaagagcggccggagcccccccgcacagtcgtgatgcagggcgctgctggtatcggaaagtccatgctggcgcataaagttatgttggactgggcagatggcaagcttttccagggccgattcgactacttgttttatattaattgcagagagatgaatcagtctgccacagagtgctctatgcaggacctgatttttagctgctggcctgagccatctgcacccctgcaggaactgatccgcgtcccagagcgcctcttgtttataatcgacggattcgacgaactgaagccatctttccacgatccacaggggccgtggtgtctgtgttgggaggagaagaggccaacagagctcctcctcaattcactaatacgcaagaaacttctgcctgagctgagcctgctcattaccacccgccccaccgctttggaaaagttgcaccgtctgctggagcaccctaggcacgtcgagatcctcggattctccgaagccgagagaaaagagtacttttacaaatatttccataacgccgagcaggcgggacaggtgttcaactacgtcagggacaacgagccactgttcacaatgtgttttgttcccctcgtctgttgggttgtgtgtacatgtctgcagcaacagctggaaggaggcgggctgctccgacagacgagtaggaccacgacggccgtctatatgctgtatctactgagcctgatgcagccaaaacccggggcgccacgccttcagcctccacccaatcagcgggggctgtgctccctcgccgccgatggactgtggaatcagaagattctctttgaggaacaggacctgcgcaaacacgggcttgatggagaagacgtgtccgcctttcttaatatgaacatattccagaaagacatcaactgcgagcgatattactctttcatccatctgtcttttcaggagttctttgcagcaatgtactatatcctagatgaaggggaaggcggtgctgggccagaccaagacgtcacgaggttattgactgaatatgccttcagcgaaagatcttttctagcgttgactagtagatttctctttggattattgaacgaagaaactcgaagccacctggaaaaaagcttgtgttggaaggtttctccacacataaaaatggatttgttgcagtggatacagtcaaaggcccagtctgacgggtctacactgcagcaaggttcactcgagttcttttcttgcctctatgagatccaggaagaggagtttatacagcaggccctcagtcacttccaggtcattgtcgtaagcaacatcgcttcaaaaatggagcacatggttagctccttctgcctcaaacgctgtcgctcagctcaggtgttacatctctacggggcaacatacagcgccgacggggaggacagggcacgttgttctgccggagctcacactctccttgtgcagttgcccgaaagaaccgtccttctggacgcgtacagcgaacaccttgccgccgctctctgcactaacccaaatctcatcgagctgagcctttatagaaatgctctggggagcagaggagtcaaactcctttgtcaggggctgcgccatcccaattgcaagctacagaatcttaggcttaagagatgccgtatttctagctcagcatgtgaagatctttccgccgccctcatcgccaacaaaaacttaacccgtatggacctgtccgggaatggagtgggtttcccaggcatgatgctcctatgcgaaggattgcgccacccacagtgtagacttcagatgatccagcttcgcaagtgccagttggagtccggagcatgtcaggagatggcaagtgttctcggcactaatcctcatcttgtcgaactggacctaaccgggaatgcacttgaagatcttggactgagattactatgccagggcctcagacaccctgtgtgcagactacgcaccctctgctggatgctgtttgggatggatctgaacaagatgacacactccaggctcgccgctctcagggttaccaagccatacctggacatcggttgctag

SEQ ID NO: 320193 - DNA, 2679 bp, Artificial Sequence
  derived and/or modified sequence
atgctgcggaccgccggccgggacggcctgtgccggctgagcacctatctggaggaattagaagccgttgagttgaagaagttcaagctgtatttaggtacagctacagagctgggcgaaggcaagatcccatggggttctatggagaaggcaggccctttagagatggcccagttactcataacacattttggacccgaggaggcttggcggttggccctatctaccttcgaacggatcaacagaaaggatttatgggagagggggcagagggaagatttagttagggatacgccgccaggtggcccatcctccctagggaaccagtccacatgcttgctcgaagtgtcactggtaaccccacgcaaggatccccaggagacctaccgagactatgtgaggcgaaagttccgactgatggaagacagaaatgctcgattgggggaatgtgtcaacctatctcaccgctatacccgactgctcttggtcaaagaacacagcaaccccatgcaagtccagcaacagcttctagacaccggacgcggccacgctagaaccgtggggcatcaggcatcacctattaaaattgaaactttattcgaacccgatgaggagcgaccagaaccaccaaggacggtagtgatgcaaggcgcagctggaatagggaaaagtatgctggcacacaaagtcatgcttgattgggccgacggaaagcttttccaaggccggttcgattatctattctacattaattgtcgcgagatgaatcagagcgcaacagagtgcagcatgcaggacctgatcttcagctgctggcccgaaccttccgcaccgcttcaggagcttatacgggtgccagagcggctactctttatcattgacggatttgacgagcttaaaccctctttccacgatccacaggggccttggtgtctttgctgggaggagaaacgaccaacagagctgctgctgaattccttgatcagaaagaaattgttacctgagcttagtctgcttatcacaactcggccaacagcacttgaaaagctccacagacttctggaacatccacggcacgtggagatactcggcttctcagaggccgagcgaaaggagtacttttacaagtactttcacaacgctgagcaggctggacaggtcttcaactacgtgcgtgataacgaacccctcttcaccatgtgtttcgtgccactcgtatgctgggttgtttgtacttgcttgcagcaacagctggaaggcggcggattgcttagacagaccagccgcacgacgacggctgtttacatgttgtacctactgagcctgatgcaacccaaacccggcgctcctcggctgcagccaccccccaatcaacggggcctgtgctccctggccgccgacggactctggaatcagaagattctctttgaggaacaggatctgaggaagcacggcctagatggagaggatgtgagcgctttcttaaatatgaatattttccagaaagatattaattgtgagaggtactactccttcatacatctcagcttccaggaattcttcgccgctatgtattatatattagacgaaggagaggggggtgctgggcccgaccaagatgtgaccaggcttttgaccgagtacgctttttccgagcgatcattcttggccctgacatcccgcttcttgttcggattacttaatgaggagaccagaagtcatctggaaaagtccttgtgttggaaggtatccccccacatcaagatggatctcttacagtggatccagtccaaagctcagagcgacggatccactcttcagcaggggtcattggagttcttcagctgcctctacgagatacaggaggaggaatttatacaacaggctctctcccatttccaggtgattgtcgtgagtaacatcgcctctaagatggagcacatggttagttcgttttgccttaagcggtgcagatcagctcaggttttgcatctgtacggcgcaacctacagtgcggacggggaagacagagcgcgatgtagtgccggtgcacatactctgctcgttcagctgaggccagagaggaccgttttattggacgcctactctgaacatctggctgccgcactgtgcaccaacccaaatctgatagaattgagcttatatcgcaacgccctcgggtcccgcggcgtgaaacttctgtgccagggcctgcgccaccccaattgcaaacttcagaatctgcggctgaagaggtgccggatctcatcaagtgcgtgcgaggatctttccgcagcacttatcgccaacaagaacctcacccggatggacctgtcaggaaacggcgtagggttcccaggcatgatgctgctgtgtgagggcctgagacatccccagtgccggctgcagatgatccagttgcggaaatgtcaacttgagagtggcgcctgtcaagagatggcttctgtgctaggcaccaaccctcacctagtggagctggatttaacagggaatgccctggaagaccttggactgagactgttgtgtcagggacttcggcaccctgtatgtcggctgaggacactgtggtggctttttggtatggatctcaacaagatgacgcattcccgattggccgcactccgagttacgaaaccgtaccttgacattgggtgctag

SEQ ID NO: 320194 - DNA, 2850 bp, Artificial Sequence
  derived and/or modified sequence
atgcttaggacagccggtagggatggtttgtgccggctgtcaacgtacctcgaggaactcgaagcggtggagctgaagaaatttaaactgtacctgggaacggccaccgagcttggtgagggcaagattccctggggctccatggagaaagccggtcctctggagatggctcagttgcttatcacccacttcggccctgaagaggcctggcgcctggcgctgtcaacatttgagcgcatcaaccgcaaggacctttgggagcggggacaacgggaagacctggtgcgtgacacaccccctgggggaccctcatctttggggaatcaatccacctgtctcctcgaagtttcactagtcacaccacgcaaagatccacaggagacctatagggattacgtgcgccgtaagttccgcttgatggaggaccggaacgcccgactcggggagtgcgtaaacctctcccacaggtacacacgcctgttactcgtcaaagagcattctaatccaatgcaggtgcaacaacagttgctagatacgggccgaggccacgctaggacagttggccaccaagcgtccccaatcaagatagaaacactgttcgagcctgatgaggaacgccctgagcccccacggactgtggtgatgcagggtgccgctgggatcggaaagtccatgctagcgcacaaagtcatgctggattgggctgacggaaagctgttccagggcaggtttgactatttattctacataaactgcagggagatgaaccaatccgccaccgagtgctccatgcaggatcttatctttagctgctggccagaacccagcgcccctctgcaggaactgatcagagtgcccgagcgactattatttatcattgacggcttcgacgaactcaagccaagctttcacgaccctcagggcccttggtgtctgtgctgggaggagaagcgtcccaccgagcttttactgaattcccttatcagaaagaagcttcttccagagctgtcactattgattaccacgagacccacagccttagaaaaactgcaccggctgctcgaacacccacgacatgtggagatcctgggtttctccgaagcagaaaggaaagagtatttttataagtattttcataatgctgagcaggcaggtcaagtttttaactacgtccgcgacaatgaacctctgtttactatgtgttttgttccactagtgtgttgggttgtctgtacttgtctgcagcagcaactcgagggcggaggcctcttgagacagaccagccgaaccaccacggcagtctatatgctgtacctactgagcctgatgcagccaaagccaggcgcaccacgattgcagccaccgcctaaccagcggggtctgtgtagtcttgctgcggacgggctatggaatcagaagattttgtttgaagaacaggacctccggaaacatggcctggatggagaggatgtgtctgctttcctcaatatgaacatcttccaaaaggacattaattgtgaaaggtactattccttcatccatctttccttccaggaattttttgctgccatgtactacatcctggacgagggtgaaggaggcgcaggccctgatcaggatgtgacccggctgctcaccgagtatgcgttctccgagcgcagcttcttggccctgacaagcagattcttgtttgggctgctgaacgaagagacaagatcccacctggagaagtccttgtgttggaaggtgagcccccacatcaagatggatctgttgcagtggattcagagtaaagcacagtctgacggtagtacgcttcagcaaggctccttagaatttttttcctgcctctatgaaatccaggaggaggagttcatccaacaggcactctctcatttccaggttatagtggtgtctaatatagcttcgaagatggaacacatggtctcctccttttgtctgaaaagatgtcggtctgcccaggtgctccatctgtacggtgccacatacagtgcggatggtgaggacagagctcgctgttctgctggagcgcatacacttcttgtgcagctgccggagaggaccgtgctgctggatgcatattcagagcatctggccgcagcactgtgcacgaaccccaatttgattgaactctcgctgtaccgaaatgcattaggtagcagaggagtgaagttgctgtgtcaaggccttcgtcatccaaattgtaagctgcaaaacctccgattgaaacgctgtcggataagctcctcagcctgtgaggatttgagcgcggctctgatagcaaacaaaaatcttactcgaatggatcttagcggaaatggggtgggcttccctggcatgatgttattatgcgagggactccggcacccccagtgcaggctccagatgattcagttgagaaagtgccagctcgaatcaggggcttgccaggagatggcttccgtcttgggtaccaacccacacctggtggagttggaccttaccgggaatgccttagaggacctcggactgaggctgctgtgccagggcctgaggcatcctgtttgccggctgagaacactctggttgcagctagattcatgtggtctgaccgccaaagcttgcgaaaatctgtatttcaccctgggaattaaccaaacattgaccgacttatatctcacaaataacgccctcggggatacaggagttaggttgctgtgtaaacgcttgagccatcctggttgtaagctgcgggtgctttggctgtttggcatggatcttaacaaaatgacccactcccggctcgccgctctcagagtgaccaagccctatctcgacattggctgttag

SEQ ID NO: 320195 - DNA, 2679 bp, Artificial Sequence
  derived and/or modified sequence
atgctgcggactgccggacgggacggtctctgtaggctctccacatacctagaagaactggaggcagtcgagcttaaaaaattcaaactttatctgggaaccgctacggaattgggtgaagggaaaatcccatggggatctatggaaaaggcaggtcccctcgagatggcccagctgctaatcacacatttcggtcctgaagaggcttggaggctggccctgtccacttttgagcgcattaatcgcaaagatctgtgggagcgcggtcagcgcgaagatctcgttcgggataccccacccggaggcccttcaagtttaggcaaccagtctacttgcctgctcgaggtgtctttggtaacaccgagaaaagacccgcaggagacatacagggattatgtgcgccgaaagttcaggttaatggaggatcgaaacgccaggcttggtgagtgcgttaacctgtcacatagatatacccgtctcttgctggtgaaagaacacagtaaccctatgcaggtgcaacagcagctccttgatactggcagagggcatgcacggacagtcgggcaccaggctagcccaattaagatcgaaacactgtttgagcccgatgaggagcggccagagccacctcgcactgtggtcatgcaaggcgcagctggaattggtaagagtatgctagcccacaaagttatgctggattgggcggacggcaagttgtttcaaggccgtttcgattacctgttctacataaattgccgggaaatgaaccagtcagcaacggaatgttccatgcaggatttaatttttagctgttggcccgaacctagcgcaccactacaggagttaattagggtgcctgagcggcttctgttcattatcgacggtttcgacgaactgaagccgagttttcacgatccacaggggccttggtgcctctgctgggaggaaaagaggccgactgaactgctgttgaactcactgatcagaaagaagctgctgccagagctgagcctgttaatcaccaccaggcctacggctctggagaaactacatagacttctagagcatccccgacacgttgagattttgggcttctccgaggccgaacgaaaggagtacttttacaaatactttcacaacgcagagcaggctgggcaggttttcaattacgtcagggataatgaaccgctgttcaccatgtgcttcgtgccccttgtctgttgggtggtctgtacttgtctgcagcagcagcttgaaggcggaggcctgctaagacagacaagccggacaaccactgctgtctatatgctctacctattatctctgatgcagccgaagcccggtgcaccgagactgcagcctccacctaaccagcggggactatgcagtttggcagccgacggcctctggaatcagaaaattttgtttgaagagcaagatctgcggaagcatggtctggatggcgaggacgtgagtgcctttttgaacatgaatatatttcagaaagatatcaattgtgaacgatattatagttttattcacctgagcttccaggaattttttgctgccatgtattacatccttgatgaaggcgaaggcggagctggacccgatcaggacgtgacccggttgctcaccgagtacgccttcagcgagcgcagctttcttgctctgacgagtagattcctgttcggcctgctcaacgaggagactagaagccacctcgagaaaagcctgtgttggaaagtcagtccccatatcaagatggacttgcttcagtggattcaaagcaaggcacagtccgatgggagtactctccagcagggatcacttgagttcttttcctgtctgtacgaaatccaggaggaagaattcattcagcaagccttgagtcactttcaggtgatcgttgtcagcaatattgcaagcaaaatggagcatatggtgagcagtttctgcctgaaacgatgtaggtcagcccaggtgttgcatctctacggcgcaacctactctgctgacggggaagacagggcacgatgttccgccggagcacacacccttttggtgcagcttcccgaacgcaccgtgctcttagatgcctacagtgagcacctggcagctgccctgtgcacaaaccccaatcttatcgagctctccctgtataggaacgcactgggctctaggggggttaaactcctctgtcagggactgcggcaccccaattgtaagctccaaaatctaaggctgaagcgctgtagaatctcatcaagcgcttgtgaggatctctccgctgccctcattgcaaataagaatctaacccgcatggatctttctggcaacggggtgggatttcccggtatgatgctattatgcgagggactccggcatccacagtgtcgccttcaaatgatccagctgcggaagtgtcaacttgagagcggagcgtgccaggaaatggcctccgtgctgggtacgaacccccatcttgtcgagctggatcttaccggcaacgccctcgaagatttggggctgcgtctcctgtgtcaagggctcagacaccctgtgtgcaggttacggacgctgtgctggatgcttttcggcatggacctgaataagatgacacacagcagattggccgcactgcgtgttacaaagccttacttagacattggatgctag

SEQ ID NO: 320196 - DNA, 2679 bp, Artificial Sequence
  derived and/or modified sequence
atgcttcgaacggctggaagagacggcctgtgcaggctgtcgacctacctggaggaactcgaggcggtagaactcaaaaagtttaagttataccttgggaccgccaccgagctgggcgaggggaagatcccctggggaagtatggagaaagccggaccattagagatggcccagttgcttataacccactttgggccagaggaagcctggagacttgccctctctacattcgaacggatcaaccgaaaggacctgtgggagcgtgggcaacgtgaagatctggtaagagatactccgcctggcggtccatcatccctaggtaaccagagtacatgcctgctcgaagtcagtctcgtcactcccagaaaggacccacaggagacataccgggattacgtgagacggaaattccgtcttatggaggatcgtaacgcgaggctgggagaatgcgtcaacctgtcacatcgatatactcggttgctgctggttaaggagcattccaatccaatgcaagttcagcagcagctcctggataccgggagaggccatgctagaaccgtaggtcaccaggcgtcaccaattaaaatcgagactttgttcgaacccgacgaagaacgacccgaacctcccaggaccgtcgtaatgcagggagctgccggtatagggaagtcaatgctggcccacaaggtaatgttggactgggccgacggtaagctttttcagggcaggtttgactatctgttctatatcaactgtcgcgaaatgaaccaaagcgcgactgaatgctccatgcaggaccttatatttagctgttggccagagcctagcgcacctctgcaggaactgatacgcgtaccagagcggctcctgtttatcatcgatggttttgacgagttaaaaccctcctttcatgatccacaggggccttggtgtctgtgctgggaagaaaagcgcccaaccgagttgctgttgaactccctaatcagaaagaagctcctgcctgagctctctctgctgataaccacaaggcctaccgcccttgaaaagctccatcgactcctggaacaccccagacacgtcgagatattaggatttagtgaagcagagcggaaggagtatttttataagtacttccataacgccgagcaggccggtcaggtattcaactacgttcgcgataatgaacccctctttaccatgtgtttcgtgcccctcgtgtgctgggtggtgtgtacttgcctgcagcagcagcttgaggggggaggcctgcttaggcaaacctcgcggacgactaccgctgtttatatgctgtaccttctgagtttgatgcagccaaagccgggagcaccccgtcttcagccaccaccgaaccagcgagggctatgtagcctagctgcagacggactgtggaatcagaaaatcttgtttgaagagcaggacctgaggaagcacggcctggacggcgaggacgtgtccgcatttctgaacatgaacatttttcagaaggacattaactgcgagagatattattcattcattcatcttagtttccaagagttcttcgctgccatgtattacatcctggatgagggagaaggtggagctggacctgaccaggacgtaacccgactattaacggagtatgctttttctgaacgcagttttctcgccctgacgtcacgcttcctctttggactgttaaatgaggaaacccgtagtcatttggaaaaaagcctttgttggaaggtgtcaccccatattaagatggatctcctccaatggattcaatccaaagcccaaagcgacggttctaccctgcagcagggatccctggaattttttagctgtctgtatgagatccaggaagaggaattcatacagcaagccctgtcccacttccaggttatcgtagtgagcaacatcgcctccaaaatggagcatatggtctctagcttttgccttaagcgctgccgctccgcccaagtactgcacctttacggagcgacttatagtgcggacggggaggatcgcgctcggtgttccgccggagctcatacgttactagtgcaattacgcccagaacgcacagtgctgctggatgcttacagtgagcatttggcagcagccctgtgtaccaatcccaatctgatagagttaagcttgtatagaaacgccctgggatccagaggagtgaagctgctctgtcagggattgcgacatcccaactgtaagctgcagaaccttaggctgaagagatgtcgcataagttccagtgcctgcgaggacttatccgccgcactgatcgccaacaagaacctgacccgcatggatttgagtggcaacggagttggattcccaggaatgatgctgttatgtgaagggctcagacacccacagtgccgattacagatgatccagctgcggaagtgccagttggagagcggtgcctgccaggaaatggctagtgtgctcggaacaaatccacacctagtggagctggaccttaccggcaacgcgctggaagatttgggtctaaggctcttgtgccagggactgaggcacccggtatgccggcttagaacactgtggtggctgttcggcatggacctcaacaaaatgactcacagtcgtctagcagctcttagggttactaaaccgtatctcgacattggctgttag

SEQ ID NO: 320197 - DNA, 537 bp, Artificial Sequence
  derived and/or modified sequence
gagctgagcagccagaagaccggcggcaacctggaccggcacaccgcgtctaagccaaccgccctgctgcagccagggcccggatggcagcggggtgccgcctgttgtcttcaaattttaccagagagcagagtgtgtttcccaactggactacccctagcacgcaaggtgactaaactgtcatgggtgggttataagctgcaaggacgggaattacagtggccggtttatagggaggagcttgagctggaacgcctgctgtggaggcgaagacctggagacagagacttgcgtaggaccggtgatctccggctgggtgaacgggatctactgttgatcagggggggtgatctccgtcatataggaggcggtggcaacatcctcctcggcggccttaacctcctggggggggggctgggtcagggggcctccaccgctgtggcagtcatctcctggccaagcatttgcccccccccaagcatgtgcttctcagccttttcagcctcttcgggcttcagtaattctacctacgcctag

SEQ ID NO: 320198 - DNA, 723 bp, Artificial Sequence
  derived and/or modified sequence
atggtgcccagattcctgatgagcagcaccatgatgatcatcgagcccaccagcccctgcctgctgcccgaccccctgcaggagccctactaccagcccccctacaccctggtgctggagctgaccggcgtgctgctgcaccccgagtggagcctggccaccggctggagattcaagaagagacccggcatcgagaccctgttccagcagctggcccccctgtacgagatcgtgatcttcaccagcgagaccggcatgaccgccttccccctgatcgacagcgtggacccccacggcttcatcagctacagactgttcagagacgccaccagatacatggacggccaccacgtgaaggacatcagctgcctgaacagagaccccgccagagtggtggtggtggactgcaagaaggaggccttcagactgcagccctacaacggcgtggccctgagaccctgggacggcaacagcgacgacagagtgctgctggacctgagcgccttcctgaagaccatcgccctgaacggcgtggaggacgtgagaaccgtgctggagcactacgccctggaggacgaccccctggccgccttcaagcagagacagagcagactggagcaggaggagcagcagagactggccgagctgagcaagagcaacaagcagaacctgttcctgggcagcctgaccagcagactgtggcccagaagcaagcagccctag

SEQ ID NO: 320199 - DNA, 723 bp, Artificial Sequence
  derived and/or modified sequence
atggttccacgtttcctgatgagcagtacgatgatgatcatcgaaccaacctccccctgcctactgcccgacccgcttcaggagccttattatcagccaccatacaccctcgtgcttgaactgacaggcgttctccttcatccagaatggagtctggccacaggttggagatttaaaaagaggcccggaatagaaacgctgttccagcagcttgcacccctgtacgaaatcgtaatcttcacatcggagaccggtatgaccgccttccccctgattgatagcgtggacccccatggattcatatcctaccgcctgtttagagatgcgaccaggtatatggacgggcaccacgtcaaagatatatcatgcctgaatagagatcctgccagggtagtagtggtcgattgcaagaaggaggcattccgactgcagccttacaacggcgtcgctttgagaccctgggatgggaatagcgatgatcgagtgttgttagacttaagcgccttcctgaaaacaatcgcgctgaacggcgtggaggatgtccgcactgtactggagcactatgctctggaagatgatcccctggccgcgttcaagcaacggcagagtagactcgagcaggaggagcagcagcggctggcagaactttcaaagtctaataagcagaatttatttctaggcagtcttacatcaagactgtggcctcggagtaagcaaccgtag

SEQ ID NO: 320200 - DNA, 723 bp, Artificial Sequence
  derived and/or modified sequence
atggtgccccgcttcctgatgagcagcaccatgatgatcatcgagcccaccagcccctgcctgctgcctgaccccctgcaggagccctactaccagcccccctacaccctggtgctggagctgactggagtgctgctgcaccctgagtggagcctggccaccggctggaggttcaagaagaggcctggcatcgagaccctcttccagcagctggcccccctgtatgaaattgtcatcttcaccagcgagaccggcatgacagccttccccctgattgacagcgtggacccccacggcttcatctcctaccgcctcttcagagatgccacccgctacatggatggccaccacgtgaaggacatcagctgcctgaacagagatcctgcccgggtggtggtggtggactgcaagaaggaggccttccggctgcagccctacaatggagtggccctgcggccctgggatggcaacagtgatgacagagtgctgctggacctgagcgccttcctgaagaccatcgccctgaatggagtggaggatgtgaggacagtgctggagcactacgccctggaggatgaccccctggccgccttcaagcagaggcagagccggctggagcaggaggagcagcagaggctggccgagctgagcaagagcaacaagcagaacctcttcctgggcagcctgaccagccggctgtggcccaggagcaagcagccctag

SEQ ID NO: 320201 - DNA, 723 bp, Artificial Sequence
  derived and/or modified sequence
atggtgccccggttcctgatgagcagcaccatgatgatcatcgagcctacttctccctgcctgttgcccgaccccctgcaggaaccgtattaccagcccccttatactctggtgctcgagctgactggcgtgctcctccatcccgagtggtcacttgccaccggttggaggttcaagaaacgcccaggaatagaaaccctttttcagcagttggcccctctgtatgaaatcgtgattttcacatctgaaacaggcatgaccgctttccccttgatcgattctgtagacccccacggatttatcagctatcgactcttcagggatgctacacgatacatggatggacaccacgttaaagatataagttgtctgaaccgcgacccagctagagttgtggtggtggactgtaaaaaggaagcgtttagattgcagccttataacggcgtggcactacggccatgggacgggaattccgatgatcgcgttctgctagatcttagcgcctttctcaagaccatcgccctcaatggagtcgaggacgtgagaaccgtcctggagcactatgcgctagaggacgacccgctggctgctttcaagcagcgtcaaagtcgcttggagcaggaggaacagcagagactcgccgaactgtctaaaagtaataagcagaacctctttttagggtcactcaccagccggctgtggcctcggtctaaacaaccctag

SEQ ID NO: 320202 - DNA, 723 bp, Artificial Sequence
  derived and/or modified sequence
atggtcccacgattccttatgtccagcactatgatgattattgaaccaacctctccctgcctgctgcccgaccctctccaggagccctactaccaaccgccatacacactcgtattagaacttaccggcgtcctgctgcatcctgagtggagcctcgccacaggctggcgcttcaaaaagcgtcccggaatcgagacattatttcagcagctggctcccctatacgaaattgtcatttttacttccgagaccggaatgaccgcctttccactgattgactcagtagacccacatggctttattagttacaggctctttcgggatgcgacaagatatatggatgggcatcatgtgaaggacattagctgcctaaatagggacccagctagggtagtggtcgtggattgcaaaaaggaggcctttcgcctccagccatacaacggggtggctctaaggccttgggatggcaacagcgacgacagagtgcttttagacctgtccgcatttctgaaaactattgcactgaacggtgtggaggacgttcgcactgtgttggagcattacgccctggaagatgacccccttgccgcttttaagcagagacagagtcggctggagcaggaggaacaacagaggcttgcggaactctccaaatctaacaagcaaaacctgttcttaggctccctgacctctcggttgtggcccagaagcaagcagccctag

SEQ ID NO: 320203 - DNA, 1080 bp, Artificial Sequence
  derived and/or modified sequence
tcgcgcttgcgaagcgggctccggctcggctcgcggggactgtgcacgaggttggcgacgccgccccgccgggccccagatcaggccgcagagatcgggagccgcgggagcactaaggcgcaagggccacagcagcagccgggctcagagggtcccagctatgccaaaaaagttgcgctctggcttgctgggctgcttggagctggtgggactgtgagcgtcgtctatatctttggaaacaacccggtggacgaaaatggtgccaagattcctgatgagttcgacaatgatgatcatcgagcccaccagcccttgccttctcccagaccctctgcaggaaccgtactaccagccaccctacacgctcgttttggagctcaccggcgtcctcttgcatcctgagtggtcgctggccactggctggaggtttaagaagcgcccaggcatcgagaccttgttccagcagcttgcccctttatatgaaattgtcatctttacgtcagagactggcatgactgcgtttccactcattgatagtgtggacccccatggcttcatctcctaccgcctattccgggacgccacaagatacatggatggacaccatgtaaaggatatttcatgtctgaatcgggacccagctcgagtagtagttgtggactgcaagaaggaagccttccgcctgcagccctataacggcgttgccctgcggccctgggacggcaactctgatgaccgggtcttgttggatctgtctgccttcctcaagaccattgcactgaatggtgtggaggacgtgcgaaccgtgctggagcactatgccctggaggatgacccgctggcggctttcaaacagcggcaaagccggctagagcaggaggagcagcagcgcctggccgagctctccaagtccaacaagcagaacctcttccttggctccctcaccagccgcttgtggcctcgctccaaacagccctgaactctgggcctcctcaaactcagtgcctgggtccagggccccagtgcttccagaccaagacttgggccaccacttgtccaataaagtacatcccagacgcc

SEQ ID NO: 320204 - DNA, 1862 bp, Artificial Sequence
  derived and/or modified sequence
atgaagttccaggggcccctggcctgcctcctgctggccctctgcctgggcagtggggaggctggccccctgcagagcggagaggaaagcactgggacaaatattggggaggcccttggacatggcctgggagacgccctgagcgaaggggtgggaaaggccattggcaaagaggccggaggggcagctggctctaaagtcagtgaggcccttggccaagggaccagagaagcagttggcactggagtcaggcaggttccaggctttggcgtagcagatgctttgggcaacagggtcggggaagcagcccatgctctgggaaacactgggcacgagattggcagacaggcagaagatgtcattcgacacggagcagatgctgtccgcggctcctggcagggggtgcctggccacaatggtgcttgggaaacttctggaggccatggcatctttggctctcaaggtggccttggaggccagggccagggcaatcctggaggtctggggactccgtgggtccacggataccccggaaactcagcaggcagctttggaatgaatcctcagggagctccctggggtcaaggaggcaatggagggccaccaaactttgggaccaacactcagggagctgtggcccagcctggctatggttcagtgagagccagcaaccagaatgaagggtgcacgaatcccccaccatctggctcaggtggaggctccagcaactctgggggaggcagcggctcacagtcgggcagcagtggcagtggcagcaatggtgacaacaacaatggcagcagcagtggtggcagcagcagtggcagcagcagtggcggcagcagtggcggcagcagtggtggcagcagtggcaacagtggtggcagcagaggtgacagcggcagtgagtcctcctggggatccagcaccggctcctcctccggcaaccacggtgggagcggcggaggaaatggacataaacccgggtgtgaaaagccagggaatgaagcccgcgggagcggggaatctgggattcagggcttcagaggacagggagtttccagcaacatgaggaactctgagacgtctcctgggatgtttaactttgacactttctggaagaattttaaatccaagctgggtttcatcaactgggatgccataaacaagaaccaggtcccgccccccagcacccgagccctcctctacttcagccgactctgggaggatttcaaacagaacactcctttcctcaactggaaagcaattattgagggtgcggacgcgtcatcactgcagaaacgtgcaggcagagacgatcagccgggtgcaggatggcaggaggtggcagctgtaacttccaagaactacaattacaaccagcatgcgtatcccactgcctatggtgggaagtactcagtcaagacccctgcaaaggggggagtctcaccttcttcctcggcttcccgggtgcaacctggcctgctgcagtgggtgaagttttggtaggcggagcaaaagtgaggggcaccacaggcgaacaggcaatttcttgcaaccaccaccgaggccccgaaaagcactggtcgtcagggagctcctccccttggcccccagcctgtgccagccctggcccggctgccacacctctgtttcctaggctggggacccagcttgtctctccttgtttcttcccactgcactgtggtgcttcagtggccaccagcctcgtcacatacaccagcatctttctgtacctcctccctttggtgacctgaagtcactgtgacagttctccaggaaggaggagcttcctacttttgagtttctctgtggaaataaaacatgaatcttgtttccct

SEQ ID NO: 320205 - DNA, 303 bp, Artificial Sequence
  derived and/or modified sequence
atggggacaagctctattttcctgtgcgtcctgttcctttgcggcgcactgggcctgactatgagtcctgccaggggaagactgaggtgttacatttgtggcttcaccaagccgtgtcacccggtaccaacagagtgtagagacgatgaagcctgcggaatcagcattggaaccagcgggaggacccttgtccaatggccctttagccgacgtcttccaacttcgatccatcccgctttccccgtcgctcccgcaagtgcttgcctgttccatcccactgaccagtctgagatcactgaatag

SEQ ID NO: 320206 - protein, 163 aa, Artificial Sequence [sequence omitted]

SEQ ID NO: 320207 - protein, 165 aa, Artificial Sequence
  derived and/or modified sequence
MEMFQGLLLLLLLSMGGTWASREMLRPRCRPINATLAVEKEGCPVCITVNTTICAGYCPTMTRVLQGVLPALPQVVCNYRDVRFESIRLPGCPRGVNPVVSYAVALSCQCALCRRSTTDCGGPKDHPLTCDDPRFQASSSSKAPPPSLPSPSRLPGPSDTPILPQ

SEQ ID NO: 320208 - protein, 28 aa, Artificial Sequence
  derived and/or modified sequence
SSSSKAPPPSLPSPSRLPGPSDTPILPQ

SEQ ID NO: 320209 - DNA, 492 bp, Artificial Sequence
  derived and/or modified sequence
atgttccagggcctgctgctgctgctgctgctgagcatgggcggcacctgggccagcagagagatgctgagacccagatgcagacccatcaacgccaccctggccgtggagaaggagggctgccccgtgtgcatcaccgtgaacaccaccatctgcgccggctactgccccaccatgaccagagtgctgcagggcgtgctgcccgccctgccccaggtggtgtgcaactacagagacgtgagattcgagagcatcagactgcccggctgccccagaggcgtgaaccccgtggtgagctacgccgtggccctgagctgccagtgcgccctgtgcagaagaagcaccaccgactgcggcggccccaaggaccaccccctgacctgcgacgaccccagattccaggccagcagcagcagcaaggcccccccccccagcctgcccagccccagcagactgcccggccccagcgacacccccatcctgccccagtag

SEQ ID NO: 320210 - DNA, 498 bp, Artificial Sequence
  derived and/or modified sequence
atggagatgttccagggcctgctgctgctgctgctgctgagcatgggcggcacctgggccagcagagagatgctgagacccagatgcagacccatcaacgccaccctggccgtggagaaggagggctgccccgtgtgcatcaccgtgaacaccaccatctgcgccggctactgccccaccatgaccagagtgctgcagggcgtgctgcccgccctgccccaggtggtgtgcaactacagagacgtgagattcgagagcatcagactgcccggctgccccagaggcgtgaaccccgtggtgagctacgccgtggccctgagctgccagtgcgccctgtgcagaagaagcaccaccgactgcggcggccccaaggaccaccccctgacctgcgacgaccccagattccaggccagcagcagcagcaaggcccccccccccagcctgcccagccccagcagactgcccggccccagcgacacccccatcctgccccagtag

SEQ ID NO: 320211 - DNA, 492 bp, Artificial Sequence
  derived and/or modified sequence
atgttccaagggcttctgctgctgctgctcctctcgatgggggggacttgggcctcacgcgagatgttaaggcccagatgccgacctattaatgcgaccctggctgtggagaaggaggggtgtcctgtctgcatcaccgttaacactaccatctgtgcaggctattgtcctaccatgacgagagtgctgcaaggtgtactgcccgctcttcctcaagttgtgtgcaactacagggatgtcagatttgaatccattcggcttccaggatgcccacggggcgtgaacccagttgtgtcctatgcggtggcactgtcttgccagtgtgccctctgtagacgtagcaccaccgactgtggaggacctaaggaccatcccctgacatgtgatgacccacggttccaggcatcatcctcctctaaggccccacctcctagtcttcccagcccttctcggctccctgggccctctgatactcccatccttccccagtag

SEQ ID NO: 320212 - DNA, 498 bp, Artificial Sequence
  derived and/or modified sequence
atggaaatgtttcaggggctgttactgttgttgcttctgtctatgggagggacatgggctagtcgcgagatgcttaggcctcgctgtaggccaattaatgccacccttgcagtggagaaggaaggttgtcccgtgtgtattacagtgaacacaactatctgcgccggatattgcccgaccatgacccgcgttctccagggggtgctacccgccctcccgcaggtggtttgtaattatagggatgtgcgctttgaatcaatccgtttacctgggtgcccgcgcggtgtgaacccagtggtgtcctacgcagtcgctctttcatgccagtgcgcactctgccgacgctctacaactgattgcgggggcccaaaagaccaccccttgacctgtgatgatcccagatttcaggcttcatcctcttcaaaagcccctcctccaagcttacccagtccatctaggttgcctgggccctccgatacaccaatcttaccccagtag

SEQ ID NO: 320213 - DNA, 492 bp, Artificial Sequence
  derived and/or modified sequence
atgttccagggcctgctgctgctgctgctgctgtccatgggcggcacctgggccagccgggagatgctgcggccccgctgccggcccatcaatgccaccctggccgtggagaaggagggctgccctgtgtgcatcaccgtgaacaccaccatctgtgccggctactgccccaccatgaccagggtgctgcagggcgtgctgcctgccctgccccaggtggtgtgcaactacagagatgtgcgctttgagagcatccggctgcccggctgcccccggggcgtgaaccctgtggtgtcctatgctgtggccctgagctgccagtgtgccctgtgccgccgcagcaccacagactgtggcggccccaaggaccaccccctgacctgtgatgacccccgcttccaggccagcagcagcagcaaggcccccccacccagcctgcccagccccagccggctgcccggccccagcgacacccccatcctgccccagtag

SEQ ID NO: 320214 - DNA, 498 bp, Artificial Sequence
  derived and/or modified sequence
atggagatgttccagggcctgctgctgctgctgctgctgtccatgggcggcacctgggccagccgggagatgctgcggccccgctgccggcccatcaatgccaccctggccgtggagaaggagggctgccctgtgtgcatcaccgtgaacaccaccatctgtgccggctactgccccaccatgaccagggtgctgcagggcgtgctgcctgccctgccccaggtggtgtgcaactacagagatgtgcgctttgagagcatccggctgcccggctgcccccggggcgtgaaccctgtggtgtcctatgctgtggccctgagctgccagtgtgccctgtgccgccgcagcaccacagactgtggcggccccaaggaccaccccctgacctgtgatgacccccgcttccaggccagcagcagcagcaaggcccccccacccagcctgcccagccccagccggctgcccggccccagcgacacccccatcctgccccagtag

SEQ ID NO: 320215 - DNA, 492 bp, Artificial Sequence
  derived and/or modified sequence
atgttccagggcctgctgctgctgctgctgctgagcatgggcggcacttgggctagtcgagagatgctccgcccccgctgccggcccattaacgcaactttggcggtagagaaagagggatgccccgtgtgcattaccgtgaacactactatctgcgctgggtactgccccactatgactcgcgtgctccagggagtgctgcccgccctgccacaagtcgtgtgcaattaccgtgacgttcggtttgagagtataaggctgcccggatgtccccggggcgttaacccggttgtgtcctacgccgtagcattgtcttgccaatgcgccttatgccggcgctccaccacagattgtggaggaccgaaagaccatcctcttacgtgcgacgacccacggttccaggcgagcagcagcagcaaggcgccccctccgtccctcccatctccctccaggctgccgggcccatctgatacaccaattctgccgcagtag

SEQ ID NO: 320216 - DNA, 498 bp, Artificial Sequence
  derived and/or modified sequence
atggagatgttccagggcctgctgctgctgctgctgctgagcatgggagggacttgggcctcaagggaaatgcttaggccacgttgtcgcccaattaacgccaccctggctgtggaaaaggaagggtgtccagtgtgtataacagtcaacaccaccatatgcgcaggttactgcccaactatgacccgcgtgcttcagggtgttctgcccgccttgccccaggtagtgtgcaattatcgggatgtccgattcgaatccatccggctgcccggctgtcccaggggggtgaatccggtggtgtcctatgcagtcgccctaagttgccagtgcgccctttgcaggagaagtactacagactgcggtggacctaaggatcacccgctgacatgcgacgacccgagatttcaggcaagttcttccagcaaggctcccccccctagcctgccctcccccagtcgtctccctggcccatccgatactccaatactgccacagtag

SEQ ID NO: 320217 - DNA, 492 bp, Artificial Sequence
  derived and/or modified sequence
atgtttcaaggcctgctgctgctccttttgctgagtatgggaggtacgtgggcaagccgagagatgctgcgtccaaggtgccggcctatcaacgctacactggctgttgaaaaagagggatgtcccgtgtgtattactgtcaacactactatctgcgctggttactgtccaaccatgacccgggtgctgcagggagtgctgccagccctcccccaggttgtgtgcaactatcgggatgtcagattcgagtctatccgcctccctgggtgcccaagaggagtcaatcccgtcgtctcttatgcagtcgccctctcatgccagtgcgccctctgcagacgcagcacaacggactgcggcggacctaaagaccatcccctgacatgtgacgatccacgcttccaggcctcttcttcatcaaaagcgcctcccccttccctccccagtccatctcggcttcccggaccttccgatacccctatcctgcctcagtag

SEQ ID NO: 320218 - DNA, 498 bp, Artificial Sequence
  derived and/or modified sequence
atggaaatgttccaggggctgctcctcctcttactactctctatgggagggacctgggctagccgtgagatgctacgccctaggtgccggccaatcaatgcgacccttgccgtggaaaaggagggttgtccggtgtgcataacagtaaatacaactatctgcgccggatattgtcccaccatgactagggtattacaaggtgtccttcccgcactaccccaggtggtctgtaactaccgggacgtgaggttcgagtctattagactgcccggatgtcccaggggagttaatcccgtggtcagctatgccgtggccttatcatgccagtgtgctctgtgcaggcgcagcacaactgactgcggcggtcccaaagaccaccctctcacttgcgacgatccgagatttcaggcttcttcctccagcaaggctccaccgccaagtctaccgagcccttcaaggctgcctggtcctagtgacactccgatcctgccacagtag

SEQ ID NO: 320219 - DNA, 3386 bp, Artificial Sequence
  derived and/or modified sequence
ctttcattggctggattggggtgggcgggttctgtcacctggggcaacagcaacaaaccagctcctgcttggctacagggagggggtggaaccatggccagtggcaccctggctgtgcgctgtggccccccgtggtctttcatctctgcaaccgagatgcctgaatcctggcccaactggcatctcaccagcagctacgttacccatggcattatcccacccgtacccttccccccgcccacggtgcaggtgggcagaccctaggctgaagccctgcggggcctggggacccagaaagatgggggctgagaaaaggggattgggagcttggactcctctctgaaggaggagggtcctggagtcctgggtctgagagaggaggcgccagggaatttggatgccagggactgcagaggaaagggctgggggccgactggaagaggtcagagtttggggtggggggtgatagggactcctgagtctttctagctgatgtgcggcgccttctctccagtccacggtcgcggaccctctacctccgactgcaaagcaggattctcgcatctgggctttcgacgaggtcctcagcagatgggagacaacctctggctcggcctacgtgcccaagacccatggcgggccctgcgcccagcccagagccccagagcctgcagaccccacgcggactgtggggatcaaggattcaggagaaaagctcagacaccgcagctgaaccctcctactgaccacaaagtaccagagcagcgagacgagggcgcagtacacttgctctcccggcccggacgcgcgcgcccccaaatacgtcgggccccagcccctcacaactctcggaccaccaccgcggggggccttcccaggtgtctgggtggaagccggcgctggcgagaccagcggagctccgggagcctggggcggggccagaaggaaatcacagctttggggcgtggctaaaggatctggggcgggatcgggaggttagaggagcgggaggaagggctgggcatccacgccaggccagaaggaccaggggctggaaactcgccttcagggctcctaagctgctgcggagctagacggcgggctgtgggtggggaggagactagaatattctgagacgtggtagggtgggagttaggagaggtaacctggagttgttgcccaagatgcagctcagctccagtggccacaccaagaaggcttgagaccgggggcagaaccagggggattttgtggtggctgggggcctgcatttgagttccttgaccagcaggagggcttggatttagggaggtgaggctgggaagggttcgggtatgagaaaggaagctgaagttccctggcgtgggtggcaggaagggctctgaccctggggcggggtgtgagggccgtggccgtcatggctgtcgaggccgaaggagagggattctgaactcgggacccaggacttgggatggggtatgaaatctatgtcttgggtatgcctcctcccccaatcttgctcaggctctaatcgcctgcacgaagaaccccgcgctgtctggcccacccttcacagtatccgaccggggcgtcctgaaccgccgccagctctatctgaccacctcggcgcgggactttcggttctatcccaagacggagccgtccggatacccccgcaaggactacctgacctactggagcttagaagagacgccccaactctggagtcacgacccgcagcggcagccctgtctctgctcttccaggccgcctcgagcgccgcacggcgggccatgtctccggctcaggaaacctacagctcctcgccgcacccgctccgccggctcgaccgcttccgcccgctggaggcgacttggggtggcccccactggaagcccctgccgggcatacacagcgtcccgaaagcctacagcaccgagaactcccgctcaggccgctgtaagccggggctagtgggagcctgccgggccagccccaccccagacacgccccctggcgtgggggcggagcagagctctgggcagccgctcactacgcggtgtcggacctaggtgggctcgcactcattaagtctatccgcagtgtggggacaggactagcccagacacgcccactcagctgcggctggatcgcggggaagggactaagtccagacaatgtcctccgaggctgcggccccgcgggcaggacacacctcctgcgggcctattcaataatcagttaaatcacctgaagcacacgcatttccggggaccgctccgggcatcctggcttgagggtagggtgggcggaggttcctaagggagaggtggggctcgggctgaatccctcgttggggggcatctgggtcaagtggcttccctggcagcacagtcacggggagaccctctctcactgggcagaagctaagtccgaagccgcgcccctcctgttaggttggactgtggtgcaggaatggctcaagtagaggagggttgaggcttcagtccagcacctttctcgggtcacggcctcctcctggttcccaagaccccaccataggcagaggcaggccttcctacaccctactctctgtgcctccagcctcgactagtccctagcactcgacgactgagtctcagaggtcacttcaccgtggtctccgcctcatccttggcgctagaccactgaggggagaggactggggtgctccgctgagccactcctgtgcctccctggccttgtctacttctcgccccccgaagggttagtgtccagctcactccagcatcctacaacctcctggtggccttgacgcccccacaaacccgaggtataaagccaggtacaccaggcaggggacgcaccaaggatggagatgttccaggggctgctgctgttgctgctgctgagcatgggcgggacatgggcatccagggagatgcttcggccacggtgccgccccatcaatgccaccctggctgtggagaaggagggctgccccgtgtgcatcaccgtcaacaccaccatctgtgccggctactgccccaccatgacccgcgtgctgcagggggtcctgccggccctgcctcaggtggtgtgcaactaccgcgatgtgcgcttcgagtccatccggctccctggctgcccgcgcggcgtgaaccccgtggtctcctacgccgtggctctcagctgtcaatgtgcactctgccgccgcagcaccactgactgcgggggtcccaaggaccaccccttgacctgtgatgacccccgcttccaggcctcctcttcctcaaaggcccctccccccagccttccaagtccatcccgactcccggggccctcagacaccccgatcctcccacaataaaggcttctcaatccgc

SEQ ID NO: 320220 - DNA, 880 bp, Artificial Sequence
  derived and/or modified sequence
tccagcacctttctcgggtcacggcctcctcctggttcccaagaccccaccataggcagaggcaggccttcctacaccctactctctgtgcctccagcctcgactagtccctagcactcgacgactgagtctcagaggtcacttcaccgtggtctccgcctcatccttggcgctagaccactgaggggagaggactggggtgctccgctgagccactcctgtgcctccctggccttgtctacttctcgccccccgaagggttagtgtccagctcactccagcatcctacaacctcctggtggccttgacgcccccacaaacccgaggtataaagccaggtacaccaggcaggggacgcaccaaggatggagatgttccaggggctgctgctgttgctgctgctgagcatgggcgggacatgggcatccagggagatgcttcggccacggtgccgccccatcaatgccaccctggctgtggagaaggagggctgccccgtgtgcatcaccgtcaacaccaccatctgtgccggctactgccccaccatgacccgcgtgctgcagggggtcctgccggccctgcctcaggtggtgtgcaactaccgcgatgtgcgcttcgagtccatccggctccctggctgcccgcgcggcgtgaaccccgtggtctcctacgccgtggctctcagctgtcaatgtgcactctgccgccgcagcaccactgactgcgggggtcccaaggaccaccccttgacctgtgatgacccccgcttccaggcctcctcttcctcaaaggcccctccccccagccttccaagtccatcccgactcccggggccctcagacaccccgatcctcccacaataaaggcttctcaatccgca

SEQ ID NO: 320221 - protein, 713 aa, Artificial Sequence
  derived and/or modified sequence
MARARGSPCPPLPPGRMSWPHGALLFLWLFSPPLGAGGGGVAVTSAAGGGSPPATSCPVACSCSNQASRVICTRRDLAEVPASIPVNTRYLNLQENGIQVIRTDTFKHLRHLEILQLSKNLVRKIEVGAFNGLPSLNTLELFDNRLTTVPTQAFEYLSKLRELWLRNNPIESIPSYAFNRVPSLRRLDLGELKRLEYISEAAFEGLVNLRYLNLGMCNLKDIPNLTALVRLEELELSGNRLDLIRPGSFQGLTSLRKLWLMHAQVATIERNAFDDLKSLEELNLSHNNLMSLPHDLFTPLHRLERVHLNHNPWHCNCDVLWLSWWLKETVPSNTTCCARCHAPAGLKGRYIGELDQSHFTCYAPVIVEPPTDLNVTEGMAAELKCRTGTSMTSVNWLTPNGTLMTHGSYRVRISVLHDGTLNFTNVTVQDTGQYTCMVTNSAGNTTASATLNVSAVDPVAAGGTGSGGGGPGGSGGVGGGSGGYTYFTTVTVETLETQPGEEALQPRGTEKEPPGPTTDGVWGGGRPGDAAGPASSSTTAPAPRSSRPTEKAFTVPITDVTENALKDLDDVMKTTKIIIGCFVAITFMAAVMLVAFYKLRKQHQLHKHHGPTRTVEIINVEDELPAASAVSVAAAAAVASGGGVGGDSHLALPALERDHLNHHHYVAAAFKAHYSSNPSGGGCGGKGPPGLNSIHEPLLFKSGSKENVQETQI

SEQ ID NO: 320222 - protein, 421 aa, Artificial Sequence
  derived and/or modified sequence
MARARGSPCPPLPPGRMSWPHGALLFLWLFSPPLGAGGGGVAVTSAAGGGSPPATSCPVACSCSNQASRVICTRRDLAEVPASIPVNTRYLNLQENGIQVIRTDTFKHLRHLEILQLSKNLVRKIEVGAFNGLPSLNTLELFDNRLTTVPTQAFEYLSKLRELWLRNNPIESIPSYAFNRVPSLRRLDLGELKRLEYISEAAFEGLVNLRYLNLGMCNLKDIPNLTALVRLEELELSGNRLDLIRPGSFQGLTSLRKLWLMHAQVATIERNAFDDLKSLEELNLSHNNLMSLPHDLFTPLHRLERVHLNHNPWHCNCDVLWLSWWLKETVPSNTTCCARCHAPAGLKGRYIGELDQSHFTCYAPVIVEPPTDLNVTEGMAAELKCRTGTSMTSVNWWPQLHPRTSALQERLQGERARDADL

SEQ ID NO: 320223 - DNA, 2142 bp, Artificial Sequence
  derived and/or modified sequence
atggccagagccagaggcagcccctgcccccccctgccccccggcagaatgagctggccccacggcgccctgctgttcctgtggctgttcagcccccccctgggcgccggcggcggcggcgtggccgtgaccagcgccgccggcggcggcagcccccccgccaccagctgccccgtggcctgcagctgcagcaaccaggccagcagagtgatctgcaccagaagagacctggccgaggtgcccgccagcatccccgtgaacaccagatacctgaacctgcaggagaacggcatccaggtgatcagaaccgacaccttcaagcacctgagacacctggagatcctgcagctgagcaagaacctggtgagaaagatcgaggtgggcgccttcaacggcctgcccagcctgaacaccctggagctgttcgacaacagactgaccaccgtgcccacccaggccttcgagtacctgagcaagctgagagagctgtggctgagaaacaaccccatcgagagcatccccagctacgccttcaacagagtgcccagcctgagaagactggacctgggcgagctgaagagactggagtacatcagcgaggccgccttcgagggcctggtgaacctgagatacctgaacctgggcatgtgcaacctgaaggacatccccaacctgaccgccctggtgagactggaggagctggagctgagcggcaacagactggacctgatcagacccggcagcttccagggcctgaccagcctgagaaagctgtggctgatgcacgcccaggtggccaccatcgagagaaacgccttcgacgacctgaagagcctggaggagctgaacctgagccacaacaacctgatgagcctgccccacgacctgttcacccccctgcacagactggagagagtgcacctgaaccacaacccctggcactgcaactgcgacgtgctgtggctgagctggtggctgaaggagaccgtgcccagcaacaccacctgctgcgccagatgccacgcccccgccggcctgaagggcagatacatcggcgagctggaccagagccacttcacctgctacgcccccgtgatcgtggagccccccaccgacctgaacgtgaccgagggcatggccgccgagctgaagtgcagaaccggcaccagcatgaccagcgtgaactggctgacccccaacggcaccctgatgacccacggcagctacagagtgagaatcagcgtgctgcacgacggcaccctgaacttcaccaacgtgaccgtgcaggacaccggccagtacacctgcatggtgaccaacagcgccggcaacaccaccgccagcgccaccctgaacgtgagcgccgtggaccccgtggccgccggcggcaccggcagcggcggcggcggccccggcggcagcggcggcgtgggcggcggcagcggcggctacacctacttcaccaccgtgaccgtggagaccctggagacccagcccggcgaggaggccctgcagcccagaggcaccgagaaggagccccccggccccaccaccgacggcgtgtggggcggcggcagacccggcgacgccgccggccccgccagcagcagcaccaccgcccccgcccccagaagcagcagacccaccgagaaggccttcaccgtgcccatcaccgacgtgaccgagaacgccctgaaggacctggacgacgtgatgaagaccaccaagatcatcatcggctgcttcgtggccatcaccttcatggccgccgtgatgctggtggccttctacaagctgagaaagcagcaccagctgcacaagcaccacggccccaccagaaccgtggagatcatcaacgtggaggacgagctgcccgccgccagcgccgtgagcgtggccgccgccgccgccgtggccagcggcggcggcgtgggcggcgacagccacctggccctgcccgccctggagagagaccacctgaaccaccaccactacgtggccgccgccttcaaggcccactacagcagcaaccccagcggcggcggctgcggcggcaagggcccccccggcctgaacagcatccacgagcccctgctgttcaagagcggcagcaaggagaacgtgcaggagacccagatctag

SEQ ID NO: 320224 - DNA, 1266 bp, Artificial Sequence
  derived and/or modified sequence
atggccagagccagaggcagcccctgcccccccctgccccccggcagaatgagctggccccacggcgccctgctgttcctgtggctgttcagcccccccctgggcgccggcggcggcggcgtggccgtgaccagcgccgccggcggcggcagcccccccgccaccagctgccccgtggcctgcagctgcagcaaccaggccagcagagtgatctgcaccagaagagacctggccgaggtgcccgccagcatccccgtgaacaccagatacctgaacctgcaggagaacggcatccaggtgatcagaaccgacaccttcaagcacctgagacacctggagatcctgcagctgagcaagaacctggtgagaaagatcgaggtgggcgccttcaacggcctgcccagcctgaacaccctggagctgttcgacaacagactgaccaccgtgcccacccaggccttcgagtacctgagcaagctgagagagctgtggctgagaaacaaccccatcgagagcatccccagctacgccttcaacagagtgcccagcctgagaagactggacctgggcgagctgaagagactggagtacatcagcgaggccgccttcgagggcctggtgaacctgagatacctgaacctgggcatgtgcaacctgaaggacatccccaacctgaccgccctggtgagactggaggagctggagctgagcggcaacagactggacctgatcagacccggcagcttccagggcctgaccagcctgagaaagctgtggctgatgcacgcccaggtggccaccatcgagagaaacgccttcgacgacctgaagagcctggaggagctgaacctgagccacaacaacctgatgagcctgccccacgacctgttcacccccctgcacagactggagagagtgcacctgaaccacaacccctggcactgcaactgcgacgtgctgtggctgagctggtggctgaaggagaccgtgcccagcaacaccacctgctgcgccagatgccacgcccccgccggcctgaagggcagatacatcggcgagctggaccagagccacttcacctgctacgcccccgtgatcgtggagccccccaccgacctgaacgtgaccgagggcatggccgccgagctgaagtgcagaaccggcaccagcatgaccagcgtgaactggtggccccagctgcaccccagaaccagcgccctgcaggagagactgcagggcgagagagccagagacgccgacctgtag

SEQ ID NO: 320225 - DNA, 2142 bp, Artificial Sequence
  derived and/or modified sequence
atggcgcgtgctcgcgggagtccatgtcccccactgccacccggcagaatgtcatggcctcatggcgccttacttttcctgtggttattctcacctccccttggcgccggtggtggcggagtggctgtgacgtcagccgctggagggggatcaccccccgcaacttcctgcccagtggcctgtagttgcagcaatcaagcttcccgcgtgatctgcaccaggagggacctggcagaagtaccagcttcaatcccagtcaatactcgatatttgaacctccaggagaatggcattcaggttatcagaaccgatactttcaagcatttgcgtcatctcgaaatcctccagctgagtaagaacctggtgcgcaagatcgaggtcggggcttttaacggactgccaagtctgaatacgctggagctgtttgacaatcgattgaccacagtccccacccaggcgtttgagtacctgagcaagctgagggaactgtggttgcgcaacaatcccattgagtctattccgagctatgcgtttaaccgcgttccttcattacgtaggcttgacctgggggaactcaagcggctggagtacatcagcgaggccgcattcgagggcctggtcaatctgcgctaccttaacttgggaatgtgtaacctgaaggacattccaaacctgaccgcattggtgcgcctggaggagctggagttgagcgggaaccgcctagatttaattcggcctggctctttccagggtctcacttcacttaggaagctctggttgatgcatgcacaggtggccacgatcgagcgcaacgccttcgacgatctgaagagcctggaagaactgaacctgtcccataacaatcttatgtcactgccgcacgacctcttcaccccactccatcgactagaacgagtccatttaaaccacaacccgtggcactgtaattgcgatgtactctggttatcatggtggttaaaggaaaccgtgccatctaataccacttgctgcgctcggtgtcacgcaccagctggcctgaagggaaggtatattggagaacttgatcaaagccattttacctgctatgctcctgtaatagtagaaccgcccacagatcttaacgttactgaaggcatggccgccgagctgaagtgccgcacaggcaccagcatgacaagtgtgaactggttaacgccaaatggcactcttatgactcatggctcttatagagtgcggataagcgtcctgcacgatgggactcttaatttcactaacgtgactgtccaggatacgggccaatatacatgcatggtgacaaactcggccggaaacaccaccgcctctgccactcttaatgtctctgcagttgaccctgtggctgcaggaggaaccggctccgggggcggaggccctggaggcagcggcggagtcggaggaggtagtggaggatatacttatttcaccactgtcaccgtggagacgctggaaactcagccaggagaagaggcactgcaacctagggggaccgagaaggaaccaccaggcccaaccacagacggagtttgggggggaggaagacctggtgacgctgccggccccgctagtagcagcaccacagcccccgcgcccagaagcagccggccgaccgagaaggcgtttacagtccccatcaccgatgttaccgagaatgcgctgaaagatctagatgacgtgatgaagacaactaaaattattattggatgctttgtggcaatcaccttcatggcagcagtgatgctcgtggctttttacaaactccggaaacagcatcaactccataagcaccacggccccactcgcacagtcgaaatcatcaacgtggaggatgagctcccagcagcctctgccgtcagcgttgcagcagccgccgctgtcgcctcgggtggaggggtcggtggcgatagccacttagcccttccggctctcgagagggatcacctgaatcatcatcactatgtcgctgccgctttcaaggcccattactccagcaacccatccgggggaggatgcggcggcaagggcccacctggcctaaactccattcacgaaccactactgttcaaaagcgggtcaaaagagaatgtgcaagaaacacagatatag

SEQ ID NO: 320226 - DNA, 1266 bp, Artificial Sequence
  derived and/or modified sequence
atggctagagccaggggctccccgtgcccgcctctccctccaggccgcatgtcttggccccatggagcactgttattcctctggctgttcagcccaccacttggcgccggtggcggaggagtagccgtcacttctgccgctggcggagggagccctcccgctacatcctgtccagttgcctgttcgtgtagcaatcaggcctcacgggtaatttgcacacggagggacctcgccgaagtgccggcatccatccccgtcaatactcgctacctcaaccttcaggagaatgggatccaggtaatacggacagacacttttaagcacctgagacatctagaaattcttcaactaagcaagaacctggtgcggaaaatcgaggtgggagcattcaacggcctccctagtttaaacacactggaactgttcgataatcgcttgacaacagtgcctacacaggcctttgaatacctgagtaagctgagggagctttggctgagaaacaatcccattgagagtattccttcttacgcttttaatagagtgcccagcctgcgccgcctggacctgggcgagctgaaaagactggaatacatttccgaagccgccttcgagggcctcgttaatctgcggtacctgaaccttgggatgtgtaacctgaaggatattcctaatttgacagctctcgtcaggctggaagagttggagttgtctggtaatcggcttgatttaatccgtcctggatcctttcaaggcctgaccagcttgcgcaagctttggcttatgcacgcccaggtggcaactattgaaagaaacgcttttgacgacttgaagagcctggaggaattgaacctgtcccataataaccttatgtcacttccccacgacttgtttacccccttacatcgccttgagagggtccacctcaatcacaacccttggcattgtaattgtgatgtcctttggctctcctggtggcttaaggagacagtaccatccaacaccacctgttgtgctcgatgccacgctccagcagggctgaaaggacgctacattggtgagttagatcagtctcacttcacttgttatgctccggtgatcgtggaaccccccactgatctaaatgtgactgaaggaatggcagcagaactcaaatgtcgaacgggcactagcatgacaagtgttaactggtggccgcagctgcatcctcggacatcagccctccaagaacggttacagggggaacgggctcgggatgctgatttgtag

SEQ ID NO: 320227 - DNA, 2958 bp, Artificial Sequence
  derived and/or modified sequence
cccgcagcgggccttgcaccccaaattcctgagcctcattgggggggtcctccccccacgggccgggcatgctgccccccggaaggaacccctctcctcgctccccccagcgtccacgcggagcatgaacattgaggatggcgcgtgcccgcggctccccgtgccccccgctgccgcccggtaggatgtcctggccccacggggcattgctcttcctctggctcttctccccacccctgggggccggtggaggtggagtggccgtgacgtctgccgccggagggggctccccgccggccacctcctgccccgtggcctgctcctgcagcaaccaggccagccgggtgatctgcacacggagagacctggccgaggtcccagccagcatcccggtcaacacgcggtacctgaacctgcaagagaacggcatccaggtgatccggacggacacgttcaagcacctgcggcacctggagattctgcagctgagcaagaacctggtgcgcaagatcgaggtgggcgccttcaacgggctgcccagcctcaacacgctggagctttttgacaaccggctgaccacggtgcccacgcaggccttcgagtacctgtccaagctgcgggagctctggctgcggaacaaccccatcgagagcatcccctcctacgccttcaaccgcgtgccctcgctgcggcgcctggacctgggcgagctcaagcggctggaatacatctcggaggcggccttcgaggggctggtcaacctgcgctacctcaacctgggcatgtgcaacctcaaggacatccccaacctgacggccctggtgcgcctggaggagctggagctgtcgggcaaccggctggacctgatccgcccgggctccttccagggtctcaccagcctgcgcaagctgtggctcatgcacgcccaggtagccaccatcgagcgcaacgccttcgacgacctcaagtcgctggaggagctcaacctgtcccacaacaacctgatgtcgctgccccacgacctcttcacgcccctgcaccgcctcgagcgcgtgcacctcaaccacaacccctggcattgcaactgcgacgtgctctggctgagctggtggctcaaggagacggtgcccagcaacacgacgtgctgcgcccgctgtcatgcgcccgccggcctcaaggggcgctacattggggagctggaccagtcgcatttcacctgctatgcgcccgtcatcgtggagccgcccacggacctcaacgtcaccgagggcatggctgccgagctcaaatgccgcacgggcacctccatgacctccgtcaactggctgacgcccaacggcaccctcatgacccacggctcctaccgcgtgcgcatctccgtcctgcatgacggcacgcttaacttcaccaacgtcaccgtgcaggacacgggccagtacacgtgcatggtgacgaactcagccggcaacaccaccgcctcggccacgctcaacgtctcggccgtggaccccgtggcggccgggggcaccggcagcggcgggggcggccctgggggcagtggtggtgttggagggggcagtggcggctacacctacttcaccacggtgaccgtggagaccctggagacgcagcccggagaggaggccctgcagccgcgggggacggagaaggaaccgccagggcccacgacagacggtgtctggggtgggggccggcctggggacgcggccggccctgcctcgtcttctaccacggcacccgccccgcgctcctcgcggcccacggagaaggcgttcacggtgcccatcacggatgtgacggagaacgccctcaaggacctggacgacgtcatgaagaccaccaaaatcatcatcggctgcttcgtggccatcacgttcatggccgcggtgatgctcgtggccttctacaagctgcgcaagcagcaccagctccacaagcaccacgggcccacgcgcaccgtggagatcatcaacgtggaggacgagctgcccgccgcctcggccgtgtccgtggccgccgcggccgccgtggccagtgggggtggtgtgggcggggacagccacctggccctgcccgccctggagcgagaccacctcaaccaccaccactacgtggctgccgccttcaaggcgcactacagcagcaaccccagcggcgggggctgcgggggcaaaggcccgcctggcctcaactccatccacgaacctctgctcttcaagagcggctccaaggagaacgtgcaagagacgcagatctgaggcggcggggccgggcgggcgaggggcgtggagccccccacccaggtcccagcccgggcgcagcctgaccgggacccctccctcccacagcccagcccaccttctgggaccacgcagggaattggggagaggtggcttccagccccatctggggctcggacccccagtaaggacagggtggggctccaggagcggagtctctgggatcctcgcctcacccccgccaatccccggtgacgggaggggacgtgggacccaggagaagtggcctgagttctccgcgtttcctcctcgctctcccaccaagcgttccgggcccgccgccttccaggggagagaggagctttctccaggggtgtcctttcccctcggccccaaacaccttccttttacggttcagtttttgcagtttgacgcccgtccctccctcccactcctccgccctcaaaactgaagagatggacacgtcgccagagctcccgtcccagcgcccggctctgctcccggccggcggtccctgtcgtcggcgcgggggggagcctccacccgccccagccccacctgccccacagacacttttgatactgaagggaggtttgcgtcaacgactacctgctctgtaattactttaaaaaaaaaacatggaaaaagtaaaaaaatattttttttggtcatgaaa

SEQ ID NO: 320228 - DNA, 1400 bp, Artificial Sequence
  derived and/or modified sequence
cccgcagcgggccttgcaccccaaattcctgagcctcattgggggggtcctccccccacgggccgggcatgctgccccccggaaggaacccctctcctcgctccccccagcgtccacgcggagcatgaacattgaggatggcgcgtgcccgcggctccccgtgccccccgctgccgcccggtaggatgtcctggccccacggggcattgctcttcctctggctcttctccccacccctgggggccggtggaggtggagtggccgtgacgtctgccgccggagggggctccccgccggccacctcctgccccgtggcctgctcctgcagcaaccaggccagccgggtgatctgcacacggagagacctggccgaggtcccagccagcatcccggtcaacacgcggtacctgaacctgcaagagaacggcatccaggtgatccggacggacacgttcaagcacctgcggcacctggagattctgcagctgagcaagaacctggtgcgcaagatcgaggtgggcgccttcaacgggctgcccagcctcaacacgctggagctttttgacaaccggctgaccacggtgcccacgcaggccttcgagtacctgtccaagctgcgggagctctggctgcggaacaaccccatcgagagcatcccctcctacgccttcaaccgcgtgccctcgctgcggcgcctggacctgggcgagctcaagcggctggaatacatctcggaggcggccttcgaggggctggtcaacctgcgctacctcaacctgggcatgtgcaacctcaaggacatccccaacctgacggccctggtgcgcctggaggagctggagctgtcgggcaaccggctggacctgatccgcccgggctccttccagggtctcaccagcctgcgcaagctgtggctcatgcacgcccaggtagccaccatcgagcgcaacgccttcgacgacctcaagtcgctggaggagctcaacctgtcccacaacaacctgatgtcgctgccccacgacctcttcacgcccctgcaccgcctcgagcgcgtgcacctcaaccacaacccctggcattgcaactgcgacgtgctctggctgagctggtggctcaaggagacggtgcccagcaacacgacgtgctgcgcccgctgtcatgcgcccgccggcctcaaggggcgctacattggggagctggaccagtcgcatttcacctgctatgcgcccgtcatcgtggagccgcccacggacctcaacgtcaccgagggcatggctgccgagctcaaatgccgcacgggcacctccatgacctccgtcaactggtggcctcaactccatccacgaacctctgctcttcaagagcggctccaaggagaacgtgcaagagacgcagatctg

SEQ ID NO: 320229 - DNA, 2142 bp, Artificial Sequence
  derived and/or modified sequence
atggcccgggcccggggcagcccctgcccccccctgcccccaggccgcatgtcctggccccatggagccctgctcttcctgtggctgttcagcccccccctgggcgctgggggcggcggcgtggccgtgaccagcgctgctgggggcggcagccccccagccaccagctgccctgtggcctgcagctgcagcaaccaggccagcagggtcatctgcacccggcgggacctggccgaggtgcctgccagcatccctgtgaacacccgctacctgaacctgcaggagaatggcatccaggtgatcagaacagacaccttcaagcacctgcggcacctggagatcctgcagctgagcaagaacctggtgaggaagattgaggtgggcgccttcaacggcctgcccagcctgaacaccctggagctgtttgacaaccggctgaccaccgtgcccacccaggcctttgagtacctgagcaagctgcgggagctgtggctgaggaacaaccccatcgagagcatccccagctatgccttcaacagagtgcccagcctgcggcggctggacctgggggagctgaagaggctggagtacatcagcgaggccgcctttgagggcctggtgaacctgcgctacctgaacctgggcatgtgcaacctgaaggacatccccaacctgacagccctggtgcggctggaggagctggagctgagcggcaaccggctggacctgatccggcccggcagcttccagggcctgaccagcctgaggaagctgtggctgatgcacgcccaggtggccaccatcgagagaaatgcctttgatgacctgaagagcctggaggagctgaacctgagccacaacaacctgatgagcctgccccatgacctcttcacccccctgcaccggctggagcgggtgcacctgaaccacaacccctggcactgcaactgtgatgtgctgtggctgtcctggtggctgaaggagaccgtgcccagcaacaccacctgctgtgcccgctgccacgccccagctggcctgaagggccgctacatcggggagctggaccagagccacttcacctgctacgcccctgtgattgtggagcccccaacagacctgaatgtgacagagggcatggctgctgagctgaagtgcaggacaggcacctccatgacctctgtgaactggctgacccccaacggcaccctgatgacccacggcagctacagagtgcgcatctctgtgctgcatgatggcaccctgaacttcaccaacgtgacagtgcaggacaccggccagtacacctgcatggtgaccaacagcgctggcaacaccacagccagcgccaccctgaatgtgtctgctgtggaccctgtggccgccggcggcaccggcagcggcggcggcggccctgggggcagcggcggcgtgggcggcggcagcggcggctacacctacttcaccaccgtgacagtggagaccctggagacccagcctggagaggaggccctgcagccccggggcacagagaaggagcccccaggccccaccacagatggagtgtggggcggcggccggcctggagatgctgctggccctgccagcagcagcaccacagccccagcccccaggagcagccggcccacagagaaggccttcaccgtgcccatcacagatgtgacagaaaatgccctgaaggacctggatgatgtgatgaagaccaccaagatcatcatcggctgctttgtggccatcaccttcatggctgctgtgatgctggtggccttctacaagctgaggaagcagcaccagctgcacaagcaccacggccccaccaggacagtggagatcatcaacgtggaggatgagctgcctgctgccagcgctgtgtctgtggccgctgctgctgctgtggccagcggcggcggcgtgggcggggacagccacctggccctgcctgccctggagcgggaccacctgaaccaccaccactacgtggccgccgccttcaaggcccactacagcagcaaccccagcggcggcggctgcggcggcaagggccccccaggcctgaacagcatccacgagcccctgctcttcaagagcggcagcaaagaaaatgtgcaggagacccagatctag

SEQ ID NO: 320230 - DNA, 1266 bp, Artificial Sequence
  derived and/or modified sequence
atggcccgggcccggggcagcccctgcccccccctgcccccaggccgcatgtcctggccccatggagccctgctcttcctgtggctgttcagcccccccctgggcgctgggggcggcggcgtggccgtgaccagcgctgctgggggcggcagccccccagccaccagctgccctgtggcctgcagctgcagcaaccaggccagcagggtcatctgcacccggcgggacctggccgaggtgcctgccagcatccctgtgaacacccgctacctgaacctgcaggagaatggcatccaggtgatcagaacagacaccttcaagcacctgcggcacctggagatcctgcagctgagcaagaacctggtgaggaagattgaggtgggcgccttcaacggcctgcccagcctgaacaccctggagctgtttgacaaccggctgaccaccgtgcccacccaggcctttgagtacctgagcaagctgcgggagctgtggctgaggaacaaccccatcgagagcatccccagctatgccttcaacagagtgcccagcctgcggcggctggacctgggggagctgaagaggctggagtacatcagcgaggccgcctttgagggcctggtgaacctgcgctacctgaacctgggcatgtgcaacctgaaggacatccccaacctgacagccctggtgcggctggaggagctggagctgagcggcaaccggctggacctgatccggcccggcagcttccagggcctgaccagcctgaggaagctgtggctgatgcacgcccaggtggccaccatcgagagaaatgcctttgatgacctgaagagcctggaggagctgaacctgagccacaacaacctgatgagcctgccccatgacctcttcacccccctgcaccggctggagcgggtgcacctgaaccacaacccctggcactgcaactgtgatgtgctgtggctgtcctggtggctgaaggagaccgtgcccagcaacaccacctgctgtgcccgctgccacgccccagctggcctgaagggccgctacatcggggagctggaccagagccacttcacctgctacgcccctgtgattgtggagcccccaacagacctgaatgtgacagagggcatggctgctgagctgaagtgcaggacaggcacctccatgacctctgtgaactggtggccccagctgcaccccaggaccagcgccctgcaggagcggctgcagggcgagcgggccagagatgctgacctgtag

SEQ ID NO: 320231 - DNA, 2142 bp, Artificial Sequence
  derived and/or modified sequence
atggcccgggcccggggcagcccctgcccccccctgccccccggcagaatgagctggcctcatggtgccttgctgtttctgtggctgttttcgccgccacttggggctggcgggggaggtgtagccgtaacatccgcggctggtggggggtcgcctcccgctaccagctgcccggtggcttgctcttgctcaaatcaggcgtctagagtcatctgtactcggcgcgatcttgccgaggtgcccgccagtatccccgtcaatacacgatacctgaatttgcaggaaaacggaattcaggttatccgaactgatacgttcaaacatcttagacacctagagattttacagctgtctaagaatcttgtgcgcaagatagaagtgggagctttcaatggcttacccagcctcaacaccttggaactatttgataatagactcactacagtgcccacgcaggcctttgagtacctgtcgaaactgagagaattgtggctgaggaacaaccccattgaatccattccatcttatgctttcaatcgggtcccatccctcagacggttggaccttggcgagctgaaaagattagaatacatctcagaggccgcctttgagggtttagtgaacctgagatacctgaacttgggaatgtgtaacctaaaggacataccaaacctcacagctctcgttcgactcgaggaactcgagctttcaggcaataggcttgacctgattcgaccgggttccttccaaggcctgacctccttgcggaaactgtggctcatgcacgctcaggtggcaacaattgagcggaacgcgttcgatgacctgaagtccctggaggaactcaacctgagtcacaataatctgatgagcctgccgcacgacttgttcacgcccttacatcgactggaaagagtgcatcttaatcataatccatggcactgtaactgtgacgtcctttggctctcgtggtggctcaaggaaaccgtgcctagcaacactacctgttgtgctcggtgccatgcacccgctggcttgaaaggacggtacataggggagctggatcaatctcacttcacctgttatgcgcccgtgatcgttgaaccaccgacggacttaaatgtgacagaaggcatggccgccgaactgaagtgtcggacgggaacctcgatgacatccgtcaattggctcacacctaacggcaccctcatgacacacggttcatatagagtgcggatttctgtcctccacgacggtacattgaactttacgaacgtgaccgtgcaggatacgggccagtatacctgtatggtaactaactccgctggcaacacaacagcctcggctacacttaatgtcagtgccgtggatcccgtagccgctgggggtacaggcagtggaggcggaggacctggtggatctggcggcgtagggggcgggtcaggtggctacacctattttactaccgtgaccgttgaaaccctggaaacacagccaggggaagaagctttgcaaccaagaggaactgagaaagagcctccaggccctacaaccgatggggtctgggggggcggcaggcccggcgatgctgcaggtccagcgagcagtagtaccaccgcccccgcgccccggtcatcacgacccaccgaaaaggctttcaccgtacctatcaccgacgtcaccgagaatgccctcaaggatctagacgatgtcatgaagacaacgaaaattatcatcgggtgttttgtggcaatcacattcatggccgccgtgatgctcgttgctttctataaattaagaaagcagcaccaacttcacaaacaccacggtccaacaaggacggtagagattataaatgtcgaggacgagttgccggccgctagtgctgtctccgttgctgctgcagccgcagtcgctagcggcggcggggtcggtggcgattctcacctggcattgccggccctggagcgagaccacctaaatcaccaccactacgtggctgcagcgttcaaggcccactacagcagcaacccaagcgggggtgggtgcggggggaaaggacccccagggctgaactcaattcatgaacctctactttttaagagcggctcaaaggaaaacgtgcaggagacccaaatatag

SEQ ID NO: 320232 - DNA, 1266 bp, Artificial Sequence
  derived and/or modified sequence
atggcccgggcccggggcagcccctgcccccccctgccccccggccggatgtcttggcctcatggtgcacttctgttcctatggctgttcagcccacccctgggagcaggagggggaggcgtggctgtgacaagtgctgccggcggaggctctcccccagccacttcttgtcctgtggcttgcagctgtagcaatcaagcctctagggtgatatgtaccagacgcgacctagccgaagtgcctgcgtccattcccgttaatacgcgatacctcaacttacaggaaaacggcattcaggttattcgaactgacacgtttaaacatttgaggcacctcgaaattttacaacttagtaaaaatctggttcgcaaaatcgaggtgggagccttcaacggactgccttccctgaatacactcgagctgtttgataataggttgaccaccgtgccaacccaggcgtttgagtatctgagtaagctgagggaattatggctccgaaacaatcctatcgagtctatccctagttatgcatttaatcgcgtgccatccctgaggagactggatctcggggaacttaaaaggttggaatacatctctgaggccgccttcgaaggcctggtgaacttaagatacttaaacctcgggatgtgcaatctcaaggatattcctaacctgactgccttagttagactcgaggagctagaactctcagggaataggctagacttaattcgccctggaagttttcagggcctgaccagcctacgtaaattatggctcatgcacgcccaggttgccaccatagaaagaaacgccttcgatgatctgaagtcgctcgaggagttaaatctgtcgcataataatttaatgagcttgccgcacgacctgtttactcccttgcaccggctggaaagagtgcatcttaaccataatccctggcactgcaattgtgatgtgctgtggttaagctggtggctgaaagaaaccgtgccttccaatacgacctgctgcgcacggtgtcacgcccccgctgggctgaaagggcgctacatcggcgaactagatcagtcacacttcacgtgttacgcccccgtaattgtcgagccccctacagatctgaacgtaacggaaggaatggctgccgagttaaaatgtcgaacggggacatcgatgacttctgttaactggtggccccagctccatcccagaaccagcgccctgcaggagcggttgcagggcgaacgggccagagacgctgacttgtag

SEQ ID NO: 320233 - DNA, 2142 bp, Artificial Sequence
  derived and/or modified sequence
atggcaagggcaagagggtccccctgtccacctctcccaccaggtcgaatgagttggccccacggggcactgctcttcttgtggctgttttcccccccactcggcgcaggcggaggaggcgtggctgtgaccagcgctgctgggggagggtcgccacccgctacatcctgcccagtcgcttgcagctgttcgaatcaggcgtcccgcgtcatctgcactagacgcgacctggcagaggtgccagcgtccatccccgtgaatactcgctacctaaacttgcaggaaaatggtatccaagttatccggacggacaccttcaagcacttgcggcacttggagattctacaactctcgaagaacttggtccgcaagatagaggtgggagcttttaatggactgcccagtcttaacactttggagctctttgacaatcgcctgacaacagtgcccacgcaagcatttgaatatttgagtaaactccgggaactgtggttacgcaataaccccatcgaatctattcccagttatgccttcaaccgcgtacccagcttacgcagattggaccttggggagctgaagaggctggagtacattagtgaggctgcctttgaagggctggtgaatctgcggtatctcaatctgggcatgtgtaatttgaaagacatccccaatcttacggcgctggtacggctggaagagctcgagctgtccggtaaccggctcgatttgatacgacctggctcttttcagggcctcacaagcctgagaaagttgtggctgatgcatgcacaagtggccacaatcgaacgaaatgccttcgacgatctcaagagtctcgaggaactgaacttgtcccacaataatctgatgtccctcccccacgatctgttcacccctctgcatcggctggaacgcgtgcacctcaaccacaacccctggcactgtaattgcgatgtgctgtggctgtcgtggtggttgaaagagactgtgccctccaacaccacttgttgcgcgagatgccatgcccctgcaggcctcaaagggcgatatattggagagctggatcagtcccacttcacttgttacgcacctgtgattgttgaaccccctaccgatctgaatgtgacagaagggatggctgctgagctcaaatgccgaacaggcacctctatgacatcggtcaactggctgacacccaacggcaccctaatgacccatgggtcctatagggtcagaataagcgtgctgcatgacggcactctgaacttcacgaatgtcacagttcaggacacgggccagtatacatgtatggtcaccaatagcgctggtaataccactgcatccgcaacgttaaatgtctcagccgtggacccagtggcagccggagggacaggttccggtggtggcggtcccggaggatccggaggcgtaggaggcggttccgggggttacacctacttcaccacagtaacggtggaaacgctggagacgcagccaggagaggaggctctgcagcccaggggaacggaaaaagagccccctgggcctactaccgacggagtgtggggaggcggtagacctggggatgccgcaggcccagcctctagcagcaccactgcccctgcaccacgtagctcccgcccaacggagaaagccttcaccgtacctatcactgacgtgaccgaaaatgcccttaaggatctggacgatgttatgaagacaaccaaaatcatcattgggtgttttgttgccataactttcatggctgccgtgatgctcgtggccttttataagctcaggaagcagcaccaactccacaagcaccatgggcctacgcgcaccgtggaaattataaatgtagaggatgaactgcccgcagcgtccgccgttagtgttgctgccgctgcagccgtggccagcggagggggagtagggggagattctcatctagcattacctgctctggaacgggaccatctgaaccaccaccattacgttgccgctgccttcaaggcccactattcaagcaatccctctggcggaggctgtgggggaaagggtccaccaggcctcaattccattcacgaacctctcctgttcaagagcggcagcaaggagaacgtgcaagagacacaaatctag

SEQ ID NO: 320234 - DNA, 1266 bp, Artificial Sequence
  derived and/or modified sequence
atggcacgggctcggggatccccttgtccccctttgcctccgggtcgaatgtcttggccgcacggagccctgttatttctgtggcttttcagtccgcctttgggagccggaggcggaggcgtggccgtcacttctgctgcgggaggaggtagccccccagctacaagctgtcccgtcgcctgcagctgttcgaaccaggcttccagggtgatctgtacaagacgtgacctggccgaagttcctgccagcattccggtcaacacacgatatttgaatcttcaggagaatggcatccaagtgatccgcaccgacacattcaagcatctgagacacctggaaatcctacagttgtccaagaatctagtgcgcaagattgaggttggtgcgtttaacggtctgcccagtctgaacactctggagctgttcgacaaccgcctcacaactgtacccacacaagcatttgaatatctgagcaagctaagagagttgtggctacgcaacaatcccatcgagtcaattccaagctatgctttcaacagggtgccaagcctgcgccgtctggacctcggggaactgaagcggctggaatacatcagcgaagccgcttttgagggactcgtgaacctgcggtatctgaatttagggatgtgcaatctaaaggacattccgaatctgaccgctctggtgcgtctcgaagaactggaactgtctggcaaccgactggatttgattcggcctggatctttccagggcctcaccagcctcagaaagctctggctgatgcatgcccaagtggctactattgaacggaacgcttttgacgatttgaaatctctggaggaattgaatttatcgcacaataatctcatgtcgcttccacatgacctgttcaccccgctgcaccgcctcgagcgagtacacctcaaccacaatccttggcactgcaattgtgatgtgctgtggctcagctggtggctgaaggaaaccgtgcccagcaatactacgtgctgcgctcgctgtcacgctcccgctgggcttaaaggaaggtacataggcgagctagaccagtctcacttcacatgctatgctccggtgatcgtagagccaccaaccgaccttaacgtaactgaaggaatggccgcagaactcaaatgcagaacaggcacttccatgacttcagtgaactggtggccacaactacacccccgtaccagcgcactgcaggagagactccaaggagagagagcgagagacgctgacctgtag

SEQ ID NO: 320235 - DNA, 153 bp, Artificial Sequence
  derived and/or modified sequence
atgctgcggagcaccttcaccgtgcactggaccaccatcctgggcatctgtcgccccattaagcccatatataagagccaagcctgccctctgtccgagaaacgaaatgctgacaatcacctggtctctgaagacaacaccttcaaagtgtag

SEQ ID NO: 320236 - protein, 286 aa, Artificial Sequence
  derived and/or modified sequence
QRCCRCCCRCPCCGQGPRSGCKIPAGDARVRDGAGGSVHLCALFGLLPRVWLERFYPCLWPLVPGRGQCRPGDSATNNSTQKVQKETQGRFHLLGDPSRNNCSLSIRDARRRDNGSYFFWVARGRTKFSYKYSPLSVYVTALTHRPDILIPEFLKSGHPSNLTCSVPWVCEQGTPPIFSWMSAAPTSLGPRTLHSSVLTIIPRPQDHGTNLICQVTFPGAGVTTERTIQLSVSWKSGTVEEVVVLAVGVVAVKILLLCLCLIILSFHKKKAVRAVEVEENVYAVMG

SEQ ID NO: 320237 - protein, 277 aa, Artificial Sequence
  derived and/or modified sequence
MPESVTVQEGLCIFVHCSVFYLEYGWKDSTPAYGHWFREGVSVDQETPVATNNSTQKVQKETQGRFHLLGDPSRNNCSLSIRDARRRDNGSYFFWVARGRTKFSYKYSPLSVYVTALTHRPDILIPEFLKSGHPSNLTCSVPWVCEQGTPPIFSWMSAAPTSLGPRTLHSSVLTIIPRPQDHGTNLICQVTFPGAGVTTERTIQLSVSYPLMNPVIEASLEDGTGKSGTVEEVVVLAVGVVAVKILLLCLCLIILSFHKKKAVRAVEVEENVYAVMG

SEQ ID NO: 320238 - protein, 364 aa, Artificial Sequence
  derived and/or modified sequence
MPLLLLLPLLWAGALAMDPNFWLQVQESVTVQEGLCVLVPCTFFHPIPYYDKNSPVHGYWFREGAIISRDSPVATNKLDQEVQEETQGRFRLLGDPSRNNCSLSIVDARRRDNGSYFFRMERGSTKYSYKSPQLSVHVTDLTHRPKILIPGTLEPGHSKNLTCSVSWACEQGTPPIFSWLSAAPTSLGPRTTHSSVLIITPRPQDHGTNLTCQVKFAGAGVTTERTIQLNVTYVPQNPTTGIFPGDGSGKQETRAGVVHGAIGGAGVTALLALCLCLIFFIVKTHRRKAARTAVGRNDTHPTTGSASPKHQKKSKLHGPTETSSCSGAAPTVEMDEELHYASLNFHGMNPSKDTSTEYSEVRTQ

SEQ ID NO: 320239 - protein, 310 aa, Artificial Sequence
  derived and/or modified sequence
MPLLLLLPLLWAGALAMDPNFWLQVQESVTVQEGLCVLVPCTFFHPIPYYDKNSPVHGYWFREGAIISRDSPVATNKLDQEVQEETQGRFRLLGDPSRNNCSLSIVDARRRDNGSYFFRMERGSTKYSYKSPQLSVHVTDLTHRPKILIPGTLEPGHSKNLTCSVSWACEQGTPPIFSWLSAAPTSLGPRTTHSSVLIITPRPQDHGTNLTCQVKFAGAGVTTERTIQLNVTYVPQNPTTGIFPGDGSGKQETRAGVVHGAIGGAGVTALLALCLCLIFFIVKTHRRKAARTAVGRNDTHPTTGSASPVR

SEQ ID NO: 320240 - DNA, 1466 bp, Artificial Sequence
  derived and/or modified sequence
tctgctcacacaggaagccctggaagctgcttcctcagacatgccgctgctgctactgctgcccctgctgtgggcaggggccctggctatggatccaaatttctggctgcaagtgcaggagtcagtgacggtacaggagggtttgtgcgtcctcgtgccctgcactttcttccatcccataccctactacgacaagaactccccagttcatggttactggttccgggaaggagccattatatccagggactctccagtggccacaaacaagctagatcaagaagtacaggaggagactcagggcagattccgcctccttggggatcccagtaggaacaactgctccctgagcatcgtagacgccaggaggagggataatggttcatacttctttcggatggagagaggaagtaccaaatacagttacaaatctccccagctctctgtgcatgtgacagacttgacccacaggcccaaaatcctcatccctggcactctagaacccggccactccaaaaacctgacctgctctgtgtcctgggcctgtgagcagggaacacccccgatcttctcctggttgtcagctgcccccacctccctgggccccaggactactcactcctcggtgctcataatcaccccacggccccaggaccacggcaccaacctgacctgtcaggtgaagttcgctggagctggtgtgactacggagagaaccatccagctcaacgtcacctatgttccacagaacccaacaactggtatctttccaggagatggctcagggaaacaagagaccagagcaggagtggttcatggggccattggaggagctggtgttacagccctgctcgctctttgtctctgcctcatcttcttcatagtgaagacccacaggaggaaagcagccaggacagcagtgggcaggaatgacacccaccctaccacagggtcagcctccccgaaacaccagaagaagtccaagttacatggccccactgaaacctcaagctgttcaggtgccgcccctactgtggagatggatgaggagctgcattatgcttccctcaactttcatgggatgaatccttccaaggacacctccaccgaatactcagaggtcaggacccagtgaggaacccacaagagcatcaggctcagctagaagatccacatcctctacaggtcggggaccaaaggctgattcttggagatttaacaccccacaggcaatgggtttatagacattatgtgagtttcctgctatattaacatcatcttagactttgcaagcagagagtcgtggaatcaaatctgtgctctttcatttgctaagtgtatgatgtcacacaagctccttaaccttccatgtctccattttcttctctgtgaagtaggtataagaagtcctatctcatagggatgctgtgagcattaaataaaggtacacatggaaaacaccagtc

SEQ ID NO: 320241 - DNA, 1108 bp, Artificial Sequence
  derived and/or modified sequence
tctgctcacacaggaagccctggaagctgcttcctcagacatgccgctgctgctactgctgcccctgctgtgggcaggggccctggctatggatccaaatttctggctgcaagtgcaggagtcagtgacggtacaggagggtttgtgcgtcctcgtgccctgcactttcttccatcccataccctactacgacaagaactccccagttcatggttactggttccgggaaggagccattatatccagggactctccagtggccacaaacaagctagatcaagaagtacaggaggagactcagggcagattccgcctccttggggatcccagtaggaacaactgctccctgagcatcgtagacgccaggaggagggataatggttcatacttctttcggatggagagaggaagtaccaaatacagttacaaatctccccagctctctgtgcatgtgacagacttgacccacaggcccaaaatcctcatccctggcactctagaacccggccactccaaaaacctgacctgctctgtgtcctgggcctgtgagcagggaacacccccgatcttctcctggttgtcagctgcccccacctccctgggccccaggactactcactcctcggtgctcataatcaccccacggccccaggaccacggcaccaacctgacctgtcaggtgaagttcgctggagctggtgtgactacggagagaaccatccagctcaacgtcacctatgttccacagaacccaacaactggtatctttccaggagatggctcagggaaacaagagaccagagcaggagtggttcatggggccattggaggagctggtgttacagccctgctcgctctttgtctctgcctcatcttcttcatagtgaagacccacaggaggaaagcagccaggacagcagtgggcaggaatgacacccaccctaccacagggtcagcctccccggtacgttgaggccaacagatcaggagatgatggccattgaaaagatagtttcttggccgggcacagtgtttcacacctgcaatcccagcacctttggaggccaaggcgggcggatcacgaggtcaggagattgagactatcctg

SEQ ID NO: 320242 - DNA, 1095 bp, Artificial Sequence
  derived and/or modified sequence
atgcctcttcttcttttactgccacttttgtgggccggagccctggccatggaccctaatttctggctccaggtacaggaatctgtgaccgtccaagaagggctgtgcgtgctcgtcccatgtacattcttccaccccattccgtattacgacaagaatagcccggtgcacggctactggtttagagagggcgccatcatttctcgcgattcccctgtggcaacaaataagctggaccaggaggtccaggaagagacccagggcaggtttagactactgggggaccctagtcgcaataactgtagtctgtctattgtggacgcccgccgacgggataacggttcatacttctttcggatggaaaggggcagtacgaagtattcttacaagagtccccaactaagtgtacacgtgacggatctgacacaccggcccaagatcctgatccctggaacactggagccaggacacagcaagaacctcacttgcagcgtctcctgggcctgcgagcaagggaccccaccaattttttcctggctcagcgctgcgcctacttccctcgggccgcgcaccacccacagctccgttctgattattactcctcgcccccaggaccacggtacaaatttgacatgccaggtcaagttcgctggagctggagtcactaccgagagaactatccagctgaacgtgacatacgtcccacaaaacccaacgacaggtatcttccccggcgacggatcagggaagcaggagacccgcgccggtgttgtgcacggcgccatcgggggcgccggtgtgaccgcgctgctggctctctgtctttgtctgattttttttattgtcaaaacccatcgacgcaaggcagccaggacggccgttggaaggaatgatacacacccgacgactggttcggcttcacctaaacatcagaagaagtcaaagctccatggcccaacagagacctcaagctgctctggtgccgctcctaccgtagagatggacgaagagctccactacgctagtttgaattttcacgggatgaatccctccaaggatacaagcactgagtatagcgaggtcaggacgcaatag

SEQ ID NO: 320243 - DNA, 1095 bp, Artificial Sequence
  derived and/or modified sequence
atgcccctgctgctgctgctgcccctgctgtgggccggggccctggccatggaccccaacttctggctgcaggtgcaggagagcgtgacagtgcaggagggcctgtgtgtgctggtgccctgcaccttcttccaccccatcccctactatgacaagaacagccctgtgcacggctactggttccgggagggcgccatcatcagccgggacagccctgtggccaccaacaagctggaccaggaggtgcaggaggagacccagggccgcttccggctgctgggggaccccagcaggaacaactgcagcctgagcatcgtggatgcccggcggcgggacaatggcagctacttcttcaggatggagcggggcagcaccaagtacagctacaagagcccccagctgtctgtgcacgtgacagacctgacccaccggcccaagatcctgatccctggcaccctggagcccggccacagcaagaacctgacctgcagcgtgtcctgggcctgtgagcagggcaccccacccatcttctcctggctgtctgctgcccccaccagcctgggccccaggaccacccacagctctgtgctgatcatcaccccccggccccaggaccacggcaccaacctgacctgccaggtgaagtttgctggagctggggtgaccacagagaggaccatccagctgaatgtgacctacgtgccccagaaccccaccaccggcatcttccctggagatggcagcggcaagcaggagaccagggctggggtggtgcatggagccatcggcggggccggcgtgacagccctgctggccctgtgcctgtgcctgatcttcttcatcgtgaagacccacaggaggaaggccgccaggacagctgtgggcagaaatgacacccaccccaccactggaagtgccagccccaagcaccagaagaagagcaagctgcacggccccacagagaccagcagctgcagcggggccgcccccaccgtggagatggatgaggagctgcactacgccagcctgaacttccacggcatgaaccccagcaaggacaccagcacagagtacagcgaggtgaggacccagtag

SEQ ID NO: 320244 - DNA, 1095 bp, Artificial Sequence
  derived and/or modified sequence
atgcccctgctgctgctgctgcccctgctgtgggccggcgccctggccatggatcccaacttttggctgcaagtacaagagagtgtgacagtgcaggaaggcctgtgcgtcctcgttccctgcacattctttcaccccattccttactacgataaaaattcccctgtgcatggttactggttccgagagggcgccataatttccagggattctccggtcgcgactaacaagctggaccaggaagtgcaagaagagacccagggcaggtttcggttactcggagacccctcccggaacaattgctcacttagtatagtcgacgccaggagacgagataatggatcctattttttcagaatggagaggggatccaccaagtattcatataaatcacctcagttgtccgtgcacgtcaccgatctcactcatagacccaaaattctgattcccggtactctggagcctgggcattccaagaatcttacctgctccgtttcctgggcttgtgagcagggcaccccacccattttctcatggctgtcagccgctcccacctccctaggcccaagaacaacacacagctctgtccttatcattaccccacgtccgcaggaccacgggactaatctcacatgccaggttaagtttgccggcgctggagtaaccactgaaaggactatccagttaaatgtcacatacgtacctcaaaatcctacaactggaattttcccaggtgacggctccggaaagcaggagacaagggccggagttgtgcatggagcaataggtggcgcaggtgttaccgctctgctcgccctgtgtctgtgtctgatcttttttatcgtcaaaacacaccgtaggaaggccgctagaactgccgttggcaggaatgatacccaccccaccaccggcagcgcgagcccaaagcaccagaaaaaaagtaagcttcacggacctacagaaacaagctcctgctcaggtgcagcgccaaccgtcgagatggacgaagagttacactacgcatcccttaacttccatggcatgaatccgtctaaggacacaagcactgaatattccgaggttcgcacacagtag

SEQ ID NO: 320245 - DNA, 1095 bp, Artificial Sequence
  derived and/or modified sequence
atgcccctcttgctgttacttcctctcttatgggcaggcgctctggcgatggaccccaacttttggctgcaggttcaggaaagcgtcaccgtccaggagggcctctgtgtgctggtgccgtgcacgttctttcatcctatcccttattatgacaaaaactctccggtccacggatactggttccgagagggggctataattagtagagactcccctgtggcgacaaataagctggaccaggaagtgcaggaagagacacagggccgattcaggctgctgggagacccatcgcgcaacaactgtagcctttctatcgtcgatgcacgcaggagagataatggaagttacttctttcggatggagcgtggcagtaccaagtacagctataaaagcccgcagctttcagtccatgtgacagatctcactcacagacctaagattctcattcccggaactctcgaaccgggacattctaagaaccttacatgctcagtgtcctgggcgtgtgagcagggaacccctcccatattctcctggttgagcgcagctccaaccagcctcggaccaaggaccacacacagctctgtcttgatcatcaccccaagaccacaggaccacggcaccaatctgacttgccaagtgaaatttgcaggggcaggcgtgaccaccgaacgcaccattcagttaaatgtcacgtatgtgccacagaaccccacaactggaatattccctggtgacggatccggaaagcaggaaacccgcgcaggggtcgttcacggggctatcggaggagccggtgtgacagccttgctcgccttgtgcctctgcctgattttttttatcgtaaaaacccatcggaggaaggcggcaaggactgcagtgggcaggaatgacacacaccctacaacaggttccgctagtcccaagcaccagaaaaagtcaaaactgcacgggccaacagagactagttcatgttccggtgcagctcccaccgtcgaaatggatgaagagcttcactatgcctcactgaattttcatggtatgaatccctcgaaagacaccagcactgaatactctgaggtgcggacgcaatag

SEQ ID NO: 320246 - DNA, 1095 bp, Artificial Sequence
  derived and/or modified sequence
atgcccctgctgctgctgctgcccctgctgtgggccggcgccctggccatggaccccaacttctggctgcaggtgcaggagagcgtgaccgtgcaggagggcctgtgcgtgctggtgccctgcaccttcttccaccccatcccctactacgacaagaacagccccgtgcacggctactggttcagagagggcgccatcatcagcagagacagccccgtggccaccaacaagctggaccaggaggtgcaggaggagacccagggcagattcagactgctgggcgaccccagcagaaacaactgcagcctgagcatcgtggacgccagaagaagagacaacggcagctacttcttcagaatggagagaggcagcaccaagtacagctacaagagcccccagctgagcgtgcacgtgaccgacctgacccacagacccaagatcctgatccccggcaccctggagcccggccacagcaagaacctgacctgcagcgtgagctgggcctgcgagcagggcaccccccccatcttcagctggctgagcgccgcccccaccagcctgggccccagaaccacccacagcagcgtgctgatcatcacccccagaccccaggaccacggcaccaacctgacctgccaggtgaagttcgccggcgccggcgtgaccaccgagagaaccatccagctgaacgtgacctacgtgccccagaaccccaccaccggcatcttccccggcgacggcagcggcaagcaggagaccagagccggcgtggtgcacggcgccatcggcggcgccggcgtgaccgccctgctggccctgtgcctgtgcctgatcttcttcatcgtgaagacccacagaagaaaggccgccagaaccgccgtgggcagaaacgacacccaccccaccaccggcagcgccagccccaagcaccagaagaagagcaagctgcacggccccaccgagaccagcagctgcagcggcgccgcccccaccgtggagatggacgaggagctgcactacgccagcctgaacttccacggcatgaaccccagcaaggacaccagcaccgagtacagcgaggtgagaacccagtag

SEQ ID NO: 320247 - protein, 420 aa, Artificial Sequence
  derived and/or modified sequence
MSPPPLLQPLLLLLPLLNVEPSGATLIRIPLHRVQPGRRILNLLRGWREPAELPKLGAPSPGDKPIFVPLSNYRDVQYFGEIGLGTPPQNFTVAFDTGSSNLWVPSRRCHFFSVPCWLHHRFDPKASSSFQANGTKFAIQYGTGRVDGILSEDKLTIGGIKGASVIFGEALWEPSLVFAFAHFDGILGLGFPILSVEGVRPPMDVLVEQGLLDKPVFSFYLNRDPEEPDGGELVLGGSDPAHYIPPLTFVPVTVPAYWQIHMERVKVGPGLTLCAKGCAAILDTGTSLITGPTEEIRALHAAIGGIPLLAGEYIILCSEIPKLPAVSFLLGGVWFNLTAHDYVIQTTRNGVRLCLSGFQALDVPPPAGPFWILGDVFLGTYVAVFDRGDMKSSARVGLARARTRGADLGWGETAQAQFPG

SEQ ID NO: 320248 - DNA, 1263 bp, Artificial Sequence
  derived and/or modified sequence
atgtctcctcctcccctgctgcagccgttactgctcctgttgcctctgctgaacgtcgagcccagtggagccaccctgattcgtattcctctgcatcgagtgcagcctggcagacggattttgaacctgttaagaggctggagagagcctgctgagcttcccaaactgggggctcccagcccaggcgacaagcctatctttgtccccctcagtaactatagggatgtgcagtattttggtgaaattggactcggcacgcctccccaaaattttaccgtggcgtttgacaccggctccagcaatctgtgggtgccttcacggaggtgccactttttctccgtcccatgttggctccaccataggttcgacccaaaggcgagctcttctttccaggccaacgggaccaaattcgcaatccagtacgggaccggccgagtcgatggcatcctgtctgaggataaactgacaattggtggcatcaagggtgcttccgtgatctttggagaagccctttgggagccctcgttggtcttcgcctttgcccatttcgatgggatcctgggactgggtttccccattttatccgtcgagggtgtgaggcctccaatggacgtgctcgtcgaacaaggactgctcgacaagccagtattctccttctatcttaaccgcgacccagaagaacccgacggaggagaactcgtgctgggtggaagcgatcctgctcattacataccgcctctgacctttgttcctgtgaccgtgccggcttactggcagattcatatggaaagggtgaaagtagggcctggtttaaccctgtgcgcgaaagggtgtgccgctatcttggacactggtacaagcctgatcacaggtcctactgaggagatcagggcactacacgccgctatcggcggtatcccactgctggccggagagtatatcattttatgttccgaaattccaaaactgcccgctgtatcgtttcttttgggcggtgtgtggttcaaccttaccgcccacgactacgtcattcagaccacacgcaacggtgtgcggctttgcctctcagggtttcaggcccttgatgtgcctccaccggctgggcctttttggattctgggcgacgtcttcctcggaacatatgtggccgtctttgacagaggggatatgaaatcctctgctagggtcgggcttgcgcgtgccagaaccaggggcgctgacctggggtggggcgagacggcccaggctcaatttcctggctag

SEQ ID NO: 320249 - DNA, 1263 bp, Artificial Sequence
  derived and/or modified sequence
atgtcgccccctcctctgctgcagcccttgctactacttctacctcttctcaacgttgagccgtcaggcgctacactcattcgaatccctctccatcgggtgcagcccggacgtcggattctgaacctcctgagaggatggcgagagcctgctgaactgccgaaactgggcgctccatctcccggggataagccaatattcgttccgctctccaattatagggacgtgcagtactttggagagattggcctcggtactcccccgcagaatttcactgtggcctttgacacaggctcgtccaatctctgggtcccttcacgacgttgtcattttttttccgtgccgtgctggcttcaccacaggttcgatcccaaagcatcctcttctttccaagccaatggaacaaagttcgctatccagtacgggaccggacgtgtggatggcattctctctgaagacaagctgacaattggcggaattaagggagcatcagtgattttcggcgaagccttgtgggagccctccctcgtctttgctttcgctcattttgatggaattctggggttagggtttccaatcctgagcgtagaaggcgttcggccccctatggatgttcttgtggaacagggattattagataaaccggtattcagcttttacttgaaccgagatccagaggaaccggatggaggcgagctggtgctgggcggaagcgatcctgcccactacattccccccttaaccttcgtcccggtaacagtacctgcctactggcaaatccacatggagagagtcaaggtcgggccagggttgacattatgtgccaaaggctgtgctgccattctcgatacagggacatctctgattacaggccctaccgaagaaataagagccttgcatgccgccattggtgggataccacttctagcgggagagtatatcatcctatgtagtgaaattcccaagctccccgctgtttcattcttgttgggaggtgtgtggttcaacctcactgcccacgattatgtgatacaaacaacacgcaatggagtgcgactgtgcctaagtggattccaggccctggacgtccctccccctgccggtcctttttggatcctgggtgacgtgttcttgggcacttacgtggctgtatttgaccgaggagacatgaagagcagcgcaagggtcgggctggccagagccaggaccaggggcgcggacctggggtggggtgaaaccgctcaagcccagttccccggctag

SEQ ID NO: 320250 - DNA, 1263 bp, Artificial Sequence
  derived and/or modified sequence
atgtccccacccccacttctccagccattactgctgttacttccgctccttaatgtggaacccagcggcgccaccctgattcgaattccactgcaccgcgttcagcccggccgccgcattcttaacctgctaaggggctggcgggaaccagctgagctcccaaaacttggcgccccttctcctggcgataaaccgatcttcgttccattgagcaactacagagacgtgcagtatttcggcgaaattggactcgggacgccgccccagaacttcaccgtagccttcgataccggatcgtccaatttgtgggtcccttctagacgttgtcatttcttcagtgtcccatgttggctccatcacagattcgaccctaaggcgagctcatcattccaggcaaatggaaccaaatttgctatacaatacggcacaggcagagtggatggtatcttgtcagaagataaacttacaattgggggtataaagggcgccagtgtcattttcggcgaagctctatgggagcctagtttagtgtttgcctttgctcacttcgacggtattctcggcttgggttttccgatcctgagcgtggaaggcgtgaggccccccatggatgttcttgtggagcaagggttgctggataagcccgtattttccttttacctcaatcgagatcctgaggagcctgacgggggcgagcttgtgctgggaggatctgatcctgcccattatattccccctcttacattcgtgcccgtgacagtccccgcctattggcaaatccatatggagcgggtcaaagtcggaccagggctgacactttgcgccaagggttgcgctgctatactcgacactggaacctcactcattactggacccaccgaagaaatcagagccctacatgcagctattggtggaatacccctccttgccggagaatatattatcctttgctctgaaatcccaaagttacccgcagtgtctttcctcttgggcggggtgtggttcaaccttactgcacatgattacgtgatccagacaaccaggaatggcgtaagattatgcctgagtggttttcaagccctggatgtacctccccctgccggaccattttggattctcggcgacgtgttccttggcacctacgtagcagtttttgaccggggagatatgaaaagttctgcacgcgtaggtctggctcgggcaaggacgagaggtgcggaccttggatggggtgaaacagcacaagctcaatttccaggatag

SEQ ID NO: 320251 - DNA, 1391 bp, Artificial Sequence
  derived and/or modified sequence
gggaaagaaaatgaggccccaggacacctgggttcacacccaggtccccagcgatgtctccaccaccgctgctgcaacccctgctgctgctgctgcctctgctgaatgtggagccttccggggccacactgatccgcatccctcttcatcgagtccaacctggacgcaggatcctgaacctactgaggggatggagagaaccagcagagctccccaagttgggggccccatcccctggggacaagcccatcttcgtacctctctcgaactacagggatgtgcagtattttggggaaattgggctgggaacgcctccacaaaacttcactgttgcctttgacactggctcctccaatctctgggtcccgtccaggagatgccacttcttcagtgtgccctgctggttacaccaccgatttgatcccaaagcctctagctccttccaggccaatgggaccaagtttgccattcaatatggaactgggcgggtagatggaatcctgagcgaggacaagctgactattggtggaatcaagggtgcatcagtgattttcggggaggctctctgggagcccagcctggtcttcgcttttgcccattttgatgggatattgggcctcggttttcccattctgtctgtggaaggagttcggcccccgatggatgtactggtggagcaggggctattggataagcctgtcttctccttttacctcaacagggaccctgaagagcctgatggaggagagctggtcctggggggctcggacccggcacactacatcccacccctcaccttcgtgccagtcacggtccctgcctactggcagatccacatggagcgtgtgaaggtgggcccagggctgactctctgtgccaagggctgtgctgccatcctggatacgggcacgtccctcatcacaggacccactgaggagatccgggccctgcatgcagccattgggggaatccccttgctggctggggagtacatcatcctgtgctcggaaatcccaaagctccccgcagtctccttccttcttgggggggtctggtttaacctcacggcccatgattacgtcatccagactactcgaaatggcgtccgcctctgcttgtccggtttccaggccctggatgtccctccgcctgcagggcccttctggatcctcggtgacgtcttcttggggacgtatgtggccgtcttcgaccgcggggacatgaagagcagcgcccgggtgggcctggcgcgcgctcgcactcgcggagcggacctcggatggggagagactgcgcaggcgcagttccccgggtgacgcccaagtgaagcgcatgcgcagcgggtggtcgcggaggtcctgctacccagtaaaaatccactatttccattg

SEQ ID NO: 320252 - DNA, 1263 bp, Artificial Sequence
  derived and/or modified sequence
atgagccccccccccctgctgcagcccctgctgctgctgctgcccctgctgaacgtggagcccagcggcgccaccctgatcagaatccccctgcacagagtgcagcccggcagaagaatcctgaacctgctgagaggctggagagagcccgccgagctgcccaagctgggcgcccccagccccggcgacaagcccatcttcgtgcccctgagcaactacagagacgtgcagtacttcggcgagatcggcctgggcacccccccccagaacttcaccgtggccttcgacaccggcagcagcaacctgtgggtgcccagcagaagatgccacttcttcagcgtgccctgctggctgcaccacagattcgaccccaaggccagcagcagcttccaggccaacggcaccaagttcgccatccagtacggcaccggcagagtggacggcatcctgagcgaggacaagctgaccatcggcggcatcaagggcgccagcgtgatcttcggcgaggccctgtgggagcccagcctggtgttcgccttcgcccacttcgacggcatcctgggcctgggcttccccatcctgagcgtggagggcgtgagaccccccatggacgtgctggtggagcagggcctgctggacaagcccgtgttcagcttctacctgaacagagaccccgaggagcccgacggcggcgagctggtgctgggcggcagcgaccccgcccactacatcccccccctgaccttcgtgcccgtgaccgtgcccgcctactggcagatccacatggagagagtgaaggtgggccccggcctgaccctgtgcgccaagggctgcgccgccatcctggacaccggcaccagcctgatcaccggccccaccgaggagatcagagccctgcacgccgccatcggcggcatccccctgctggccggcgagtacatcatcctgtgcagcgagatccccaagctgcccgccgtgagcttcctgctgggcggcgtgtggttcaacctgaccgcccacgactacgtgatccagaccaccagaaacggcgtgagactgtgcctgagcggcttccaggccctggacgtgcccccccccgccggccccttctggatcctgggcgacgtgttcctgggcacctacgtggccgtgttcgacagaggcgacatgaagagcagcgccagagtgggcctggccagagccagaaccagaggcgccgacctgggctggggcgagaccgcccaggcccagttccccggctag

SEQ ID NO: 320253 - DNA, 1263 bp, Artificial Sequence
  derived and/or modified sequence
atgagtccaccccccctgctgcaacctcttctcctcctcctgcctctgctgaacgtcgagcccagcggtgccacactaatccgcatcccgttacatagggtgcagccaggcagacgtatattaaatcttcttaggggctggcgtgagccagcagaactgccaaagctgggagctcccagccctggggacaagccaatctttgtgcctctttcaaattacagggatgtgcagtacttcggagaaattggtctggggacaccacctcagaactttaccgtagctttcgacactggttcctcgaatctgtgggttccctctagacgttgtcacttttttagtgttccatgttggctgcatcacaggtttgatcccaaggccagctcctcttttcaagctaatgggaccaagttcgccatccagtatgggacaggacgtgttgacggtatcctcagtgaggacaaattaactatcggtggaatcaaaggcgcatctgtaattttcggcgaagccctctgggagccaagtttagttttcgctttcgcccacttcgatggcatcctggggctcggattccccatactgtccgtcgagggggtcaggccaccgatggatgtgctggtagagcagggtctgctggacaagcccgtattcagcttctatctcaacagggaccctgaggaacccgatggcggggagctggtcctgggcggctccgaccctgcgcactacattccccccctgacgtttgtacccgtgactgtgccagcgtactggcagattcacatggaaagggtgaaggtgggacccggcttgaccttgtgtgcgaagggctgtgccgccatactcgataccggcactagcctgattacgggtccaacagaggagatcagggccctacatgccgcaatcggtgggattcctttgctggcgggagagtatataatcctctgttctgaaattccaaaactgccagccgtctccttccttctcggaggcgtctggtttaaccttacggcccacgactatgtgattcagacaacgagaaatggggtacggctgtgtctgagtggcttccaagccctcgacgtcccgccacccgctggtccattttggattctcggggacgtgttcctgggcacttatgtggctgtgtttgaccggggtgacatgaagagttcggcgcgagtgggcctggcaagggccaggacccggggtgctgacttaggatggggcgagacagcacaggcacagtttcctggctag

SEQ ID NO: 320254 - DNA, 1263 bp, Artificial Sequence
  derived and/or modified sequence
atgagccccccacccctgctgcagcccctgctgctgctgctgcccctgctgaatgtggagcccagcggggccaccctcatccgcatccccctgcaccgggtgcagcccggccgccgcatcctgaacctgctgcggggctggagggagcctgctgagctgcccaagctgggcgcccccagccctggggacaagcccatctttgtgcccctgagcaactacagagatgtgcagtactttggagagatcggcctgggcaccccaccccagaacttcaccgtggcctttgacaccggcagcagcaacctgtgggtgcccagccgccgctgccacttcttctctgtgccctgctggctgcaccacagatttgaccccaaggccagcagcagcttccaggccaacggcaccaagtttgccatccagtatggaacaggccgggtggatggcatcctgtctgaggacaagctgaccatcggcggcatcaagggggccagcgtcatctttggagaggccctgtgggagcccagcctggtgtttgcctttgcccactttgatggcatcctgggcctgggcttccccatcctgtctgtggagggcgtgcggccccccatggatgtgctggtggagcagggcctgctggacaagcctgtgttctccttctacctgaacagagatcctgaggagccagatggaggagagctggtgctgggcggcagtgaccctgcccactacatcccccccctgacctttgtgcctgtgacagtgcctgcctactggcagatccacatggagcgggtgaaggtgggccctggcctgaccctgtgtgccaagggctgtgccgccatcctggacaccggcaccagcctcatcaccggccccacagaggagatccgggccctgcatgctgccatcggcggcatccccctgctggccggggagtacatcatcctgtgcagcgagatccccaagctgcctgctgtgtccttcctgctgggcggcgtgtggttcaacctgacagcccatgactatgtgatccagaccaccagaaatggagtgcggctgtgcctgagcggcttccaggccctggatgtgcccccacctgctggccccttctggatcctgggagatgtgttcctgggcacctacgtggccgtgtttgacagaggagacatgaagagcagcgcccgggtgggcctggcccgggcccggaccagaggagctgacctgggctggggcgagacagcccaggcccagtttcctggatag

SEQ ID NO: 320255 - DNA, 1263 bp, Artificial Sequence
  derived and/or modified sequence
atgagccccccccccctgctgcagcccctgctgctgctgctgccccttctgaacgtggaacctagcggtgcgacgctgatcagaatccctctgcacagggtgcagcccgggcgaagaatcctgaatttgctccgcggctggagagaacccgccgagttgcctaagctcggagcgcccagccccggagacaagcccatttttgttcctctatcaaactaccgggacgtgcagtacttcggcgagatcggactgggaactccgccacagaacttcactgtggccttcgatactgggtctagcaatttgtgggtaccctcccggaggtgtcacttttttagtgttccatgctggctccatcatcggttcgatcctaaagcctcgagcagcttccaagccaacggcacaaagttcgcaatccagtacggcaccgggcgtgtggacgggattctgagtgaagacaagctgacaatcggaggaatcaaaggggctagcgtaattttcggggaggctctctgggagccttcactcgttttcgccttcgctcatttcgacggaatcctcggactaggttttcccatcttaagcgtggaaggggtccggccacccatggatgtattggtggagcagggactgctagacaagcccgtcttttcattctacctgaacagagaccctgaggagccagacgggggtgagctggtgttagggggtagcgacccagcacactatattcctcctctcaccttcgtgcctgtgacggttcctgcatattggcaaattcacatggagagggttaaggttggacccggccttaccctgtgtgctaaagggtgtgcggccatcctcgacactgggacctcactgattacggggccgaccgaggagatacgcgcactgcacgctgctattggcggcattcccttactggcaggggagtatattattctttgctccgagattccaaaactgccagcggtgtccttcctgttaggaggagtgtggttcaatctgacagcgcatgactacgttatccagacgaccagaaatggagtacgattgtgcctcagcgggtttcaagcgctggacgttcctcctcccgccggtcccttctggatactgggcgatgtgtttctcggaacttatgtagctgtcttcgatcgcggcgacatgaaatcatccgccagggtgggactggcccgcgctcgaacaaggggcgcagacctgggatggggcgagacagcccaggcacagttccctgggtag

SEQ ID NO: 320256 - RNA, 1263 nt, Artificial Sequence
  derived and/or modified sequence
augucgcccccuccucugcugcagcccuugcuacuacuucuaccucuucucaacguugagccgucaggcgcuacacucauucgaaucccucuccaucgggugcagcccggacgucggauucugaaccuccugagaggauggcgagagccugcugaacugccgaaacugggcgcuccaucucccggggauaagccaauauucguuccgcucuccaauuauagggacgugcaguacuuuggagagauuggccucgguacucccccgcagaauuucacuguggccuuugacacaggcucguccaaucucugggucccuucacgacguugucauuuuuuuuccgugccgugcuggcuucaccacagguucgaucccaaagcauccucuucuuuccaagccaauggaacaaaguucgcuauccaguacgggaccggacguguggauggcauucucucugaagacaagcugacaauuggcggaauuaagggagcaucagugauuuucggcgaagccuugugggagcccucccucgucuuugcuuucgcucauuuugauggaauucugggguuaggguuuccaauccugagcguagaaggcguucggcccccuauggauguucuuguggaacagggauuauuagauaaaccgguauucagcuuuuacuugaaccgagauccagaggaaccggauggaggcgagcuggugcugggcggaagcgauccugcccacuacauuccccccuuaaccuucgucccgguaacaguaccugccuacuggcaaauccacauggagagagucaaggucgggccaggguugacauuaugugccaaaggcugugcugccauucucgauacagggacaucucugauuacaggcccuaccgaagaaauaagagccuugcaugccgccauuggugggauaccacuucuagcgggagaguauaucauccuauguagugaaauucccaagcuccccgcuguuucauucuuguugggaggugugugguucaaccucacugcccacgauuaugugauacaaacaacacgcaauggagugcgacugugccuaaguggauuccaggcccuggacgucccucccccugccgguccuuuuuggauccugggugacguguucuugggcacuuacguggcuguauuugaccgaggagacaugaagagcagcgcaagggucgggcuggccagagccaggaccaggggcgcggaccugggguggggugaaaccgcucaagcccaguuccccggcuag

SEQ ID NO: 320257 - RNA, 1263 nt, Artificial Sequence
  derived and/or modified sequence
auguccccacccccacuucuccagccauuacugcuguuacuuccgcuccuuaauguggaacccagcggcgccacccugauucgaauuccacugcaccgcguucagcccggccgccgcauucuuaaccugcuaaggggcuggcgggaaccagcugagcucccaaaacuuggcgccccuucuccuggcgauaaaccgaucuucguuccauugagcaacuacagagacgugcaguauuucggcgaaauuggacucgggacgccgccccagaacuucaccguagccuucgauaccggaucguccaauuugugggucccuucuagacguugucauuucuucagugucccauguuggcuccaucacagauucgacccuaaggcgagcucaucauuccaggcaaauggaaccaaauuugcuauacaauacggcacaggcagaguggaugguaucuugucagaagauaaacuuacaauuggggguauaaagggcgccagugucauuuucggcgaagcucuaugggagccuaguuuaguguuugccuuugcucacuucgacgguauucucggcuuggguuuuccgauccugagcguggaaggcgugaggccccccauggauguucuuguggagcaaggguugcuggauaagcccguauuuuccuuuuaccucaaucgagauccugaggagccugacgggggcgagcuugugcugggaggaucugauccugcccauuauauucccccucuuacauucgugcccgugacaguccccgccuauuggcaaauccauauggagcgggucaaagucggaccagggcugacacuuugcgccaaggguugcgcugcuauacucgacacuggaaccucacucauuacuggacccaccgaagaaaucagagcccuacaugcagcuauugguggaauaccccuccuugccggagaauauauuauccuuugcucugaaaucccaaaguuacccgcagugucuuuccucuugggcggggugugguucaaccuuacugcacaugauuacgugauccagacaaccaggaauggcguaagauuaugccugagugguuuucaagcccuggauguaccucccccugccggaccauuuuggauucucggcgacguguuccuuggcaccuacguagcaguuuuugaccggggagauaugaaaaguucugcacgcguaggucuggcucgggcaaggacgagaggugcggaccuuggauggggugaaacagcacaagcucaauuuccaggauag

SEQ ID NO: 320258 - DNA, 642 bp, Artificial Sequence
  derived and/or modified sequence
atggggattgcgctgctgggatgcgttggcgctctcaaggagctgcgatgcttactgggcctgtactttggtatgctcttgttgctgttcgccacacagattacgcttgggattctgatttccacacagcgtgcccagctggaacggtcccttagggacgttgtggaaaaaactattcaaaagtacggaacaaatcctgaggaaacagctgctgaggaaagctgggactacgtgcagtttcaactccgttgctgtggatggcattaccctcaggactggtttcaggttctgattctgcgaggcaacggctccgaggcccacagggttccctgtagctgctacaatctgtcggctaccaacgactcaactatactggacaaagtgatactgcctcaacttagtagacttgggcatttggcacgtagcagacattctgctgatatctgcgcggttcccgccgagtcgcatatctatagagaagggtgcgcacagggtctgcaaaaatggctgcacaataatttaatcagcatcgtaggaatctgtctaggcgtcgggctactggaactcggtttcatgaccctctccattttcctgtgtcgaaatttggaccacgtgtacaatagactggcccgatacagatag

SEQ ID NO: 320259 - DNA, 642 bp, Artificial Sequence
  derived and/or modified sequence
atgggcatcgccctgctgggctgtgtgggcgccctgaaggagctgcgctgcctgctgggcctgtacttcggcatgctgctgctgctgtttgccacccagatcaccctgggcatcctgatcagcacccagagggcccagctggagaggagcctgagagatgtggtggagaagaccatccagaagtatggcaccaaccctgaggagacagctgctgaggagagctgggactatgtgcagttccagctgcgctgctgcggctggcactacccccaggactggttccaggtgctgatcctgcggggaaatggcagcgaggcccaccgggtgccctgcagctgctacaacctgagcgccaccaatgacagcaccatcctggacaaggtgatcctgccccagctgagccggctgggccacctggcccggagccgccacagcgctgacatctgtgctgtgcctgctgagagccacatctaccgggagggctgtgcccagggcctgcagaagtggctgcacaacaacctgatcagcatcgtgggcatctgcctgggcgtgggcctgctggagctgggcttcatgaccctgagcatcttcctgtgcaggaacctggaccacgtgtacaaccggctggcccgctacagatag

SEQ ID NO: 320260 - DNA, 642 bp, Artificial Sequence
  derived and/or modified sequence
atgggcatcgccctgctgggctgcgtgggcgccctgaaggagctgaggtgcttgctgggactgtatttcggcatgctcctcctactatttgctacgcagatcaccttaggtatcctgatcagtactcagcgagcccagctggagagatcactgcgggacgtcgtggaaaaaacaatccagaaatacgggacaaatccagaggagactgccgcagaggagtcctgggattatgttcagtttcagctccgctgctgtggctggcattacccacaggactggtttcaagtgctcatcctgagaggaaatgggagtgaggcccaccgcgttccttgctcctgttacaatctgtctgccacaaatgacagcacaattcttgacaaggtgattctgcctcaattgtctcggctcggtcacctcgccaggagccgacacagcgctgacatctgcgcagtgcccgcggaaagtcatatctatcgggagggttgcgcccagggcctacaaaagtggctgcacaacaatctgatctctatcgtgggcatctgcctgggcgtgggcctgctcgagctgggttttatgacactgtccatcttcttgtgccgcaatctcgaccacgtgtataacaggcttgcaaggtaccggtag

SEQ ID NO: 320261 - DNA, 642 bp, Artificial Sequence
  derived and/or modified sequence
atgggtatcgcgcttttaggatgtgttggagccctgaaggagctcagatgcctgctgggcctctacttcggcatgcttctgcttcttttcgccacacaaatcacgttaggcatcctcatctcaacacaaagagcccaactcgaaaggtcattgagagatgtcgtcgagaagaccatccagaagtacggcaccaaccccgaagaaacagccgctgaggaaagctgggattacgttcaattccaattacgatgttgtggttggcactatccccaagactggttccaggtcctcattctcagaggcaacggcagtgaagcgcaccgcgtgccatgctcgtgctataatctgtctgccaccaacgactctacaatactggataaggtcatccttccacagctgagcagattgggtcatctcgccagaagccggcattcagcagacatctgcgccgtgcccgctgagtcccacatatatagagagggctgcgcccaaggtttgcagaaatggctccacaacaacttgattagtattgtcggcatatgcctgggtgtggggcttcttgagttgggttttatgacactgtcaattttcttgtgcagaaacctggaccatgtgtacaatcggctggcgcgatatcgttag

SEQ ID NO: 320262 - DNA, 1588 bp, Artificial Sequence
  derived and/or modified sequence
atgcccagaggtgggttccagtagatcaggggtccctttagatcccccagcgcctgagacatggagacctgggagggactgccccatgagtccttggtgcccacaaattccaaggcccctcagcacctcttctgtgtggtgagtggaccgcttaccccactaggtgaagatgtcagcccaggagagctgcctcagcctcatcaagtacttcctcttcgttttcaacctcttcttcttcgtcctcggcagcctgatcttctgcttcggcatctggatcctcattgacaagaccagcttcgtgtcctttgtgggcttggccttcgtgcctctgcagatctggtccaaagtcctggccatctcaggaatcttcaccatgggcatcgccctcctgggttgtgtgggggccctcaaggagctccgctgcctcctgggcctgtattttgggatgctgctgctcctgtttgccacacagatcaccctgggaatcctcatctccactcagcgggcccagaaagacacaccgacctggaccaagggagacaggcataaacagctccaaagggaaacacacgggaaaaagagagaacaagagaaagaaatagacgccctgaaagaagagacagagacttatgagccgtagaaatagtggaagaaacagaaagacagacctgaagtacacagagctagccattcagtaaggatttgagactggcccagagatgcacagggcccgcctgaggctggcacagcctgagagggggaggggtggggcggggaagataaggcccagcctcactggtggcctctcagctggagcgaagcttgcgggacgtcgtagagaaaaccatccaaaagtacggcaccaaccccgaggagaccgcggccgaggagagctgggactatgtgcagttccagctgcgctgctgcggctggcactacccgcaggactggttccaagtcctcatcctgagaggtaacgggtcggaggcgcaccgcgtgccctgctcctgctacaacttgtcggcgaccaacgactccacaatcctagataaggtgatcttgccccagctcagcaggcttggacacctggcgcggtccagacacagtgcagacatctgcgctgtccctgcagagagccacatctaccgcgagggctgcgcgcagggcctccagaagtggctgcacaacaaccttatttccatagtgggcatttgcctgggcgtcggcctactcgagctcgggttcatgacgctctcgatattcctgtgcagaaacctggaccacgtctacaaccggctcgctcgataccgttaggccccgccctccccaaagtcccgccccgcccccgtcacgtgcgctgggcacttccctgctgcctgtaaatatttgtttaatccccagttcgcctggagccctccgccttcacattcccctggggacccacgtggctgcgtgcccctgctgctgtcacctctcccacgggacctggggctttcgtccacagcttcctgtccccatctgtcggcctaccaccacccacaagattatttttcacccaaacctcaaataaatcccctgcgtttttggt

SEQ ID NO: 320263 - DNA, 642 bp, Artificial Sequence
  derived and/or modified sequence
atgggcatcgccctgctgggctgcgtgggcgccctgaaggagctgagatgcctgctgggcctgtacttcggcatgctgctgctgctgttcgccacccagatcaccctgggcatcctgatcagcacccagagagcccagctggagagaagcctgagagacgtggtggagaagaccatccagaagtacggcaccaaccccgaggagaccgccgccgaggagagctgggactacgtgcagttccagctgagatgctgcggctggcactacccccaggactggttccaggtgctgatcctgagaggcaacggcagcgaggcccacagagtgccctgcagctgctacaacctgagcgccaccaacgacagcaccatcctggacaaggtgatcctgccccagctgagcagactgggccacctggccagaagcagacacagcgccgacatctgcgccgtgcccgccgagagccacatctacagagagggctgcgcccagggcctgcagaagtggctgcacaacaacctgatcagcatcgtgggcatctgcctgggcgtgggcctgctggagctgggcttcatgaccctgagcatcttcctgtgcagaaacctggaccacgtgtacaacagactggccagatacagatag

SEQ ID NO: 320264 - DNA, 602 bp, Artificial Sequence
  derived and/or modified sequence
cacttacgcggagcggtaatgtgaggaagcctcccgccaaacagatgagggaggaggaggaggggagaggccagagagagaagcggctttcgggaaggaaagtgtgatctagtaggtggaatagtcctctccaaactttgacctgaggtgtgactattgaatgaccctctatttggatttggattacacaaagtttaacgttttttggaaaaatcctacctaggtaatgtgtagttctcaatgcatcatgtcaggcagcttatgatgccaatttgtcccatggccttaaattccacaacctcatcatctaccacctttggtgctttcagaatcatgactctcaatgttgaagaatgggctactgcatggaaggtgctgatccttttagaggcagccgtggaagaggaaaagagatcagaagagaaaaggatattggtttgcggaacatgtgggacaagaagttcccagaagaatttgtgagcaacttcccgacagtaaggccctggctagacctcaggatggtccctgcctcctggacattaggaagcccaaaggccagaacaaaaacacatgcctagtgggggaaggctcactaagagggc

SEQ ID NO: 320265 - DNA, 333 bp, Artificial Sequence
  derived and/or modified sequence
atggaaaacgaactattttgctctggagtcctggtgcacccgcagtgggtgctttccgcggcccattgtttccagaacagctacaccataggcctcggactccacagcctggaagcagaccaggaacctgggtcccagatggtggaagccagccttagtgtcagacacccagaatataaccgccccttgctggccaatgacctgatgctaatcaagctggacgagtccgtcagcgagagcgatacaatccgcagtatctcaatcgcctcgcagtgccctacagccggcaatagctgtttagtgagcggatgggggctgctggctaatggatag

SEQ ID NO: 320266 - DNA, 481 bp, Artificial Sequence
  derived and/or modified sequence
atggaaaacgaattgttctgctcgggcgtcctggtgcatccgcagtgggtgctgtcagccgcacactgtttccagaactcctacaccatcgggctgggcctgcacagtcttgaggccgaccaagagccagggagccagatggtggaggccagcctctccgtacggcacccagagtacaacagacccttgctcgctaacgacctcatgctcatcaagttggacgaatccgtgtccgagtctgacaccatccggagcatcagcattgcttcgcagtgccctaccgcggggaactcttgcctcgtttctggctggggtctgctggcgaacgggtgactctggggggcccctgatctgcaacgggtacttgcagggccttgtgtctttcggaaaagccccgtgtggccaagttggcgtgccaggtgtctacaccaacctctgcaaattcactgagtggatagagaaaaccgtccaggccagttaa

SEQ ID NO: 320267 - DNA, 333 bp, Artificial Sequence
  derived and/or modified sequence
atggagaatgaactcttctgcagcggcgtgctggtgcacccccagtgggtgctgtctgctgcccactgcttccagaacagctacaccatcggcctgggcctgcacagcctggaggccgaccaggagcccggcagccagatggtggaggccagcctgtctgtgcgccaccctgagtacaaccggcccctgctggccaatgacctgatgctgatcaagctggatgagagcgtgtctgagagtgacaccatccgcagcatcagcatcgccagccagtgccccacagctggcaacagctgcctggtgtctggctggggcctgctggccaatggatag

SEQ ID NO: 320268 - DNA, 333 bp, Artificial Sequence
  derived and/or modified sequence
atggagaacgagctgttctgcagcggcgtgctggtgcacccccagtgggtcttaagcgccgcccattgtttccagaactcctatacaattgggctgggcctgcatagccttgaggccgatcaagaaccaggtagccaaatggtggaggcttcactgtctgtaagacaccccgagtacaatcgaccccttttggccaacgacctgatgctgatcaaactcgatgagtctgttagcgaatccgacaccatcagatctatcagcattgcttcgcagtgccccacagcggggaatagttgtctggtgtcgggctggggactcctggctaacggctag

SEQ ID NO: 320269 - DNA, 333 bp, Artificial Sequence
  derived and/or modified sequence
atggaaaacgagctgttttgcagtggcgtcttggtacatccccaatgggttttgtctgccgcacactgttttcagaatagttacacaatcgggctgggcctacattcccttgaagcagatcaggagccagggtcacagatggttgaggccagcctgtcagtaagacaccccgaatacaatagacctctgctcgccaatgaccttatgctgattaagctggacgaaagtgtcagcgagtctgataccatacgatccatttccatcgcttctcaatgccccacggctggcaattcctgtctggtgagcggttggggactgttggctaacggctag

SEQ ID NO: 320270 - DNA, 333 bp, Artificial Sequence
  derived and/or modified sequence
atggagaacgagctgttctgcagcggcgtgctggtgcacccccagtgggtgctgagcgccgcccactgcttccagaacagctacaccatcggcctgggcctgcacagcctggaggccgaccaggagcccggcagccagatggtggaggccagcctgagcgtgagacaccccgagtacaacagacccctgctggccaacgacctgatgctgatcaagctggacgagagcgtgagcgagagcgacaccatcagaagcatcagcatcgccagccagtgccccaccgccggcaacagctgcctggtgagcggctggggcctgctggccaacggctag

SEQ ID NO: 320271 - protein, 110 aa, Artificial Sequence
  derived and/or modified sequence
MENELFCSGVLVHPQWVLSAAHCFQNSYTIGLGLHSLEADQEPGSQMVEASLSVRHPEYNRPLLANDLMLIKLDESVSESDTIRSISIASQCPTAGNSCLVSGWGLLANG

SEQ ID NO: 320272 - protein, 652 aa, Artificial Sequence
  derived and/or modified sequence
MINAQELLTLEDVTVEFTWEEWQLLGPFQKDLYRDVMLEIYSNLLSMGYQVSKPDALSKLERGEEPWTMEDERHSRICPENNEVDDHLQDHLENQRMLKSVEQYHEHNAFGNTASQTKSLCLFRENHDTFELYIKTLKSNLSLVNQNKSCEINNSTKFSGDGKSFLHGNYEELYSAAKFSVSTKANSTKSQVSKHQRTHEIEKNHVCSECGKAFVKKSQLTDHERVHTGEKPYGCTLCAKVFSRKSRLNEHQRIHKREKSFICSECGKVFTMKSRLIEHQRTHTGEKPYICNECGKGFPGKRNLIVHQRNHTGEKSYICSECGKGFTGKSMLIIHQRTHTGEKPYICSECGKGFTTKHYVIIHQRNHTGEKPYICNECGKGFTMKSRMIEHQRTHTGEKPYICSECGKGFPRKSNLIVHQRNHTVEKSYLCSECGKGFTVKSMLIIHQRTHTGEKPYTCSECGKGFPLKSRLIVHQRTHTGEKPYRCSECGKGFIVNSGLMLHQRTHTGEKPYICNECGKGFAFKSNLVVHQRTHTGEKPFMCSECGKGFTMKRYLIVHQQIHTEEKSCICSECGRGFAKETELALHKQVHTGEKPYGCNECGKGFTMKSRLIVHQRTHTGEKPFVCSECRKAFSSKRNLIVHQRTHNGNKP

SEQ ID NO: 320273 - DNA, 2922 bp, Artificial Sequence
  derived and/or modified sequence
aaaagccggaaggccgcattccgctctccatggaaacgcggctgaccgtctctggaggtttagagggggagggagttgggcgaggggcccagaagtggaagaagtttagggaagtaagttcagcttttaagaggtcgcggcgattccaaggagagtcagtccacaggtcctggctaccctgggaagagacaagaagtaaatgaagaaagaggaagattccaggacctagatatgatttctgtggacacccttcactggtgactgaagtttctaaatagaaatttaaggcagatccagaggagacaaagacagagtatcccaggtgctggccatttcccacaacagaagaaaatgatcaatgcccaggaattgctgacactggaggatgttactgtggagttcacctgggaggagtggcagctcctgggcccttttcagaaggatttgtaccgggatgtgatgttggagatctacagcaacctgctatcaatgggttatcaagtcagcaaaccagatgcactctccaagttggaacgaggagaagaaccatggacaatggaagatgaaaggcacagtcgaatctgtccagaaaacaacgaagttgatgatcatctgcaggatcacttggaaaatcaaaggatgctgaagagtgtggaacaataccatgaacataatgcatttggaaatactgcctctcaaaccaaaagcctttgtcttttcagggaaaatcatgatacatttgagttatatataaaaactttgaaatcaaatttaagtttagtcaaccagaacaaaagctgtgaaattaacaactctactaaatttagtggagatgggaaatcatttcttcatggtaactatgaagaactttattctgcagctaaattctctgtaagtacaaaagccaatagcactaaatcccaagtcagtaagcatcagagaactcatgaaatagaaaaaaaccacgtatgcagtgaatgtgggaaagcgtttgtcaagaagtctcagctcactgatcatgagagagttcatacaggagaaaaaccttatggatgtactttgtgtgcaaaagtgttctccagaaagtccaggctaaatgaacatcaaagaattcataaaagagagaaatcttttatatgcagtgaatgtggaaaagtcttcactatgaagagccgtctgattgaacatcagcgaactcatactggagagaaaccctacatatgcaatgaatgtggaaaaggcttcccaggcaagcgtaatctcattgtacatcagcgaaatcatactggagagaaatcctatatatgtagtgaatgtggaaaaggcttcactgggaagagcatgcttattatacatcagcgaactcatacaggagagaagccctacatctgtagtgaatgtgggaaaggcttcaccacaaaacactatgtcatcatacatcaacgaaatcatacaggagagaaaccatatatatgcaatgaatgtgggaaaggcttcaccatgaagagccgtatgatcgaacatcaacgaactcatacaggagagaaaccctacatatgcagtgaatgtggaaaaggctttcccaggaagagtaatcttattgtacatcagagaaatcatacagtagagaagtcatatctatgtagtgaatgtggaaaaggttttactgtgaaaagcatgctcatcatacatcagcgaactcatacaggagagaagccctacacatgcagtgaatgtgggaaaggcttccccttgaagagtcggctgattgtacatcagcgaactcatactggagagaaaccttacaggtgcagtgaatgtgggaaaggtttcattgtgaatagcggactgatgttacatcagcgaactcatactggagagaaaccgtacatatgcaatgaatgtggaaaaggttttgcctttaagagcaatcttgttgtacaccagcgaactcatactggagagaaaccctttatgtgcagtgaatgtggaaaaggcttcaccatgaaacgctatctcattgtacatcagcaaattcatacagaagagaaatcttgtatatgtagtgaatgtggaagaggctttgccaaggaaacagagcttgctttacataagcaagttcatactggagaaaaaccttatggatgtaatgaatgtggtaaaggcttcactatgaagagccgtctaattgttcatcaacgaactcatacaggagagaaaccctttgtatgcagtgaatgtagaaaagccttctcctcaaagagaaatctcattgtacatcagcgaactcataatggaaacaaaccctgacaatgcagtggacatgttcatgcctttgggaagaaaatctgccttgtacaacatcagagatttcacagtatagattttctacatgtgtactgagtatgaaaaatcatatttcaaaatccagtgttattcactaggatgaatgctatcaatgtcagaaaggcttcaacatgaattcaggctctgaattctttgatgtaccaatgtatagaaaattactcatctgagagagagtctgtggattgggggtaacctttcatttgtcaaccttcattaaaactatgacaacgtccacatgacaaatgtgtaaggtacatagtccttttgcagagaatctgaactgattacatacaaacaaattcatgcagagagaaaaccacgttagtaatgtgaactgattaaacagcagtgtgctcctagcatacatgcatataggcagtgtagagcagcctgttgctagattttcacccttggaagacaatgcaatttccaggagcgaattttaatgaatgcagagaatgcactagtgccttcggtgattaattacctcatattttatgtcacaataaacatgtaggaaataaacttgatacatccaatgcagaaaagtcttga

SEQ ID NO: 320274 - DNA, 1959 bp, Artificial Sequence
  derived and/or modified sequence
atgatcaacgcccaggagctgctgaccctggaggacgtgaccgtggagttcacctgggaggagtggcagctgctgggccccttccagaaggacctgtacagagacgtgatgctggagatctacagcaacctgctgagcatgggctaccaggtgagcaagcccgacgccctgagcaagctggagagaggcgaggagccctggaccatggaggacgagagacacagcagaatctgccccgagaacaacgaggtggacgaccacctgcaggaccacctggagaaccagagaatgctgaagagcgtggagcagtaccacgagcacaacgccttcggcaacaccgccagccagaccaagagcctgtgcctgttcagagagaaccacgacaccttcgagctgtacatcaagaccctgaagagcaacctgagcctggtgaaccagaacaagagctgcgagatcaacaacagcaccaagttcagcggcgacggcaagagcttcctgcacggcaactacgaggagctgtacagcgccgccaagttcagcgtgagcaccaaggccaacagcaccaagagccaggtgagcaagcaccagagaacccacgagatcgagaagaaccacgtgtgcagcgagtgcggcaaggccttcgtgaagaagagccagctgaccgaccacgagagagtgcacaccggcgagaagccctacggctgcaccctgtgcgccaaggtgttcagcagaaagagcagactgaacgagcaccagagaatccacaagagagagaagagcttcatctgcagcgagtgcggcaaggtgttcaccatgaagagcagactgatcgagcaccagagaacccacaccggcgagaagccctacatctgcaacgagtgcggcaagggcttccccggcaagagaaacctgatcgtgcaccagagaaaccacaccggcgagaagagctacatctgcagcgagtgcggcaagggcttcaccggcaagagcatgctgatcatccaccagagaacccacaccggcgagaagccctacatctgcagcgagtgcggcaagggcttcaccaccaagcactacgtgatcatccaccagagaaaccacaccggcgagaagccctacatctgcaacgagtgcggcaagggcttcaccatgaagagcagaatgatcgagcaccagagaacccacaccggcgagaagccctacatctgcagcgagtgcggcaagggcttccccagaaagagcaacctgatcgtgcaccagagaaaccacaccgtggagaagagctacctgtgcagcgagtgcggcaagggcttcaccgtgaagagcatgctgatcatccaccagagaacccacaccggcgagaagccctacacctgcagcgagtgcggcaagggcttccccctgaagagcagactgatcgtgcaccagagaacccacaccggcgagaagccctacagatgcagcgagtgcggcaagggcttcatcgtgaacagcggcctgatgctgcaccagagaacccacaccggcgagaagccctacatctgcaacgagtgcggcaagggcttcgccttcaagagcaacctggtggtgcaccagagaacccacaccggcgagaagcccttcatgtgcagcgagtgcggcaagggcttcaccatgaagagatacctgatcgtgcaccagcagatccacaccgaggagaagagctgcatctgcagcgagtgcggcagaggcttcgccaaggagaccgagctggccctgcacaagcaggtgcacaccggcgagaagccctacggctgcaacgagtgcggcaagggcttcaccatgaagagcagactgatcgtgcaccagagaacccacaccggcgagaagcccttcgtgtgcagcgagtgcagaaaggccttcagcagcaagagaaacctgatcgtgcaccagagaacccacaacggcaacaagccctag

SEQ ID NO: 320275 - DNA, 1959 bp, Artificial Sequence
  derived and/or modified sequence
atgattaacgcacaggagctgttaacactggaagacgtcactgttgagttcacttgggaggagtggcagctgctggggccttttcagaaagatctgtacagggatgtgatgttggagatctacagcaatctactgtctatgggctaccaggtgagcaagcccgacgccttaagtaaactcgaaagaggggaggaaccctggacaatggaagacgaacgccatagccgcatttgtccagagaacaatgaagttgacgaccatcttcaggatcatctggagaaccaaaggatgctgaaatctgtggagcagtaccacgagcacaacgcatttggtaacaccgcttctcagacaaaatctctctgcctttttagagagaaccacgatacctttgagctctacatcaaaaccctgaagagcaatctcagcctggtgaatcaaaacaagagttgtgaaataaacaactctaccaagttctccggagacggaaagtccttcctccatggaaactacgaggaactctattccgccgctaagttcagcgtctctaccaaggccaactccaccaagagccaagtcagcaaacatcagcggacccatgagattgaaaaaaatcacgtgtgctctgaatgcggtaaagcatttgtgaagaaatcccagttgaccgaccacgaaagagtccacactggcgagaaaccatacggatgcacgttgtgcgccaaagtcttctcccgaaaaagtagactgaacgagcatcaaaggatacataagagagagaagagcttcatttgtagtgaatgcgggaaggtgtttacaatgaagagtagactcatcgaacatcaaaggacacacacgggtgaaaagccctacatatgcaatgagtgcggcaagggcttccccggtaagcggaatctgatcgtacaccagcgaaatcataccggtgagaagtcttacatttgttccgagtgtggtaaaggatttacgggcaagtcaatgttgatcattcatcaacgcactcacaccggcgaaaagccttacatctgctcagagtgtggcaagggctttaccactaagcactatgttatcatccaccagcgaaatcacacgggagagaaaccttatatctgcaacgaatgcggaaagggatttaccatgaaatccagaatgatcgagcaccagaggacccacactggggaaaagccatacatctgttcagagtgcggaaagggattccccagaaaatctaacctcatcgtacatcagcgtaatcatacggtcgagaagtcgtatctatgttctgagtgcggaaaggggtttaccgttaagtcgatgctaatcatccaccagaggacccatacgggggaaaagccttatacttgcagcgaatgtggtaagggctttccgctcaagtcccgacttatcgtacaccagcgcactcatactggtgaaaaaccttatcgctgcagtgagtgcgggaagggcttcatcgtgaactcaggactgatgttacaccaacggacacacacaggcgaaaaaccctacatctgcaatgaatgtggcaagggtttcgcctttaaaagcaacttggtggtgcaccagagaacccacaccggagagaagccattcatgtgcagcgagtgtgggaagggattcacaatgaagcggtatctgattgtgcaccagcagatccacaccgaagaaaaatcgtgcatatgcagcgaatgcggtcggggctttgcaaaagaaacagaacttgcgctccacaagcaggttcacaccggagaaaagccctacgggtgtaatgagtgtgggaaagggtttaccatgaagtcccggttgatagtacaccaaagaactcacacgggcgaaaagccatttgtatgtagcgaatgccgtaaagcttttagttctaagcgaaacctcattgttcatcagaggacccacaacggaaataaaccatag

SEQ ID NO: 320276 - DNA, 1959 bp, Artificial Sequence
  derived and/or modified sequence
atgatcaatgcccaggagctgctgaccctggaggatgtgacagtggagttcacctgggaggagtggcagctgctgggccccttccagaaggacctgtacagagatgtgatgctggagatctacagcaacctgctgtccatgggctaccaggtgtccaagccagatgccctgagcaagctggagcggggggaggagccctggaccatggaggatgagcggcacagccgcatctgcccagagaacaatgaggtggatgaccacctgcaggaccacctggagaaccagaggatgctgaagtctgtggagcagtaccacgagcacaatgccttcggcaacacagccagccagaccaagagcctgtgcctcttcagagaaaatcatgacacctttgagctgtacatcaagaccctgaagagcaacctgagcctggtgaaccagaacaagagctgtgagatcaacaacagcaccaagttctctggagatggcaagagcttcctgcacggcaactatgaggagctgtacagcgctgccaagttctctgtgtccaccaaggccaacagcaccaagagccaggtgtccaagcaccagaggacccatgaaattgagaagaaccacgtgtgcagtgaatgtgggaaggcctttgtgaagaagagccagctgacagaccacgagcgggtgcacactggagagaagccctacggctgcaccctgtgtgccaaggtgttcagcaggaagagccggctgaatgagcaccagaggatccacaagcgggagaagagcttcatctgcagtgaatgtgggaaggtgttcaccatgaagagccggctgattgagcaccagaggacccacactggagagaagccctacatctgcaatgaatgtgggaagggcttccctgggaagaggaacctgattgtgcaccagaggaaccacactggagagaagagctacatctgcagtgaatgtgggaagggcttcaccgggaagtccatgctgatcatccaccagaggacccacactggagagaagccctacatctgcagtgaatgtgggaagggcttcaccaccaagcactacgtgatcatccaccagaggaaccacactggagagaagccctacatctgcaatgaatgtgggaagggcttcaccatgaagagcaggatgattgagcaccagaggacccacactggagagaagccctacatctgcagtgaatgtgggaagggcttccccaggaagagcaacctgattgtgcaccagaggaaccacacagtggagaagagctacctgtgcagtgaatgtgggaagggcttcaccgtgaagtccatgctgatcatccaccagaggacccacactggagagaagccctacacctgcagtgaatgtgggaagggcttccccctgaagagccggctgattgtgcaccagaggacccacactggagagaagccctaccgctgcagtgaatgtgggaagggcttcatcgtgaacagcggcctgatgctgcaccagaggacccacactggagagaagccctacatctgcaatgaatgtgggaagggctttgccttcaagagcaacctggtggtgcaccagaggacccacactggagagaagcccttcatgtgcagtgaatgtgggaagggcttcaccatgaagcgctacctgattgtgcaccagcagatccacacagaggagaagagctgcatctgcagtgaatgtggccggggctttgccaaggagacagagctggccctgcacaagcaggtgcacactggagagaagccctacggctgcaatgaatgtgggaagggcttcaccatgaagagccggctgattgtgcaccagaggacccacactggagagaagccctttgtgtgcagtgaatgtaggaaggccttcagcagcaagaggaacctgattgtgcaccagaggacccacaacggcaacaagccctag

SEQ ID NO: 320277 - DNA, 1959 bp, Artificial Sequence
  derived and/or modified sequence
atgatcaacgcccaggagctgctgaccctggaggacgtgaccgtggaatttacctgggaagagtggcagttattgggcccattccagaaggacttgtacagggacgtgatgcttgagatctattccaatctgctctccatgggttatcaagtttctaagcccgacgccttgtccaaattggagcgcggagaggaaccctggacaatggaggacgagcggcactcccgaatttgccccgaaaacaacgaagtggacgatcacctgcaggatcacttagagaaccagaggatgctgaaaagtgtggagcagtaccacgagcacaacgcctttggcaacacagcttcacagaccaaaagtctgtgtctgtttagggagaatcacgacaccttcgaactctatatcaaaacactgaaatccaacctgagtctcgtaaatcagaataagagctgcgagattaataactcaacaaaatttagcggagatgggaaatcttttctgcatggaaattatgaagaactctacagcgcggctaagttttcggtgtctacaaaagccaattccaccaagagtcaggtgtctaaacaccagagaacacatgagatcgagaaaaaccatgtgtgcagcgaatgtgggaaagcgtttgttaagaaatcccagctcactgatcacgagcgtgtccatacgggagagaagccttatggatgtactctctgcgcgaaggtgttttcccgaaagagccgcctgaacgaacaccaacgaatccacaaaagagagaaatctttcatctgttcagaatgcggcaaggttttcacgatgaagagtcgactcatcgaacaccagaggacacacaccggtgagaaaccctatatctgcaacgagtgcgggaaaggctttccgggaaaacggaacctgatcgtgcaccagcgcaatcatacaggagagaaatcctacatctgctctgaatgtgggaaggggttcactggcaagtcaatgctgattattcatcagagaacacacactggtgaaaagccttatatttgcagcgaatgcgggaaaggattcactactaagcactacgttatcattcaccaaaggaatcatactggcgaaaagccctatatttgcaacgagtgcggcaaaggcttcaccatgaaaagtagaatgattgaacatcagcggacgcacaccggcgagaagccgtatatctgctctgaatgtggaaaaggattcccccgtaagtccaatctgattgtgcaccaacgcaaccataccgttgagaaatcttacctctgttctgagtgtggcaaaggatttactgtgaaatcaatgttgatcatccaccaaagaacccatactggagagaaaccttacacctgctccgagtgtgggaaaggcttcccactgaagagccgcttaattgtgcaccagaggacccatacaggagaaaagccttaccggtgctctgagtgcggaaagggattcattgtgaactccgggctcatgttgcaccaacggactcatacaggcgaaaagccttacatatgcaacgagtgtggaaaggggtttgcctttaagtctaatctggttgtccaccagagaacacataccggcgaaaagccctttatgtgctctgaatgcggtaaaggcttcaccatgaaacggtacctgattgtccatcaacaaatccacaccgaagaaaaatcttgtatttgttctgagtgcggacgcggtttcgctaaggaaactgaactcgctctgcacaagcaagttcacactggcgagaagccctacgggtgcaatgaatgcggcaaaggttttactatgaagtctcggctgattgtccatcaacggacacacacaggcgagaaaccgttcgtatgtagtgaatgcagaaaggccttcagcagcaaacgtaacctcattgtccaccagaggacacacaacggaaataagccttag

SEQ ID NO: 320278 - DNA, 1959 bp, Artificial Sequence
  derived and/or modified sequence
atgattaatgcccaggagctgttgaccctcgaagacgtaactgtggaatttacctgggaagagtggcagctgttaggaccatttcagaaagacctgtatcgggatgtgatgcttgaaatctacagcaacctgcttagtatgggctaccaggtcagcaaacctgatgccctgagtaagctggaacgaggagaggagccctggacgatggaagatgagcgacattccaggatctgccctgaaaacaacgaggtggatgaccatttacaggatcatctggagaaccagaggatgctcaaatccgtggagcagtaccatgaacacaatgcttttggaaacaccgccagccagacaaagagcctgtgtctattcagagaaaaccatgataccttcgagttgtatattaaaacattaaaatcaaacctgtccctagttaaccagaacaagagctgcgagattaacaattcaaccaagttttcaggtgatggaaagagcttcctccacggaaactatgaagagctgtattccgccgctaaattttccgtgagcacaaaagcgaatagtaccaagtcccaggtaagtaaacatcagaggacgcacgaaatcgaaaagaatcatgtatgcagcgagtgcgggaaagcctttgtcaaaaagagtcagctgactgaccacgagcgagtccatactggagagaaaccatatggctgtaccctctgcgctaaggtgttttctcggaaatctcgtctgaatgaacatcagcgcattcataagagggagaaaagcttcatttgtagcgagtgcggtaaagtgttcactatgaagtctaggcttatcgagcaccagagaactcacacaggggagaagccctacatctgcaatgaatgcgggaagggatttccaggaaagcgcaacctcattgttcatcagcggaaccacaccggtgagaaatcgtacatatgcagcgagtgtgggaagggatttacaggaaagagtatgctcattatacaccagcgtacacacactggagaaaagccttatatctgttcagagtgcggtaagggttttacaacgaaacactatgtcataatccaccagcgaaaccacacaggcgagaagccgtacatatgcaacgaatgcggcaaggggtttaccatgaaatcccgaatgatcgagcaccagcggactcatactggagagaagccttatatttgtagcgagtgtggtaaaggattcccaagaaaaagcaacttgatcgtccatcagaggaaccataccgtcgagaaaagctatctgtgtagcgaatgcggcaagggctttacagtgaagtccatgttgatcattcatcagcgcacacacaccggcgaaaagccttacacttgctctgagtgtggtaaaggatttcccttgaagtctagactcattgtgcaccagcggacccatacgggggaaaagccataccgctgcagtgagtgcgggaaaggattcatagtgaacagtgggctaatgcttcaccagagaacccatactggtgagaagccctatatttgcaacgagtgcggaaagggtttcgcctttaagtccaacctggtggtacaccagcgaacccacaccggggagaaaccatttatgtgttcagagtgtggaaaaggcttcacaatgaagagatacttaatcgtacatcagcaaatccacactgaagagaagagttgcatctgtagcgagtgcggtagagggttcgccaaagaaactgaactcgccctccacaaacaggtgcataccggcgagaagccatatgggtgtaacgaatgtggaaaagggtttactatgaaaagcaggctgatcgtgcaccagaggacccataccggtgaaaaacctttcgtgtgtagtgagtgccgcaaggctttctcgtccaagcgcaatcttattgtgcaccagcggacacacaacggtaataaaccgtag

SEQ ID NO: 320279 - DNA, 864 bp, Artificial Sequence
  derived and/or modified sequence
atggatgaaattgtaaaaaatatccgggagggaacgcatgtccttcttccattttatgaaacattgccagaacttaatctgtctctaggtaaaagcccattacctagtctggaatacggagctaattactttcttcagatttctagagttaatgatctaaatagaatgccgaccgacatgttaaaactttttacacatgatatcatgttaccagaaagcgatctagataaagtctatgaaattttaaagattaatagcgtaaagtattatgggaggagtactaaagcggacgccgtagttgccgacctcagcgcacgcaataaactgttcaaacgtgaacgagatgctattaaatctaataatcatctcactgaaaacaatctatacattagcgattataagatgttaaccttcgacgtgtttcgaccattatttgattttgtaaacgaaaaatattgtattattaaacttccaactttattcggtagaggtgtaatcgatactatgagaatatattgtagtctctttaaaaatgttagactgctaaaatgcgtaagcgatagctggttaaaagatagcgccattatggtggctagtgatgtttgtaaaaaaaatttggatttatttatgtctcatgttaagtccgtcactaagtcttcttcttggaaggatgtgaacagtgttcaatttagtattttaaacaatccagtggatacggaattcattaataagttcttagagttttcgaatagagtatacgaagctctctattacgttcactcgttgctttattctagtatgacttctgattcaaaaagtatcgaaaacaaacatcagagaagactagttaaactactgctgtga

SEQ ID NO: 320280 - protein, 576 aa, Artificial Sequence
  derived and/or modified sequence
MPPPRTREGRDRRDHHRAPSEEEALEKWDWNCPETRRLLEDAFFREEDYIRQGSEECQKFWTFFERLQRFQNLKTSRKEEKDPGQPKHSIPALADLPRTYDPRYRINLSVLGPATRGSQGLGRHLPAERVAEFRRALLHYLDFGQKQAFGRLAKLQRERAALPIAQYGNRILQTLKEHQVVVVAGDTGCGKSTQVPQYLLAAGFSHVACTQPRRIACISLAKRVGFESLSQYGSQVGYQIRFESTRSAATKIVFLTVGLLLRQIQREPSLPQYEVLIVDEVHERHLHNDFLLGVLQRLLPTRPDLKVILMSATINISLFSSYFSNAPVVQVPGRLFPITVFDVAPPGVRKCILSTNIAETSVTIDGIRFVVDSGKVKEMSYDPQAKLQRLQEFWISQASAEQRKGRAGRTGPGVCFRLYAESDYDAFAPYPVPEIRRVALDSLVLQMKSMSVGDPRTFPFIEPPPPASLETAILYLRDQGALDSSEALTPIGSLLAQLPVDVVIGKMLILGSMFSLVEPVLTIAAALSVQSPFTRSAQSSPECCTPPASSLAAPRCCTHRSWRPATATEAETTRTR

SEQ ID NO: 320281 - DNA, 1731 bp, Artificial Sequence
  derived and/or modified sequence
atgcccccccccagaaccagagagggcagagacagaagagaccaccacagagcccccagcgaggaggaggccctggagaagtgggactggaactgccccgagaccagaagactgctggaggacgccttcttcagagaggaggactacatcagacagggcagcgaggagtgccagaagttctggaccttcttcgagagactgcagagattccagaacctgaagaccagcagaaaggaggagaaggaccccggccagcccaagcacagcatccccgccctggccgacctgcccagaacctacgaccccagatacagaatcaacctgagcgtgctgggccccgccaccagaggcagccagggcctgggcagacacctgcccgccgagagagtggccgagttcagaagagccctgctgcactacctggacttcggccagaagcaggccttcggcagactggccaagctgcagagagagagagccgccctgcccatcgcccagtacggcaacagaatcctgcagaccctgaaggagcaccaggtggtggtggtggccggcgacaccggctgcggcaagagcacccaggtgccccagtacctgctggccgccggcttcagccacgtggcctgcacccagcccagaagaatcgcctgcatcagcctggccaagagagtgggcttcgagagcctgagccagtacggcagccaggtgggctaccagatcagattcgagagcaccagaagcgccgccaccaagatcgtgttcctgaccgtgggcctgctgctgagacagatccagagagagcccagcctgccccagtacgaggtgctgatcgtggacgaggtgcacgagagacacctgcacaacgacttcctgctgggcgtgctgcagagactgctgcccaccagacccgacctgaaggtgatcctgatgagcgccaccatcaacatcagcctgttcagcagctacttcagcaacgcccccgtggtgcaggtgcccggcagactgttccccatcaccgtgttcgacgtggccccccccggcgtgagaaagtgcatcctgagcaccaacatcgccgagaccagcgtgaccatcgacggcatcagattcgtggtggacagcggcaaggtgaaggagatgagctacgacccccaggccaagctgcagagactgcaggagttctggatcagccaggccagcgccgagcagagaaagggcagagccggcagaaccggccccggcgtgtgcttcagactgtacgccgagagcgactacgacgccttcgccccctaccccgtgcccgagatcagaagagtggccctggacagcctggtgctgcagatgaagagcatgagcgtgggcgaccccagaaccttccccttcatcgagccccccccccccgccagcctggagaccgccatcctgtacctgagagaccagggcgccctggacagcagcgaggccctgacccccatcggcagcctgctggcccagctgcccgtggacgtggtgatcggcaagatgctgatcctgggcagcatgttcagcctggtggagcccgtgctgaccatcgccgccgccctgagcgtgcagagccccttcaccagaagcgcccagagcagccccgagtgctgcaccccccccgccagcagcctggccgcccccagatgctgcacccacagaagctggagacccgccaccgccaccgaggccgagaccaccagaaccagatag

SEQ ID NO: 320282 - DNA, 3486 bp, Artificial Sequence
  derived and/or modified sequence
acgagatggctgtgtgcgcaggcgcaagactagcgctcttgggaccggaagttaaggcgttcgcggcgtgtgaatccagggcctgaaaacccagaatgaacttgtgtccatcccagagatcactgcagatgtcatgaggtaccctttgtgtcaccagctcaagcaggcctctggccactttatcatctgtggtggtcctgtgccgtgaccaggaggaaaaattagctctttgaagagaaagtagttctctattgcaggcactggcctcttaaattgttgcaggtggggaatggatgagaatatttgttttgggtgatcagaactgagactcctattgtggattagtaacatgcctcctcctagaacaagggagggcagggatcgccgagaccaccaccgggctcccagcgaggaagaggccttggagaaatgggactggaattgtccagagacgcgtcgcctcttggaagatgccttcttccgtgaagaggattacatccgtcagggttctgaggaatgtcagaagttttggaccttctttgaacgcctgcagagattccagaatctcaagacctccaggaaggaggagaaagaccctggacagcccaagcacagcatcccagcgctggccgacctacctcgcacttacgacccacgttaccgcatcaacctctctgttcttggccctgccacgcggggctctcagggactgggcaggcacttgcccgcggagagagtggctgagttccgccgagccctgttgcactacctggactttggccagaagcaggcatttgggcgtctggccaagctgcagcgtgagcgggcagccctccccatcgcccagtatgggaaccgcatcctgcagacgctgaaggagcaccaggtggtggtagtggccggtgacaccggctgtggcaagtccactcaggtgccccagtacctgctggctgctggcttcagtcatgtggcgtgcacccagccccggcggatcgcctgcatctcactggccaagcgtgtgggctttgagagcctcagtcagtatggctcacaggtcggctaccagatccgctttgagagcacacgttcggcggccaccaagattgtattcctgacagtggggctgctcctgcgacaaatccagcgggaacccagcctgccccagtatgaggtcctgattgtggatgaagtccatgagcggcatctccacaacgatttcctcctgggcgtcctccagcgcctgttgcccacgcggcctgacctcaaggtcatcctcatgtcggccaccatcaacatctcgctcttctccagctatttcagcaatgcccctgtggtacaggtgcctgggaggctgttccccatcacggtatttgatgtggcaccccctggagtccggaaatgcatcctctccaccaacattgctgagacctcagtcaccattgacgggatccgcttcgtagtagattccggaaaggtgaaggagatgagctacgatccgcaggccaagctgcaacggctgcaggagttctggattagtcaggccagcgcagagcagcggaagggccgggcgggccgcacgggccccggagtctgcttccgcctctatgccgaatcggactatgatgccttcgccccctaccccgtcccagaaattcggagggtggccctggactcgttggtgctgcagatgaagagcatgagtgtgggggacccccgaaccttccccttcatcgagcccccaccaccagccagcctggaaaccgccatcctctacctccgggaccagggggccctggacagctcagaggccctcacacccattgggtccctgctagcccagctgcctgtggacgttgtgattgggaagatgctgatcctgggctccatgttcagcctggtggagcctgtgctcaccatcgcagccgcacttagcgtccagtcgcccttcacccgcagcgcccagagcagcccagagtgctgcaccccacctgcgtcttcgctggcagccccgaggtgctgcacgcacaggagctggaggccagcaactgcgacggaagccgagacgacaaggacaagatgagcagcaaacaccagctcctcagcttcgtgtccctgctggagaccaacaagccgtacctggtgaactgcgtccgcatccctgccctccagtccctcctgctttttagccggtctttggacaccaatggtgactgctcccgcctggtggccgatggctggctggagctgcagctagcagacagtgaaagtgccatccgactcctggcggcttccctgcggctccgtgcccgctgggaaagtgccctggaccggcagctggcgcaccaggcccagcagcagctggaggaggaggaggaggatacgccagtcagccccaaggaggtggccaccctgagcaaggaactcctgcaattcacggcatccaagattccttacagcctccggcggctcacagggctagaagtccagaacatgtatgtgggaccccagaccatcccagccaccccccatcttcctggcctctttggcagctccaccctgtccccccaccccacaaaggggggctacgcagtcactgacttcctcacctacaactgcctcacgaatgacacagacctgtacagcgactgtctccgaaccttctggacctgcccccactgtggcctgcatgcgcccctcacgcccctggagcgcatcgcccatgagaacacctgcccccaggccccacaggatgggcccccaggggctgaggaagctgccctcgaaaccctccagaagacatctgtcctgcagaggccctaccactgcgaggcctgcgggaaggacttcctctttacacccacagaggtgctgcgccaccggaagcagcacgtgtgagctgggccaggagccctgcccacctccgtgcagctgacctgccctccagcccaggactaggggcaggactcttgcctgaacccccagcctgggcttagccctgtggtcctgtcccagtgcagagggcctggagcacggattgtgaataaagcctcacatgctgatacacactgttaggcctgcacctgcccatccagaaagcagcagctgccttgttagtcctccccagggtctagctttccttcttcctgctgcagggtgctgcctgaggggtcctgggtaggaggggcgttagagccagcagggacctcccatgtctccagattccaggtgcaggttcttagcacctccgcagccgctctctcttgagtccatcctcagtctctcctaccccttgaagtagggggaccctgaatttgcccatccacctgggtcactttgagagttgtgcaggggggctgggagcactggtgttcacgtgggaccacaggctgcaccataagacccactcacaataaaaaaataaaaggccgagccgggcatggttgctcactcccgtaataaaaaaataaaagaacaggctgagccggg

SEQ ID NO: 320283 - DNA, 1731 bp, Artificial Sequence
  derived and/or modified sequence
atgcctccccctaggactcgcgaaggacgcgatcgaagagaccatcatagagcaccaagtgaagaggaggcactcgaaaagtgggattggaattgcccagaaaccagaagactgcttgaagatgccttcttcagagaagaggattacatccgacaagggtcagaagagtgccagaaattctggacattcttcgaacgactgcagaggttccagaatctgaagacctctagaaaggaggagaaagatcctggacagcctaaacattccatccctgctctggccgacctcccacgtacatatgacccccgttaccggatcaatctgagtgtgcttggacccgcaacccggggaagccaggggttggggagacacctgcctgcggagagggtggcggaattcagacgtgccctcttacactacttggattttgggcagaaacaggccttcggtcggctcgccaaactgcagcgggagagagctgccttgccaatagcccagtacggaaacagaatcctgcagaccctgaaagaacaccaggtagtggtagtggccggggacacgggttgtgggaaatcgacccaggtaccccagtatctgctagctgccggcttctcccacgtggcttgtacacaaccccgaagaatcgcttgtatctctctggcaaagcgtgtgggtttcgagagtcttagccagtatgggtctcaagttggctaccaaatacggttcgaatctacccgctcagcggccacaaagattgtgtttttgacggtaggactcctcctacgccagatccagcgagagcccagccttccacaatacgaggtcctgattgtcgacgaagtacacgaaaggcacctgcataacgactttttattgggggtattgcagaggctcctgccgacccgcccagacctgaaggttattttaatgtccgccacaattaacatcagcctgttttcatcatacttttccaatgccccagtggtgcaggtgcccggacgtttgtttcctattaccgtgttcgatgtggccccgccaggggtgcgcaagtgcatcctcagcaccaatattgctgagacatccgtgacaatcgacgggatcaggtttgtcgttgatagtggcaaggtgaaggagatgagctacgacccccaggcgaagctgcaacggttgcaagagttttggatttcccaggcatccgctgaacagcgaaagggccgagctggcaggactgggcccggagtatgctttagactgtacgctgagtcagactacgacgccttcgctccttaccccgttcccgagatccgtagggtggccctcgactctctggtacttcagatgaaatccatgtctgtcggagatcctcgaaccttccctttcatagagccgcccccgccagcctcactggaaacagcgattctgtatctgagagatcaaggcgccctggactcatccgaggccctgacacccatcggttccctgctggcacagctccccgtggatgttgtgatcggaaaaatgttaatcctgggatccatgttctccctagtggaaccagttctgacgatcgccgccgccctgtccgtgcaatcgcctttcaccaggagcgctcagtctagccctgaatgttgtacgccgcctgccagcagcctagccgctccacggtgttgtacgcaccggtcttggcggccggcaacagccactgaggcagaaaccacacggacgagatag

SEQ ID NO: 320284 - DNA, 1731 bp, Artificial Sequence
  derived and/or modified sequence
atgcccccacccaggacccgggagggccgggaccggcgggaccaccaccgggcccccagcgaggaggaggccctggagaagtgggactggaactgcccagagacccggcggctgctggaggatgccttcttccgggaggaggactacatccggcagggcagcgaggagtgccagaagttctggaccttctttgagcggctgcagcgcttccagaacctgaagaccagcaggaaggaggagaaggaccccggccagcccaagcacagcatcccagccctggccgacctgcccaggacctatgacccccgctaccgcatcaacctgtctgtgctgggccctgccacccggggcagccagggcctgggccgccacctgcctgctgagcgggtggccgagttccggcgggccctgctgcactacctggactttggccagaagcaggccttcggccgcctggccaagctgcagcgggagcgggccgccctgcccatcgcccagtatggcaaccgcatcctgcagaccctgaaggagcaccaggtggtggtggtggccggggacaccggctgcggcaagagcacccaggtgccccagtacctgctggccgccggcttcagccacgtggcctgcacccagcccaggagaattgcctgcatcagcctggccaagagggtgggctttgagagcctgagccagtatggcagccaggtgggctaccagatccgctttgagagcaccaggtctgctgccaccaagatcgtgttcctgactgtgggcctgctgctgcggcagatccagcgggagcccagcctgccccagtatgaggtgctgattgtggatgaggtgcatgagcggcacctgcacaatgacttcctgctgggcgtgctgcagaggctgctgcccaccaggccagacctgaaggtgatcctgatgtctgccaccatcaacatcagcctcttcagcagctacttcagcaatgcccctgtggtgcaggtgcccggccgcctcttccccatcaccgtgtttgatgtggcccctcctggggtgaggaagtgcatcctgagcaccaacattgctgagacctctgtgaccattgatggcatccgctttgtggtggacagcggcaaggtgaaggagatgtcctatgacccccaggccaagctgcagaggctgcaggagttctggatcagccaggccagcgctgagcagaggaagggccgggccggccgcacaggccctggggtgtgcttccggctgtatgcagagagtgactatgatgcctttgccccctaccctgtgcctgagatccggcgggtggccctggacagcctggtgctgcagatgaagtccatgtctgtgggggaccccaggaccttccccttcatcgagcccccacctccagccagcctggagacagccatcctgtacctgcgggaccagggcgccctggacagcagcgaggccctgacccccatcggcagcctgctggcccagctgcctgtggatgtggtgattggcaagatgctgatcctgggctccatgttcagcctggtggagcctgtgctgaccatcgctgctgccctgtctgtgcagagccccttcaccaggtctgcccagagcagccctgagtgctgcaccccaccagccagcagcctggccgccccccgctgctgcacccaccgctcctggaggcctgccacagccacagaggccgagaccaccaggaccaggtag

SEQ ID NO: 320285 - DNA, 1731 bp, Artificial Sequence
  derived and/or modified sequence
atgccccccccccggacccgggagggccgggaccggcgggaccaccacagagctccgtccgaggaggaggcactggagaaatgggactggaattgtcctgaaactaggcgccttctggaagatgccttctttagagaggaggactatattcgacagggaagcgaggagtgccagaaattctggacctttttcgaacgccttcagcgcttccaaaacctgaagacttctaggaaagaagagaaagacccaggccaacccaaacactcaattccagctctcgctgacctgcctaggacgtacgatcccagatatcgtattaatttgtctgtgctcggccctgctacccgcggttcccaaggacttggccgccacctgcctgccgagcgggttgctgaattccgtagagcactgttgcattacctggactttgggcagaaacaggccttcggaaggttggccaaacttcagcgcgagcgcgcggcactgcccatcgctcagtacggcaatcggatccttcagactctgaaggagcaccaggttgtcgtcgtggcgggagatacaggatgtggaaaaagcacccaggtgcctcagtaccttctcgccgccgggttcagtcacgttgcgtgcactcaacctaggagaatcgcatgtatctctttagcaaagagggtgggcttcgaatctctctcacagtacggcagtcaggtcggctaccagatcagatttgaatcaacccgcagtgcagccaccaagattgttttcctcacagtggggctgctcctgcggcaaatccagcgggaaccatcccttcctcaatatgaagttttgattgtggacgaggtccatgaaagacacttgcataacgattttctgttgggtgtgcttcagcggctcctgccaactcgtcctgaccttaaggtgatcctgatgtcagctaccataaacatttccttgttcagcagttacttttctaacgcacccgtggtacaggttcctgggagattgttcccgatcacagtatttgacgtcgctccgcctggagtccggaaatgcattttgagtacaaatattgccgagacatcagttaccattgatgggatcaggtttgtcgtggatagtggcaaggtgaaggagatgagctatgatccgcaggccaaactccagcggctgcaggagttctggataagtcaggcttccgctgaacagaggaagggcagagccgggcgcaccggaccaggtgtctgcttcaggctgtacgccgagtcagactatgacgcatttgctccctatcccgtccctgagatccgccgagtggcgctggacagcttggtgctccagatgaaaagtatgtccgtgggggatcctagaacattccctttcatagagccccctccacccgccagcttggagacagcaattttgtacttaagagatcagggggctctggatagctcggaggcgctgaccccgatcggatccctccttgctcagcttcccgtcgacgtggtcattgggaagatgttgatcttgggctctatgttctcgctggttgaacctgtgctgacgatagccgctgcccttagtgttcagtctccattcactcggtcggcgcagagctcccccgagtgctgtacccctcccgccagtagcctggcggcacctcgctgctgtacccaccgttcatggaggcctgctacggcaactgaagcagagaccactcgcactcgctag

SEQ ID NO: 320286 - DNA, 1731 bp, Artificial Sequence
  derived and/or modified sequence
atgccccctccgcgaaccagggaggggagagacagaagggatcaccatcgcgctcctagtgaagaggaggccctcgagaaatgggactggaattgtcctgaaactcgtcggctcctggaggatgccttcttcagggaggaagactacatccgccaaggcagcgaggaatgccagaagttctggaccttcttcgagcgactgcagcggtttcagaatcttaaaacaagcaggaaagaagagaaagatcctgggcaacctaagcacagtataccagccttggccgacctacctagaacctatgatccccgttaccgtattaacttgtctgtcctgggaccagctactcggggaagtcagggcctaggacgacatttacccgctgagagggtggcggaattcaggcgcgctcttctgcactacctggacttcggccagaaacaggctttcgggaggcttgctaagcttcagagggaacgggcagcgctgcctatagcccagtatggaaaccggatcctgcagacccttaaagaacaccaggttgttgtcgtggcaggtgatactgggtgcggcaaaagtacgcaggtgccccagtacctcctggctgccggattctctcacgtagcatgcactcagccacgaaggattgcttgtatctcactggcgaagcgagtggggtttgaaagcctttcacagtacggcagccaggtgggctatcagatacgatttgagagtacaagatccgcagctacaaagatcgtattcctaactgttggccttctgctccgccagatccaacgggaaccgtctctcccgcaatatgaggtgctgattgtagatgaggtccatgagaggcatctccacaatgatttcctgttaggcgttcttcagaggctgctcccgacgcgccctgacctgaaggtgatcctgatgtcagctacaatcaatatctctttgtttagttcatactttagtaacgcccctgtcgtgcaagtacccggacggctattccccatcacagttttcgatgtggctcccccaggggtaagaaagtgcattcttagcaccaacattgctgagacctcagtcaccatcgatgggattcggttcgtggtcgactcaggcaaagtaaaagaaatgtcctacgacccacaggccaaattgcagcgtctccaggagttttggatttcacaagcctctgcagaacaacgcaaggggcgtgcagggcgtactggaccaggggtatgctttcggttatacgcggaatccgattacgatgctttcgctccttaccccgtgccggaaatcaggagggtagcgctggactccctcgtcctgcaaatgaagagtatgtccgtcggagaccctagaaccttcccattcattgaacctccaccccctgcctccctggaaacagctatcttgtacctccgtgatcagggggcattagacagttctgaggcacttactccaatcggcagcttgttggcccagctacctgtggatgtcgtgatcgggaagatgctgatcctggggtccatgtttagtctggtggaacccgtcctcacaatcgccgcagcactcagtgtacagagcccctttacccggtctgcacagagcagccctgagtgctgcacgcctcccgctagctctctcgccgcacctagatgctgcacccaccggtcctggaggcctgctacagcaactgaggcagaaactactagaacaagatag

SEQ ID NO: 320287 - DNA, 4935 bp, Artificial Sequence
  derived and/or modified sequence
gtctggagaagagagtttccacgttgtcatcataggatctggactcaagtgaccaaaaccttgcttggatttttacctgatgaagtttgtcttgaaaagtgaaaatggttccatttccattttccctgttctcaagggatggaagaagcgagcctgtgccttggagtgtcttcggcggagccggaagctgagccccacctgagtggccccgtcctcaacggccagtatgccatgagtcagaagctgcaccagatcacctcccagctcagccatgccttccccgagctccatccccggcccaaccccgaggagaagccccccgcatccctggaggagaaggcccacgtgcccatgagcggccagcccatgggcagtcagatggcgctcctggccaaccagctgggccgggaggtggacaccagcctcaacgggagggtggacttgcagcagttcctcaacgggcagaacctgggcatcatgtcccagatgagcgacatcgaggacgacgcccgcaagaaccgcaagtacccgtgcccactctgcggcaagcgcttccgcttcaacagcatcctctccctgcacatgcgcacgcacacgggcgagaagcccttcaagtgcccgtactgcgaccacagggcggcgcagaaggggaacctcaagattcacctgcggacccacaagctgggcaacctgggcaaggggcgtgggcgtgtgcgcgaggagaaccgcctgctgcacgagctggaggagcgcgccatcctgcgggacaagcagctgaaaggcagcctgctgcagccccggccggacctgaagcccccgccgcacgcccagcaggccccgctggccgcctgcaccctggccctgcaggctaaccacagcgttcccgacgtggcccacccggtgccctcgcccaagcctgccagcgtgcaggaggacgcggtggccccggcggcgggcttccgctgtaccttctgcaagggcaagttcaagaagcgcgaggagctggaccgccacatccgcatcttgcacaagccctacaagtgcacgttgtgcgacttcgcggcttcgcaggaggaggagctcatcagccacgtggagaaggcacacatcacggccgagtcggcccagggccagggccccaacggcggtggcgagcagtcggccaacgagttccgctgcgaggtgtgcggtcaggtgttcagccaggcgtggttcctcaagggtcacatgcgcaagcacaaagactcctttgagcactgctgccagatctgcggccggcgcttcaaggagccctggttcctcaagaaccacatgaaggtccacctcaacaagctgtcggtgaagaacaagtcccccagcgaccccgaggtgcctgtgcccatgggcggcatgtcccaggaggcccacgccaacctgtactccaggtacctctcctgcctgcagagtggcttcatgaccccggacaaagccggcctgagcgagcccagccagctctatggcaagggcgagctgcccatgaaggagaaggaagcgctggggaagctgctgtctcccatctccagcatggcccacggcgtcccggagggggacaagcactccctcctgggatgcctcaatctcgtgccgccgctgaaatccagctgcatcgagcggctgcaggcggctgccaaggctgcggagatggaccccgtgaacagctaccaggcttggcagctcatggccaggggcatggccatggaacatggcttcttgtctaaagagcatccgctgcagcgcaaccacgaagacactttggcaaacgccggggttctgtttgataaggagaagcgggagtacgtgttagtgggagcagatggctccaagcagaaaatgcctgctgatttggttcacagcactaaagtgggcagccagagagacctgccaagtaagctcgaccctttagaaagcagtcgggattttttgtcacacgggctgaaccagactctcgagtataacctgcagggtcctgggaacatgaaggagaagcccaccgagtgccccgactgcggccgggtgttccgcacttaccaccaggtggtcgtgcactcccgtgtccacaagcgggaccgcaagggcgaggaggatgggctgcacgtgggcctggatgagcggcgtggctcgggcagtgaccaggagtcccagtcggtgagccgctccaccacgccgggctcctctaacgtcaccgaggagagcggggtcggaggcggcctctcccagaccgggagtgcccaggaggacagcccgcacccctcctcgccatcctcctcagacattggcgaggaggctgggagatctgccggcgtccagcaaccagcgctgcttcgcgacagaagcctgggctcggccatgaaggactgcccgtactgtgggaaaactttccggacatcccatcaccttaaggtgcacctgaggatacacacaggtgagaaaccctacaagtgtccgcactgtgactatgccggcacgcagtcagcatccttaaaataccacttagagcgacaccatcgggagcggcagaacggggctgggccgctgtctgggcaacccccaaatcaagaccacaaggatgagatgtcaagcaaagcttctctgttcatcaggccagacatcctgaggggggccttcaagggtctccctggaatcgacttcagaggaggccctgcatctcagcagtggacatcaggggttctctcctctggagatcactcggggcaggccacgggcatgtcttcggaggtcccctcagatgctctgaaaggcactgaccttccttccaaaagcacccacttctctgagatcggaagagcttatcaaagcattgtgagcaacggtgtgaatttccaagggtccttgcaagctttcatggacagttttgtcctcagttccttgaagaaggagaaggacatgaaggacaaagccctggctgaccccccttccatgaaagtccacggagtggatggtggtgaggagaaacccagtggcaagtcctcccagaggaagtccgagaaatctcagtatgaacccctggacttgtctgtgcggccagatgccgcctccctcccgggctcctcggtaactgtgcaggacagcattgcatggcacggctgcttgttttgtgctttcacaacgtcctccatggagctcatggcccttcatctccaggccaaccacctgggcaaagcgaaacgcaaagataacaccatcggggtcacagtcaactgcaaagaccaagcccgggaggcgagtaagatggccctgctgccctcgttacaatcaaacaaagacctgggcctctccaatatgatcagctctctagactctgcttctgagaagatggcccaaggtcagctcaaggagactctgggagagcagaagagcggtgcatggaccggccacgtggaccctgcattttgtaacttcccatcagacttctacaagcagtttggtgtttacccaggcatggttggctcaggggcctccagttcctgccccaacaaggagcctgatggaaaggcccactctgaagaggatgtccccatcctgatccccgaaaccacgagtaagaacactactgatgacctctctgacattgcctcctcagaggacatggactcctccaagggggagaacaacgatgaagaggatgttgaaaccgaaccggaaatgatgaccaagccactgtctgccctcagcaaagacagcagcagcgatggcggggacagcctgcagcccacaggcacctcccagcccgtccagggactggtctcacctttatcccaagcaccggagaagcagtggcacagccagggtcttctccaagcccaggaccccttggcgggcctgccaaagccggagcgggggccccagagcctggacaagccgatgaacatgctgtcggtcctcagggcctacagttctgatggcttagcagcctttaacggacttgcaagtagcacagcaaattctggatgtatcaagaggccagacttgtgtggtaagtgacactccctgtcctagtcggtctatctggacttgcccttgtctgttcgtggtcctcggtggttatctgcagcttgttaatcgtgtaaagtcaagagaagaatgtatacacatatgtgtgttgaataattactattggcataggtatgtgtatacacacggtgcaccaatctacagtatatatagcagagaatcagaggctaaaaatattaccccatatgttccagtattagtcatggattgcaaaggcttagtaacttgagcaggagagaaaactccctcaaagtcataaatcctgagtgacaactgctgctggatgacagatcccttcacctgtggacaacctggctgggggtggggggctgttccaccagctcacctgagcatgtagaggtgggtcctgcagtggtctcgtgggtattactgcttgtgtctgattgtcctgtattttgtaacactttagaagaatacagaaaagtgcagtaattctctttctccatagtatttaagcagaaatattgctagtttaatattgtgtcaggtcgtcctattaaccaggagcagatgacagtaaaatttcagtgaatagcaccttgacatctacaacttaaaaatggtgattgaagcaaaatatgtaaacttgtacggggtgatcgtgtgctttggaacagagtattgttgaagtaattagaagatatattaaggtgttcctggtaatgaaggcatgtaagttataataattgtagctttctgaataagtgtcaaactatatctttaagtgtgctgtatgctgagttacaagttaggtcatttatgaatggaatgtaaaataatactaaaaatgcttcaataacttatcttggtattgctaataaaaaaaaaaagctgtgaaacatt

SEQ ID NO: 320288 - DNA, 8148 bp, Artificial Sequence
  derived and/or modified sequence
atggctgcagcagccgggggaggtagctgtcccgggcccgggagcgcccggggcaggtttcctggacggcctaggggtgccgggggcggtgggggcaggggtggccgcggaaacggcgctgaacgtgtgagggtggcactgagaagaggcggcggtgcaactggtcctggcggtgccgagcccggtgaagatacggccctcctaagactcttgggattgaggcgcggcctgagacgcctcaggcgcttgtgggcaggtcctcgtgtgcaacgaggtagaggccgtgggagaggacggggctgggggcccagtcgaggatgtgtccctgaggaagaatcctcagacggggagagcgatgaagaagagtttcaggggtttcactccgacgaggatgtggccccctcctcactgagatctgctctccgaagccagaggggccgggcgcctagagggcgaggacggaagcataagactacacctttacccccacctagactcgcggatgtggcgcctacccccccaaagacccctgcaagaaaaaggggcgaagaaggtaccgagagaatggtgcaggctttaacggagctgttaaggagggcacaggcacctcaggcccccaggtcaagagcttgcgagccctcgactccccggcgctcgcgtgggagaccacctggacgccccgctggaccgtgccgtcggaagcagcaagcagtcgtggtggccgaagcggcggtcacaattccaaagcccgaaccacctccccctgtggtacccgtgaagcaccagactggtagctggaagtgtaaggaaggcccaggacctggtcctggaacaccccggcgaggcgggcagtcgtcaaggggcggccgcgggggcaggggccggggcagagggggtggcctgccctttgtaattaagttcgtgtcccgagcgaagaaggtgaaaatgggccagctctcacttggattggagtctggacagggtcaaggtcagcatgaagagtcttggcaggatgtgccacagcgcagggtcgggtctggccaggggggctctccctgctggaagaaacaggagcagaagctcgatgacgaggaggaagaaaagaaggaggaagaggaaaaagacaaagaaggggaagagaaggaagagcgggccgtcgctgaagagatgatgccagccgccgagaaggaggaggctaagttgcccccaccacccttgacaccccccgccccttcgccacctcccccactaccaccacctagtacttcaccaccaccccctctttgccccccgcctcccccaccagtttctccccctccattaccatcccccccaccgccaccagctcaggaggagcaggaagagtccccaccccccgtggtgcctgccacctgcagccggaagcggggcagaccacctctgactccatcccaaagagcggagcgggaggcagcccgggcgggaccagaaggcacatcccccccaaccccaaccccgagcactgccactgggggaccccccgaagattcccccacggtcgcccccaaaagcacaaccttcttgaagaacatccgtcagttcatcatgcctgtggtatctgcccgtagttccagagtgatcaaaaccccacgtaggtttatggacgaagacccccctaaacctcccaaagtcgaggtgtcaccagtcttaagaccccctataaccaccagtcccccagtaccccaggaacccgctccagtaccatcccctccacgggcaccaacaccacccagcactcccgtaccgctgcccgagaagcgccgctccatattgcgggagcctacatttcgctggacgtcactcacccgcgagctcccgccccctccccctgcccccccccccccacctgcccctagtcctccccccgcccccgccacaagtagcaggaggccccttcttctcagggctccgcagttcactccttccgaggctcacctgaaaatttacgaaagtgtcctgaccccgcctcccctgggagcaccagaggcaccagaacccgagccaccacccgctgacgactctcccgccgagcccgaacccagagccgtgggccgcacgaatcatctctcactccctcgatttgcgccagtggttaccactccagtcaaggctgaggtgtcacctcatggagcgccagccctgagcaatggaccccagacacaagctcagctgttgcaaccactgcaagctctccagacccagctgctcccccaggcactcccccccccgcagccccaactccagcccccaccctccccacagcagatgccaccactcgaaaaagctaggattgccggcgttggttcacttccactttccggtgtcgaagagaaaatgttttccttactgaagagggctaaggttcagctgttcaaaatcgatcagcagcagcagcagaaggtagctgcctccatgcccctttctcccggagggcagatggaggaggtggcgggagccgttaagcagatctctgatagggggcccgtgagaagtgaagacgaaagcgtggaggctaagagggaaaggcccagtgggcctgagagtcccgtacaaggaccccgcatcaaacatgtatgcagacacgccgctgtggcattggggcaggcgcgtgccatggtgcccgaagatgtgcccagactgagcgctctgcccctgcgggacagacaggacctggcgaccgaggatacctcatccgcgagtgagacggaatccgtgccctccagatcccgacgcgggaaggtcgaggccgcgggtcccgggggggaaagcgagccaacaggcagcggcggtaccctggctcatacaccccggagatccctccctagccatcacggaaagaaaatgcgtatggcccggtgcggccactgtagaggatgtctacgcgttcaggactgtggctcttgtgtgaattgccttgataagcctaagtttggcggcccaaatacaaaaaagcagtgctgcgtgtatagaaagtgcgataaaattgaggcccgcaagatggagcgactggcgaaaaaggggcgcacaatagttaaaaccttgctgccatgggactccgacgagtctcctgaagcaagtcctgggccacctggacctaggcggggtgccggcgccggcggccctcgcgaagaggtagttgcccatccgggcccagaggaacaagatagtctgttgcagagaaaatccgcccgtagatgtgtcaagcagcgaccatcctatgacatttttgaagactctgacgattcagaacccggaggcccaccagctcccaggcggcgtacacctcgcgagaatgagctaccgctccctgagccagaggagcagagcagacctagaaaacccacactgcagcctgtcctgcagctaaaggcacgacgcagactggataaggacgctcttgccccgggcccttttgcaagcttccctaacggctggaccggcaaacagaagtccccagatggcgttcaccgggtgcgggtcgacttcaaagaggattgtgatttggaaaacgtctggcttatgggcggcctctctgtccttaccagtgtccctggcggacctccaatggtctgtctcctctgtgcatccaagggcctgcatgaactggtgttttgccaggtatgttgcgatcctttccatcccttctgtctggaagaggctgagcgccccctgcctcagcatcacgacacttggtgctgccggaggtgtaagttctgtcacgtgtgcggtaggaaggggcgtggttcaaaacacttgcttgagtgcgagaggtgtagacacgcctaccatccagcctgtctggggcccagctatccaaccagagccactcggaaacggcgacattggatctgtagtgcatgcgtgagatgcaaaagttgcggtgccacaccagggaagaactgggacgtcgaatggtcgggggactactcactttgcccacgctgcacccaactgtacgaaaaggggaactactgcccaatctgcacaaggtgctacgaggataacgactacgagtctaagatgatgcagtgcgcccagtgcgaccattgggtgcacgcaaaatgcgagggactgtcggacgaggactatgagattttgtcaggtctgcccgacagtgtgctatacacatgtggtccctgtgcgggtgccgcgcagccacgctggcgcgaggccctatccggcgccctccaggggggtctccgccaggtgttgcaagggttgctcagcagcaaagtggtgggtccactcttactgtgcacacagtgtggacctgatgggaaacagctgcaccccggcccctgcgggttacaggcggtaagccagaggtttgaagacggtcattacaagtccgtccatagctttatggaagacatggtgggaattctcatgagacatagcgaggagggggagactcctgatagacgcgccggagggcagatgaagggattattactcaagcttctcgagagcgccttcgggtggtttgatgctcacgatcccaagtactggagaaggagcacaaggttaccaaacggcgtcctgccgaacgctgtgctccctcctagtctggaccacgtctatgcgcaatggcgccagcaggaaccggaaacacccgagtctggacagcctccaggggacccctccgccgctttccaggggaaggatcctgctgctttctctcaccttgaggacccgaggcagtgcgcactgtgtttaaagtacggcgatgctgactcaaaagaggcaggacgtttactgtatattggccagaacgagtggacccacgtgaattgcgctatctggagtgccgaagtgtttgaggaaaacgatgggagccttaagaatgttcatgccgcagtggctcgagggcggcagatgcgatgcgaactttgcctcaagccaggcgccacggtgggctgttgtctttcctcctgcctcagcaatttccattttatgtgtgcacgagcaagctactgcatcttccaagatgataagaaggtattttgccagaaacacacggaccttctagacgggaaagaaattgtgaaccccgacggattcgatgtgctcagaagagtgtacgtggactttgaaggtattaacttcaaacgcaagtttctcaccgggctcgagcctgacgcaattaacgtgttgatagggagcatcaggattgactccctgggaacactgagtgacctgagcgactgcgaagggcggttgttcccaatcggttatcagtgttcaaggctgtactggagcactgtcgatgcgcgccgccggtgttggtataggtgtcgaattttggaataccggccctgggggccgcgggaagagcccgcccacttagaagcagccgaagagaatcagactatcgtgcactctcctgcaccttccagtgaaccgcccggcggagaagacccgccgctagataccgacgtgctggtgccaggcgcccccgaaagacacagcccaatacaaaatctggatccgcccctgcgtcctgattctggcagtgcccctcctcccgctcccagaagcttctcaggcgcacggattaaagtgccgaactactcccccagcaggaggccactgggaggtgtatcttttggaccgttaccttccccaggttcacccagttctctgacacaccacatcccaaccgtaggggatccagatttcccagctccaccacgccggtcaagaaggccaagcccattagctccaaggccgccacccagtcggtgggcctccccccctttgaaaacctcacctcagcttcgagtacccccccctactagcgtcgtgacagctctaacacctacaagtggagaactggccccccccggacccgccccatcacccccacccccagaggatctgggccccgactttgaagacatggaggtagtttccggtctcagcgcagctgatttggacttcgccgcatccctccttggaacagagcctttccaggaggaaattgtagccgccggcgctatgggtagttcccatggcggaccgggcgattcttccgaagaggaaagcagcccgacgtccagatatattcatttccccgttactgttgtgtctgcaccaggactggccccgtccgccacccctggagcacctcgcatagagcagctggatggtgtcgatgacggcaccgattcagaggcagaagccgtgcaacaacctagggggcaggggacacctccctctggcccgggagtggtccgtgcgggagtgctgggtgccgcaggggacagagcaagacctccagaggatctcccgtccgaaatagtggatttcgtcttgaagaaccttggcgggcccggtgatggaggagcagggccgcgcgaagagtctctgcctcccgctcctcctctagctaacggatcccagccctctcagggactgactgcatcacccgctgaccccactaggacattcgcctggttgcccggcgctcctggagtcagagtgctctcgctgggacccgctcccgaaccacctaagcctgccacaagcaagatcatcctggtgaacaagttgggacaagtgtttgtcaagatggccggcgagggcgagcccgtgccccccccggtgaagcagcctcctctgccacccacaatcagccctaccgcccccactagttggaccttaccaccaggccccttactcggagtcttacctgtggtgggtgtagtgcgcccggccccaccccctccaccaccacccctcactttggtgctaagctctggtccagcctctcctccccgccaggctatacgggtgaagagggtctctaccttctccggaagatccccccccgcccctcccccatacaaggccccacggctggacgaagacggggaagcttccgaagacactccgcaggtgcctggcttaggttccggtgggtttagtcgagtcagaatgaagacgcctaccgtgagaggcgtcctggatctcgacaggccaggggaacccgctggcgaggaatcgccaggccccttgcaggaacgtagtcccttactcccactgccagaagacggacctccacaggttccagacgggccgcccgacctcctgctggaatcccagtggcaccactactcaggggaggcctcctcatccgaggaagagcctccttccccagacgacaaagagaatcaggctcccaagagaaccgggcctcatctgcgctttgaaatttcctcagaagacggtttctccgtggaagctgaatcacttgagggggcatggagaaccttaatagagaaggtccaggaggcacgaggtcacgccaggctgcggcacctaagtttctctggcatgagcggtgcgaggcttctcggaattcaccatgatgccgtcatctttctggctgagcaactgcccggagcgcagaggtgccaacattacaaattccgttaccatcagcagggtgagggacaggaagagccccccctgaaccctcacggggccgctagagctgaagtctacctccgaaagtgtacattcgatatgtttaacttcctggcctctcagcaccgagtcctcccagaaggggccacttgtgacgaggaggaggacgaggtgcagctgcggtccacacgccgcgccacaagcctcgaactgcccatggccatgcgattcaggcacctcaagaaaacttcgaaggaggcggtgggggtgtaccgctcggccattcatgggagggggctcttttgcaaacggaatattgacgcaggcgaaatggtcatcgaatactccgggatagttatccggagcgtactgactgataagcgggaaaaattctacgatggtaagggcattggatgctatatgttccgaatggatgatttcgacgtcgtggacgcgacgatgcacggtaatgccgcacgcttcatcaaccacagttgcgagccaaactgcttctccagagtcatccacgtggagggtcagaagcacatcgttatcttcgcactgagaagaatccttagaggggaagagttgacatacgattacaagtttcccattgaagacgcatccaacaagctgccatgcaattgcggtgcaaagcgatgccgaaggttcctcaactag

SEQ ID NO: 320289 - DNA, 8148 bp, Artificial Sequence
  derived and/or modified sequence
atggctgctgctgctgggggcggcagctgccccggccctggcagcgcccggggccgcttccctggccggcccagaggagctgggggcggcggcggccggggcggcagaggaaatggagctgagcgggtgcgggtggccctgcggcggggcggcggggccaccggccctgggggcgctgagcctggagaggacacagccctgctgcggctgctgggcctgcggcggggcctgcggcggctgcggcggctgtgggccggcccccgggtgcagaggggccggggccggggccggggccggggctggggccccagccggggctgtgtgcctgaggaggagagcagtgatggagagagtgatgaggaggagttccagggcttccacagtgatgaagatgtggcccccagcagcctgcggagcgccctgcggagccagaggggccgggccccccggggccggggcaggaagcacaagaccacccccctgcccccaccccggctggctgatgtggcccccaccccacccaagaccccagccaggaagagaggagaggagggcacagagaggatggtgcaggccctgacagagctgctgcggcgggcccaggccccccaggcccccaggagccgggcctgtgagcccagcaccccaagaagaagccggggccggcccccaggccggcctgctggcccctgcaggaggaagcagcaggccgtggtggtggccgaggccgctgtgaccatccccaagccagagcccccacctcctgtggtgcctgtgaagcaccagacaggctcctggaagtgcaaggagggccctggccctggccctggcaccccccggcggggcggccagagcagccggggcggccggggcggccggggccggggccggggcggcggcctgccctttgtgatcaagtttgtgtcccgggccaagaaggtgaagatgggccagctgagcctgggcctggagagcggccagggccagggccagcacgaggagagctggcaggatgtgccccagaggagagtgggcagcggccagggcggcagcccctgctggaagaagcaggagcagaagctggatgatgaggaggaggagaagaaggaggaggaggagaaggacaaggagggggaggagaaggaggagagagctgtggccgaggagatgatgcctgctgctgagaaggaggaggccaagctgcccccaccacccctgaccccaccagcccccagccccccaccacccctgcccccacccagcaccagccccccaccacccctgtgccccccacctcctcctcctgtgagccccccacccctgcccagccccccacctcctccagcccaggaggagcaggaggagagccccccacctgtggtgcctgccacctgcagcaggaagaggggccggccccccctgacccccagccagagagctgagcgggaggccgcccgggccggccctgagggcaccagcccccccacccccacccccagcacagccactggaggccccccagaggacagccccaccgtggcccccaagagcaccaccttcctgaagaacatccggcagttcatcatgcctgtggtgtctgcccggagcagcagggtcatcaagaccccccggcgcttcatggatgaagatcctcccaagccacccaaggtggaggtgtcccctgtgctgcggccccccatcaccaccagcccccctgtgccccaggagcccgcccctgtgcccagccccccccgggcccccaccccacccagcacccctgtgcccctgcctgagaagaggaggagcatcctgcgggagcccaccttccgctggaccagcctgacccgggagctgcccccacctcctccagcccctcctcctcctccagcccccagccccccaccagccccagccaccagcagccggcggcccctgctgctgcgggccccccagttcaccccatctgaggcccacctgaagatctatgagagcgtgctgaccccaccacccctgggcgcccctgaggcccctgagcctgagcccccaccagcagatgacagccctgctgagcctgagcccagggctgtgggccgcaccaaccacctgagcctgcccaggtttgcccctgtggtgaccacccctgtgaaggccgaggtgagcccccacggggccccagccctgagcaatggcccccagacccaggcccagctgctgcagcccctgcaggccctgcagacccagctgctgccccaggccctgcccccaccccagccccagctgcagcccccacccagcccccagcagatgccacccctggagaaggccagaattgctggggtgggcagcctgcccctgagcggcgtggaggagaagatgttcagcctgctgaagagggccaaggtgcagctgttcaagattgaccagcagcagcagcagaaggtggccgcctccatgcccctgagccctgggggccagatggaggaggtggccggggctgtgaagcagatcagtgaccggggccctgtgcgctcagaagatgagagcgtggaggccaagcgggagcggcccagcggccctgagagccctgtgcagggcccccgcatcaagcacgtgtgcagacatgctgctgtggccctgggccaggcccgggccatggtgcctgaagatgtgccccggctgagcgccctgcccctgcgggaccggcaggacctggccacagaggacaccagcagcgccagcgagacagaatctgtgcccagccgcagcagaagaggcaaggtggaggccgccggccctggaggagagagcgagcccactggaagtggcggcaccctggcccacaccccccggcgcagcctgcccagccaccacggcaagaagatgaggatggcccgctgtggccactgccggggctgcctgcgggtgcaggactgtggcagctgtgtgaactgcctggacaagcccaagtttggaggccccaacaccaagaagcagtgctgcgtgtacagaaaatgtgacaagattgaggccaggaagatggagcggctggccaagaagggccgcaccatcgtgaagaccctgctgccctgggacagtgatgagagccctgaggccagccctggccccccaggccccaggagaggagctggagctgggggcccccgggaggaggtggtggcccaccctggccctgaggagcaggacagcctgctgcagaggaagagcgcccggcgctgtgtgaagcagaggcccagctatgacatctttgaggacagtgatgattctgagcccggcggccccccagcccccaggaggaggaccccccgggagaatgagctgcccctgcctgagcctgaggagcagagccggcccaggaagcccaccctgcagcctgtgctgcagctgaaggcccggcggcggctggacaaggatgccctggcccctggcccctttgccagcttccccaacggctggacaggcaagcagaagagcccagatggagtgcaccgggtgcgggtggacttcaaggaggactgtgacctggagaatgtgtggctgatgggcggcctgtctgtgctgacctctgtgcctgggggcccccccatggtgtgcctgctgtgtgccagcaagggcctgcacgagctggtgttctgccaggtgtgctgtgaccccttccaccccttctgcctggaggaggccgagcggcccctgccccagcaccacgacacctggtgctgccgccgctgcaagttctgccacgtgtgtggcaggaagggccggggcagcaagcacctgctggagtgtgagcgctgcagacatgcctaccacccagcctgcctgggccccagctaccccacccgggccaccaggaagaggaggcactggatctgcagcgcctgtgtgcgctgcaagagctgtggggccacccctgggaagaactgggatgtggagtggagcggggactacagcctgtgcccccgctgcacccagctgtatgagaagggcaactactgccccatctgcacccgctgctatgaggacaatgactatgagagcaagatgatgcagtgtgcccagtgtgaccactgggtgcacgccaagtgtgagggcctgagtgatgaggactatgagatcctgagcggcctgcctgattctgtgctgtacacctgtggcccctgtgccggggccgcccagccccgctggagggaggccctgagcggggccctgcagggcggcctgcggcaggtgctgcagggcctgctgagcagcaaggtggtgggccccctgctgctgtgcacccagtgtggcccagatggcaagcagctgcaccctggcccctgtggcctgcaggccgtgtcccagagatttgaagatggccactacaagtctgtgcacagcttcatggaggacatggtgggcatcctgatgaggcacagcgaggagggggagaccccagacagaagagctgggggccagatgaagggcctgctgctgaagctgctggagagcgccttcggctggtttgatgcccatgaccccaagtactggaggaggagcacccggctgcccaacggggtgctgcccaatgctgtgctgccccccagcctggaccacgtgtatgcccagtggaggcagcaggagcctgagaccccagagagcggccagcccccaggggaccccagcgctgccttccagggcaaggaccctgctgccttcagccacctggaggacccccggcagtgtgccctgtgcctgaagtatggagatgctgacagcaaggaggccggccgcctgctgtacatcggccagaatgagtggacccacgtgaactgtgccatctggagcgctgaggtgtttgaagaaaatgatggcagcctgaagaatgtgcatgctgctgtggcccggggccggcagatgagatgtgagctgtgcctgaagccaggggccaccgtgggctgctgcctgagcagctgcctgagcaacttccacttcatgtgtgcccgggccagctactgcatcttccaggatgacaagaaggtgttctgccagaagcacacagacctgctggatggcaaggagatcgtgaacccagatggctttgatgtgctgcggcgggtgtatgtggactttgagggcatcaacttcaagaggaagttcctgaccggcctggagccagatgccatcaacgtgctgattggcagcatcagaattgacagcctgggcaccctgagtgacctgagtgactgtgagggccgcctcttccccatcggctaccagtgcagccggctgtactggagcacagtggatgcccggcggcgctgctggtaccgctgccgcatcctggagtaccggccctggggcccccgggaggagcccgcccacctggaggccgctgaggagaaccagaccatcgtgcacagccctgcccccagcagcgagcccccaggaggagaggacccccccctggacacagatgtgctggtgcctggggcccctgagcggcacagccccatccagaacctggacccccccctgcggccagattctggcagcgcccctcctccagcccccaggagcttcagcggggcccgcatcaaggtgcccaactacagccccagccggcggcccctgggcggcgtgtcctttggccccctgcccagccctggcagccccagcagcctgacccaccacatccccaccgtgggggaccctgacttccctgcccccccaagaagaagccggcggcccagccccctggccccccggcccccacccagccgctgggccagcccccccctgaagaccagcccccagctgcgggtgcccccacccacctctgtggtgacagccctgacccccaccagcggggagctggcccctcctggccctgcccccagccccccacctcctgaggacctgggccctgactttgaggacatggaggtggtgtctggcctgtctgctgctgacctggactttgctgccagcctgctgggcacagagcccttccaggaggagatcgtggccgccggggccatgggcagcagccatggaggccctggggacagcagcgaggaggagagcagccccaccagccgctacatccacttccctgtgacagtggtgtctgcccctggcctggcccccagcgccacccctggggccccccgcatcgagcagctggatggagtggatgatggaacagacagcgaggccgaggccgtgcagcagccccggggccagggcaccccacccagcggccctggggtggtgcgggccggcgtgctgggcgctgctggggaccgggcccggcccccagaggacctgcccagcgagatcgtggactttgtgctgaagaacctgggcggccctggagatggaggagctggcccccgggaggagagcctgcccccagccccacccctggccaacggcagccagcccagccagggcctgacagccagccctgctgaccccaccaggacctttgcctggctgcccggggcccctggggtgcgggtgctgagcctgggccctgcccctgagccccccaagccagccaccagcaagatcatcctggtgaacaagctgggccaggtgtttgtgaagatggccggggagggggagcctgtgcccccacctgtgaagcagccccccctgccccccaccatcagccccacagcccccacctcctggaccctgcccccaggccccctgctgggcgtgctgcctgtggtgggcgtggtgcggcctgcccctcctcctcctcctccacccctgaccctggtgctgagcagcggccctgccagccccccccggcaggccatccgggtgaagagggtgtccaccttcagcggccgcagccccccagcccccccaccctacaaggccccccggctggatgaagatggagaggccagcgaggacaccccccaggtgcccggcctgggcagcggcggcttcagccgggtgaggatgaagacccccaccgtgcggggcgtgctggacctggacaggcctggagagcctgctggggaggagagccctggccccctgcaggagaggagccccctgctgcccctgcctgaagatggccccccccaggtgcctgatggccccccagacctgctgctggagagccagtggcaccactacagcggggaggccagcagcagcgaggaggagccccccagcccagatgacaaggagaaccaggcccccaagaggacaggcccccacctgcgctttgagatcagcagtgaagatggcttctctgtggaggccgagagcctggagggcgcctggaggaccctgattgagaaggtgcaggaggcccggggccacgcccggctgcggcacctgtccttcagcggcatgtctggggcccggctgctgggcatccaccatgatgctgtgatcttcctggccgagcagctgcccggggcccagcgctgccagcactacaagttccgctaccaccagcagggcgagggccaggaggagccccccctgaacccccatggagctgcccgggcagaggtgtacctgaggaagtgcacctttgacatgttcaacttcctggccagccagcaccgggtgctgcctgagggcgccacctgtgatgaggaggaggatgaggtgcagctgcggagcacccggcgggccaccagcctggagctgcccatggccatgaggttccgccacctgaagaagaccagcaaggaggccgtgggcgtgtaccgcagcgccatccacggccggggcctcttctgcaagagaaatattgatgctggggagatggtgattgagtacagcggcatcgtcatccgctctgtgctgacagacaagcgggagaagttctatgatggcaagggcatcggctgctacatgttcaggatggatgactttgatgtggtggatgccaccatgcacggcaatgctgcccgcttcatcaaccacagctgtgagcccaactgcttcagcagggtcatccacgtggagggccagaagcacatcgtcatctttgccctgcggcgcatcctgcggggggaggagctgacctatgactacaagttccccattgaagatgccagcaacaagctgccctgcaactgtggggccaagcgctgccgccgcttcctgaactag

SEQ ID NO: 320290 - DNA, 8148 bp, Artificial Sequence
  derived and/or modified sequence
atggccgccgccgccggcggcggcagctgccccggccccggcagcgccaggggtcgcttccccgggagaccaaggggagcaggagggggcgggggccggggcggacgtggtaacggcgccgaaagggttagagtggctctgcggcgtggcggaggggccacaggcccagggggcgcagaaccaggagaggacacagccttgcttcggttgttgggcttacggcgcggactaagacggctacggaggctgtgggctggtccccgcgtgcagcggggacgtgggcgagggagaggccggggatggggaccctcacgaggatgcgtgcccgaggaagagtctagtgatggggagagcgacgaggaggaattccagggcttccactcagacgaagacgtggccccatcttccctgcggtctgccctgcgatcccaacgaggaagggcccccagagggaggggcaggaagcacaagactactccgcttccaccacccaggttagccgacgttgcaccaacgccacccaaaacccccgcacggaagagaggggaagagggtacggagcgtatggtgcaggctctgactgaactgttgagaagggctcaagccccacaggctcctagatcccgagcctgcgaaccctccactcccagacgcagcagagggcgtccacctggcaggccggctggaccctgcaggaggaaacagcaggcggtggtcgttgcagaggccgctgtgacaataccaaaacctgaacctccaccccctgttgtgcccgtgaagcaccagacaggcagctggaaatgtaaagagggacctggccccggcccagggacccctcggcgcggagggcagagctctcggggcgggaggggcgggcggggtcgtggccgcgggggaggtcttcctttcgtcattaaatttgtatctcgggcaaagaaggtgaaaatggggcagctgagccttggtctggaatctggacaggggcaaggccagcacgaggagtcatggcaggacgtcccccagaggagggtgggatctggtcagggcgggtctccctgctggaagaagcaggagcagaagcttgacgatgaagaagaggaaaagaaggaagaggaagaaaaggataaggagggcgaagaaaaggaggaacgcgcagtggccgaggagatgatgccagctgctgagaaggaggaagcgaaattacctccccctcccctgaccccccctgcccccagtcctccaccccctttaccgcctccatctacatctcccccccccccactgtgcccacccccacccccacccgtgtctccaccgcctctgcccagccctccccccccacctgcccaggaagagcaggaagagagtcctccgcctgtcgtcccagccacctgctctcgtaagagagggcgtcccccactcaccccttctcagcgggcagagagagaagctgcgagggctggacctgaaggcacttcccccccaacccccacccccagcactgccacaggtgggccgcctgaggatagtcccaccgttgcaccaaagagtactacttttttgaaaaatatacgacagtttatcatgccagtcgtgtcagctagatccagccgggtgatcaagacccctaggcgtttcatggacgaagaccctcctaagccaccaaaggtggaggtgagccccgtcctgcggccaccaataactacatccccaccagtgcctcaggaaccggcacctgtgccaagtccaccccgtgctcccacccccccttcaacgcctgttcccttgccagagaagaggcgctccattctgcgggagcctacgttcagatggacaagcttgactcgcgagttgccacctccccctcctgcccctcccccaccccccgcaccctcccctccccccgctcccgccaccagtagcaggcggccattactgctgcgggccccccagttcaccccctctgaggctcatctgaagatttacgaatccgtgctgacccctcctcccctgggcgcccctgaggctcctgaaccagaacctccccctgctgatgactctcctgccgagcccgaacccagggccgtcggcagaaccaatcacctgtcactgccccgtttcgcacctgtcgtaactacaccggtgaaggcagaggtatcccctcacggcgcacctgccttatccaacggacctcagactcaggcccagctcctgcaacccctccaggccttgcagactcagctcctcccacaggctctgccaccccctcagccccagctgcaacctcctccctcaccacagcaaatgcctcctctggagaaggctaggatcgccggcgtggggtctctgcccctgtccggcgttgaggagaagatgttcagtctcctcaagcgagcaaaggttcaactgttcaaaatcgaccagcagcaacagcagaaggtggccgcttctatgccactgtctcctggcggacagatggaagaagtagccggtgccgtgaagcagatttccgatcggggcccagtgcgatctgaggacgagagtgtggaggctaagcgtgaacgtccttcaggaccagagagccccgtccaaggcccccgcattaagcacgtgtgccggcacgctgccgtggccttgggccaagcacgggccatggtgcctgaagatgtaccacgtctgagtgccctacccctacgggatcgacaagatttggccaccgaggacacttcttccgcctccgagacagaatcagtgccgagccgcagccgcaggggtaaagtggaagcagctggccctggtggtgagagtgagcccactggttccggaggaactctggcacacactcctcgacgaagtctcccgtctcatcacgggaagaaaatgcgcatggccaggtgcggccattgcagggggtgtctgcgtgtgcaagactgcggatcttgcgtaaattgtttggataagccaaaattcggcggcccaaacaccaagaaacaatgctgcgtgtatagaaaatgcgacaagattgaggcgcgtaaaatggagcggctggcaaagaagggaagaactatagttaagactctgctcccatgggactcagatgagtcacctgaagcttcacccggcccgccggggccccgccgtggagccggagcgggcggaccacgggaggaagtggttgcccacccggggcctgaagagcaggatagcctgttgcagagaaaaagcgcgcgtcgatgcgtcaagcagaggccaagttatgatatttttgaggactcagacgactcggagccgggcggtccacccgccccacggcggaggacaccccgcgagaatgaactaccgttgcccgaaccagaggaacagtcgcggcctcgaaaacctacactgcagccagtgcttcaactcaaggctaggaggcggctcgacaaggacgctttggcccctggtccttttgcctcattccccaatgggtggaccggcaaacagaaatcaccggatggggtccatcgcgtgagagtggactttaaggaggattgcgacttagaaaacgtttggctcatgggcgggctctccgtgctgactagcgtgccaggaggcccgcctatggtttgcctcctgtgcgccagtaagggactccacgaactcgtcttctgccaggtatgttgcgatccttttcaccctttttgcttggaagaggctgaaaggcccctcccccagcatcacgatacatggtgctgccgcaggtgtaagttctgccacgtgtgtggacggaaggggagaggttcaaaacacctgctggagtgtgaacggtgtcgtcacgcataccaccccgcctgcttgggaccttcttatccgacaagggcgacaagaaaacggagacattggatctgctccgcatgtgttaggtgtaagtcctgtggggctacgcccgggaagaattgggacgtggagtggagtggggactactcactgtgcccgcgttgtacccaactctatgaaaaaggtaattactgcccaatctgtacacgatgctatgaagacaacgattatgagagcaaaatgatgcaatgtgcccaatgtgaccattgggttcacgctaaatgtgaaggcctgtctgatgaggattacgagatcctttctggcttgcccgactccgtcctgtacacttgcggtccctgcgcaggggctgcccagccaaggtggcgggaggctctgtccggggctctgcagggtggtttgcgccaggtgctgcaaggattgctctcatctaaagtggtaggcccacttctgctctgcacccaatgcggccctgatggcaagcagttgcatccaggtccgtgcggcctgcaggctgttagtcagcgctttgaagatggacactacaagagcgtccacagcttcatggaagacatggtgggcatcctgatgagacatagcgaggagggcgagaccccagacagacgggcggggggtcagatgaaggggctcttactaaagttgctggaatcggcttttggatggttcgacgcccacgatccaaagtactggcgcaggagcaccaggctgcctaatggggtgctgccgaatgccgttctgccaccatccttggaccacgtctatgcccagtggcgccaacaggaacccgaaacgccagagtccgggcagccgccaggtgatccttcggccgcctttcaaggcaaggaccccgcagccttctcacacttagaggatcctcgccagtgcgccctgtgtttaaagtacggcgacgctgacagtaaagaggctgggagactcctgtatattggccagaatgaatggacccatgtgaactgtgctatctggtcggccgaggtgtttgaagaaaatgacggctcccttaagaacgtgcacgctgcagtcgcaagaggccgtcaaatgaggtgtgagctgtgtctgaagccaggggccaccgtgggctgctgcttgagctcctgcttgagtaattttcacttcatgtgtgcccgcgcatcttactgtatttttcaggatgataagaaggtgttttgccagaagcatacagaccttcttgacggaaaggagattgttaacccagatggctttgatgtacttagacgcgtatacgtggacttcgagggcataaacttcaagcgtaagttcctgacgggcctggaacctgacgccattaatgtgcttattggatcgatccggatcgattcccttgggactctctcagatctgtcagactgtgaaggtaggttgttcccaattggctaccagtgctcaaggctgtattggtcaaccgtggacgccaggcgtaggtgttggtacaggtgccgcattcttgagtacagaccctgggggccacgggaggagcccgcccatctggaggccgcggaggagaatcaaacgatagtgcacagccctgcgccgagtagtgaaccaccagggggggaagaccctcctctggatacagacgtcttagtgcccggcgccccagagcggcactccccgatccagaatctagaccctcctctgagacccgatagcggctccgccccccctccagctccccgcagtttctcgggagctaggattaaggtgccaaattatagcccaagccggcgacctcttggaggggtcagcttcggtccattgccttcgcctgggagcccgtcaagtctgacacaccatatccccaccgtgggcgaccccgattttcctgcacctccacggagaagccgaaggccgtcgccgctcgccccacggcctcctcccagcaggtgggccagcccgcctctaaagacaagcccgcagctgagggtccctccaccaacgagtgtggtaaccgctctcacccccacgagcggagaactggcccctcctggaccagccccatctccacccccccccgaagatctcgggcccgacttcgaagacatggaggtcgtttccggcttatctgccgcagaccttgatttcgctgcatccctgctaggcacggaaccattccaggaagaaattgtggccgccggcgctatggggtccagccacgggggtcccggcgatagttcagaggaagagagcagtccaacctctaggtacatccactttccggtgaccgtggtgtctgcccccggactggctcccagtgccaccccaggcgccccccggatagagcaactggatggcgtcgatgatggcaccgacagtgaagcagaagccgtgcaacaacctaggggccagggaacaccaccctcaggcccgggtgtggtccgcgccggagtgctgggagctgccggcgatcgcgctcggccccccgaggatctcccttcagagatcgtggattttgtgctcaagaaccttggcgggccaggcgacggtggtgccgggcctagagaggagtcgctcccaccagccccacctctagccaatggaagtcagccaagccagggactgacagctagccctgcagatcccacgagaacctttgcgtggctcccgggcgcccccggagtaagggtgctaagtctcgggccggccccagagcccccaaaacccgccactagtaagatcatccttgttaataaattaggtcaggtcttcgtgaagatggctggagagggggaaccggtacccccgccagtcaaacagccccctttgccccccactatcagtcctaccgcccctacgtcatggactcttcctcccgggcccttattgggcgtccttccggttgttggcgttgtccgtcccgcacctccacctcccccccctccactaacccttgtgctgtcttcgggacccgcttctcccccacgccaggccatcagagtcaagcgcgtgagtaccttctccggacgttccccccctgcaccacctccttataaggcgcctcgactcgatgaagatggcgaggcttccgaggacacgccacaggtgcccggactgggctccggaggcttcagcagagtgcggatgaaaactccaacagtgcggggggtcctggaccttgatcgacctggggagcctgccggagaggaaagccccggcccgctgcaagaaagatctccattgttgcccctacccgaagacggccccccgcaggtccctgacggtcctccagaccttttgctcgaaagtcagtggcaccactactctggcgaggcgagcagtagtgaggaggaacctccatctccggacgataaagaaaaccaagcccctaagaggactggaccacacctgaggtttgagatcagcagcgaagatggcttttcagtcgaagcggagagtctggagggcgcgtggagaacgctgatcgagaaggttcaggaggcaagggggcatgcaagattgagacacctctctttttccggcatgtcaggcgcccggcttctggggattcatcacgacgccgtaatttttctggctgagcagcttcctggagctcagcggtgtcaacactataaattcaggtaccaccaacaaggggaggggcaagaggagccccctcttaatccacacggtgctgctcgcgctgaggtgtatctgcgaaagtgtacattcgatatgttcaacttcctggcgagccagcatcgtgtgctgccagagggggcaacatgtgacgaggaggaagacgaagtgcaactcaggagtactcggcgcgccacaagccttgagctgcctatggctatgcgctttaggcacctgaagaagacaagtaaggaggcggtgggggtctatcgctccgctatccatggacgggggctgttttgcaaaagaaacatcgacgcaggggaaatggtgattgaatactccggtatcgttatacgtagcgttctgacagataaacgggagaaattctacgacgggaagggtattggttgctatatgttccggatggatgatttcgacgtggtggacgccacgatgcatggcaacgctgccaggtttatcaatcacagctgcgagccaaactgcttcagtcgcgtgatccatgttgagggccagaagcatatcgttatttttgccctgcggcggattctgcgtggagaggaacttacttatgactacaaattccctatcgaagacgccagtaacaagctcccttgcaattgtggtgccaagcgctgtcgcaggtttctgaactag

SEQ ID NO: 320291 - DNA, 8147 bp, Artificial Sequence
  derived and/or modified sequence
atggccgcagctgctggtggtggcagctgccccggtccaggaagtgctcgtggcagattccccggtcggccaaggggtgccggagggggaggcggtaggggcggtcggggaaatggggcagagagggtcagagtcgctctccggcgtgggggaggggctaccggacctggtggcgcagagccgggagaggatactgctctcttgcgtttgctcggtctcaggcggggtctcagacggctgcggaggctgtgggctggccctagggtgcagcggggtcgcggtcggggtcggggacgcggatggggcccaagtagaggatgtgtgcccgaggaggaaagctccgatggtgagtccgacgaggaggaatttcaaggcttccacagtgacgaagacgttgccccatctagcctgaggtccgccctgcggagccagagaggtcgcgctccccgaggcagaggaagaaaacacaaaactacccctctgccccctcccagactggccgacgtggcacccaccccacctaaaactccggcaagaaagagaggagaggaaggcacagaacgcatggtacaagctctgaccgaactcctgcgcagagcacaggcgcctcaggcccctagaagtagagcctgtgagccttctacaccacgcagatctcgaggcaggcctccagggcgtccggctgggccttgccgacgcaaacaacaagctgtcgtggtcgccgaggccgcagtgaccatcccaaagcccgaacctccaccacccgttgtgccagtaaagcatcagacaggttcttggaagtgcaaagagggaccaggccctggcccaggcactccacggaggggcggacagtcaagtagaggaggcaggggaggccgagggaggggtcgtggcggtgggctgccattcgtgatcaaatttgtgtctagggccaagaaggtcaaaatgggccagctgtccctgggcctggaaagtggacagggacaaggtcaacatgaggagagctggcaggacgtgcctcaacgacgagtcggtagcggccagggtggctccccatgctggaagaaacaggagcagaaattggatgatgaggaggaggaaaaaaaagaagaggaggaaaaagacaaagaaggcgaggaaaaggaggagcgtgctgtcgctgaagagatgatgccggcagcagagaaagaggaggccaaactgcctccaccgccactaactccgcctgcgccatcaccccctccccctctgccacccccatctacttcccctccccctccactttgcccacctccgccacctcctgtgtcgccccctcccttaccatccccaccacctccccctgcccaagaggaacaggaggaaagcccccctcccgtggtaccagcgacgtgcagtagaaaaagggggaggcctcctttgaccccctctcagcgcgctgaaagagaagcagctcgggctggcccagagggtacctccccacctacacctacgcctagcaccgccacagggggacccccagaagattctcccaccgtggctccaaagagtaccacttttttgaagaacatcagacagtttattatgcctgtggtcagcgccagaagctccagagttatcaaaactcctcgccgttttatggacgaggaccctcccaagcctcctaaagtcgaagtcagtccagtgttgcgaccccctatcactacatcaccccctgtgccacaggagccagctccggtccctagtccacctcgggcaccgaccccaccaagcactcccgtcccgctcccagagaagaggcgctcaattctgcgagagcccaccttcaggtggacctcattaactcgcgaactgccaccacctccccctgcgccaccccctccaccagccccatccccaccaccggcacccgcaacatcctccagacggccacttctgcttagggcacctcagtttactccttcagaagcacacttgaaaatttatgaatcagtgttgacgcccccacctcttggcgctcccgaagcgccagagcccgaaccgccacccgctgatgattcccctgctgaaccagagcccagggcagtggggaggactaatcatttatccttaccacgatttgccccagtcgtgactactccggtgaaagctgaggtgtcccctcatggcgctcccgcactgagcaacgggcctcagacccaagcccaactgctgcagccactgcaggccctgcaaactcagctgctgcctcaggcccttcctcctccacagccccagttgcagccccctcccagtccccagcagatgcctccactcgaaaaggctcggatcgccggagtgggcagtctcccactgtctggggttgaggagaagatgttttcactgttaaaacgggctaaggtacagctttttaaaatagatcagcagcaacagcagaaagtggccgcaagcatgccactgagtccaggaggccagatggaagaggtggccggagctgtgaagcagattagtgacaggggaccagtgagatctgaggacgagagcgtagaagcgaaacgggagcgcccatctggccctgagtcccctgtccagggaccacgtatcaaacatgtgtgccgccacgccgcagtggccttagggcaggcccgtgctatggtaccagaggacgtgcctagactaagcgcattgccgctgcgcgaccggcaggacctggcaaccgaggacacatccagtgcgtccgaaacggagtctgtgccgtctagatcccgtcgtggcaaggtggaagcagctggcccaggcggagagagtgaaccaacaggctcaggaggcactttagcccacacgccaaggaggagcctcccctcacaccacggcaagaagatgagaatggcacggtgtggtcattgccgcggatgccttagagttcaggattgcggttcgtgtgtgaattgtctcgacaagcccaaattcggtggacccaataccaaaaaacagtgttgtgtctatcgcaaatgcgataagatcgaggcaagaaaaatggaaaggctagcaaaaaagggaaggaccatcgtcaagacgctattaccttgggactccgacgagtcccccgaggcctcacccggaccacctggccctcgccgaggagcgggagccggtggccctcgggaggaggtcgtcgcccatccaggaccagaggaacaggactccctcctacaacggaaatcagctcgtagatgtgtgaagcagcgccctagctatgacatctttgaagattctgacgactctgaacccggaggccctccggctccaaggcgcagaacccccagagagaatgagctgccgctcccggagcctgaagagcagagtcggcctaggaaacctaccctacagcctgtgctgcagttgaaagcgcgaagacgcttagacaaggacgctctagctcctggcccatttgcgtcattccctaacggctggactggaaaacagaagtcgcccgatggtgttcatcgagtgagagttgactttaaggaagactgtgacctcgagaacgtgtggctcatgggtggcctgtccgttctcactagtgttcctggcggaccacccatggtatgtctattatgcgctagcaaagggttgcatgagcttgtcttttgccaggtgtgctgcgatcccttccaccccttctgtctggaagaagctgaacggccactccctcagcatcacgacacctggtgttgccgcaggtgtaaattctgtcatgtgtgtggcagaaagggcagggggagtaagcacctgctcgagtgcgaaagatgtagacatgcctatcatcccgcttgcttgggtccatcctatccaacacgagccacacgaaaacgcagacactggatctgcagcgcttgtgtccgatgcaagtcatgcggagccaccccagggaaaaattgggatgttgagtggagtggagactatagcttgtgcccgaggtgtactcagctgtatgaaaaagggaactactgcccaatctgcacccgctgttatgaggacaacgattacgagagcaagatgatgcagtgtgctcaatgtgatcactgggtacatgcaaagtgtgagggcctgagtgatgaagactacgagatccttagtggcctccccgattctgtactttatacctgtgggccatgcgccggagcagcacagcccagatggcgagaggcactgtcgggagcactccaggggggtctgcgacaggtgcttcagggactactatccagcaaagttgtggggccactgctgctgtgcactcagtgtgggccagatggcaaacagctgcatcccggaccatgtggcctgcaggctgtgagtcagagattcgaagatggtcactataaatcagtgcactctttcatggaggacatggtcggaattcttatgcggcactccgaggagggtgaaacccctgacagacgggctgggggacagatgaaggggctgttgctcaagctcttggaaagcgcctttgggtggtttgatgctcatgaccccaaatactggagacggtctactagactcccgaacggcgtgcttccaaacgccgtactccctcctagcctggaccacgtctacgcccaatggcggcagcaggagcccgagacccccgaatcaggacagcccccaggagaccccagcgcagcctttcaaggcaaggaccctgctgccttctcccacttggaggatcctcggcagtgtgccttgtgcctcaagtacggcgatgcggacagtaaggaagcaggacgtctcctctacatagggcagaatgagtggacacatgttaactgcgccatttggtctgctgaggtcttcgaagagaatgacggcagcttgaagaacgtgcatgcggcagttgccagaggtcggcagatgagatgtgaactgtgtcttaagcctggagctaccgtgggttgttgtcttagctcctgcctatctaattttcatttcatgtgcgccagagcttcctactgcatatttcaggacgacaaaaaggtgttttgccaaaagcatactgatctactggatgggaaagaaatcgtgaacccagacggtttcgacgtgctacggagggtatacgttgactttgaagggatcaacttcaagcggaaattccttactgggcttgagccagacgccatcaacgtgctcattgggtctattcggattgactccctcgggactctgtccgacctttctgactgcgaaggcaggctattcccaatcggataccagtgctcaaggctttactggagtaccgtcgacgcccgtcgacgatgttggtatagatgcaggattctggaataccggccttggggcccacgcgaggaaccagcccatctggaggcagcagaagaaaaccagaccatcgttcactcccccgcaccttcttcagagccaccaggcggagaagatccccctctggacactgatgtcctcgtcccaggcgctccagaacggcactctcctattcagaacctggacccacctttgcgcccagattccggaagtgccccaccaccggctcctcgcagctttagcggcgctagaataaaagttcccaactatagtccttcgagacgcccactcggaggagtaagcttcggaccattgccttctcccggaagtccgagtagcctaacacatcacataccaactgtcggagatcccgactttccagcacctcctcggagaagcaggcgcccttcaccgctagcaccacgcccacccccatctcggtgggcttctccaccactgaaaaccagtccacagttaagagtcccccctcccacaagtgtggttactgctctgacacccacttccggagaactcgcccctcctggccctgccccaagcccccctcctcctgaggacctggggcctgatttcgaggatatggaagtggtgtctgggttgtctgccgctgacttggactttgctgcttcattactcggcaccgagccattccaggaagaaattgtggctgccggtgctatgggatccagtcatggtgggccaggggactccagcgaagaggagtcgagccctaccagtcggtatatccactttcccgtgaccgttgtgagcgcaccaggcctggccccaagcgccacaccaggcgcacctaggatcgagcagctggacggcgttgatgacggtacagactctgaggcagaggccgtccagcaacccagaggacaaggcactcccccatcaggaccaggagtggtacgcgctggggttctgggggcagccggagaccgcgctcgcccacctgaagaccttcccagcgaaattgtcgattttgtcctgaagaacttgggagggcctggcgacggcggagcaggacccagggaggagtctctgcctccagcccctcccctggctaacggctcacagccctcccagggactcaccgccagtcccgctgaccccacccgcactttcgcttggctgccgggtgctccaggggtgcgcgtcctgtccctgggacctgccccagagccgcctaaacctgcaacctctaagattattcttgtcaataaactgggccaggtatttgttaagatggcgggagagggcgagccagtcccccctccggtgaagcagccccctctgcctccaaccattagccctacagcaccaacatcttggacacttcccccagggcctctactcggtgtgttgcctgtggtgggcgtggtgagaccggctcctccccctccacctcctccacttacgcttgtgctgtcaagcggtcccgcttccccccctcgacaggcaattcgcgtgaagagagtgagcacctttagcggcaggagtccacccgctccccctccctacaaagcccctagattagacgaagacggtgaagcatccgaggacaccccacaagtaccaggacttggctccggcggattctcacgcgtgcgaatgaagacccccacagtgaggggcgtgttggacctggatagaccaggagagccagcgggtgaggagtctcccggaccactccaggaacgatcccctctcctcccgctgccagaggatggaccaccccaggtacctgacggaccccctgatctgctgctagagtcccaatggcatcattactcaggcgaggccagtagtagcgaggaggagccccctagcccagatgacaaagaaaaccaggctcccaagagaactgggccacacctcagattcgaaatatccagcgaagatgggtttagcgtggaggcagagagcctggaaggtgcctggcgcaccctcattgagaaggtccaggaagcacgaggccatgccaggttaagacacctctccttctcgggcatgtctggggctcggctgctcggtattcatcacgatgccgtgatctttctggccgaacaactcccgggagcccaaagatgccagcactacaagttcagatatcaccaacagggggaggggcaggaagaacctccgctgaacccacacggcgcagctagggcagaggtctatctgcgaaaatgtacgtttgacatgttcaacttcctggctagtcaacatcgtgtgcttccagaaggcgctacatgcgacgaggaagaggatgaggtacaacttcgctctacccgacgtgccacctccttagagctgcctatggcaatgcgcttcagacatctgaagaaaacctcaaaggaagccgtcggtgtgtaccggagtgctattcacgggagggggctcttctgcaagaggaatatagatgcaggggagatggtgattgagtactcaggtatcgtgatccgatccgtgctgactgataagcgtgagaaattttatgacggtaagggaattggctgctacatgtttcgcatggatgactttgacgttgtcgacgcgacgatgcacggaaatgcagctagattcattaaccactcttgtgaacctaactgcttttctagggtgatacacgtggagggccagaaacatatagtcatctttgctctgcgcagaattctgcgaggagaggaactcacttatgactacaagtttcctatcgaggatgccagcaataaattaccgtgtaactgcggagccaagagatgcaggagatttctgaatta

SEQ ID NO: 320292 - DNA, 8148 bp, Artificial Sequence
  derived and/or modified sequence
atggccgccgccgccggcggcggcagctgccccggccccggcagcgccagaggcagattccccggcagacccagaggcgccggcggcggcggcggcagaggcggcagaggcaacggcgccgagagagtgagagtggccctgagaagaggcggcggcgccaccggccccggcggcgccgagcccggcgaggacaccgccctgctgagactgctgggcctgagaagaggcctgagaagactgagaagactgtgggccggccccagagtgcagagaggcagaggcagaggcagaggcagaggctggggccccagcagaggctgcgtgcccgaggaggagagcagcgacggcgagagcgacgaggaggagttccagggcttccacagcgacgaggacgtggcccccagcagcctgagaagcgccctgagaagccagagaggcagagcccccagaggcagaggcagaaagcacaagaccacccccctgcccccccccagactggccgacgtggcccccaccccccccaagacccccgccagaaagagaggcgaggagggcaccgagagaatggtgcaggccctgaccgagctgctgagaagagcccaggccccccaggcccccagaagcagagcctgcgagcccagcacccccagaagaagcagaggcagaccccccggcagacccgccggcccctgcagaagaaagcagcaggccgtggtggtggccgaggccgccgtgaccatccccaagcccgagccccccccccccgtggtgcccgtgaagcaccagaccggcagctggaagtgcaaggagggccccggccccggccccggcacccccagaagaggcggccagagcagcagaggcggcagaggcggcagaggcagaggcagaggcggcggcctgcccttcgtgatcaagttcgtgagcagagccaagaaggtgaagatgggccagctgagcctgggcctggagagcggccagggccagggccagcacgaggagagctggcaggacgtgccccagagaagagtgggcagcggccagggcggcagcccctgctggaagaagcaggagcagaagctggacgacgaggaggaggagaagaaggaggaggaggagaaggacaaggagggcgaggagaaggaggagagagccgtggccgaggagatgatgcccgccgccgagaaggaggaggccaagctgccccccccccccctgaccccccccgcccccagcccccccccccccctgcccccccccagcaccagcccccccccccccctgtgcccccccccccccccccccgtgagccccccccccctgcccagccccccccccccccccgcccaggaggagcaggaggagagccccccccccgtggtgcccgccacctgcagcagaaagagaggcagaccccccctgacccccagccagagagccgagagagaggccgccagagccggccccgagggcaccagcccccccacccccacccccagcaccgccaccggcggcccccccgaggacagccccaccgtggcccccaagagcaccaccttcctgaagaacatcagacagttcatcatgcccgtggtgagcgccagaagcagcagagtgatcaagacccccagaagattcatggacgaggacccccccaagccccccaaggtggaggtgagccccgtgctgagaccccccatcaccaccagcccccccgtgccccaggagcccgcccccgtgcccagcccccccagagcccccaccccccccagcacccccgtgcccctgcccgagaagagaagaagcatcctgagagagcccaccttcagatggaccagcctgaccagagagctgcccccccccccccccgcccccccccccccccccgcccccagccccccccccgcccccgccaccagcagcagaagacccctgctgctgagagccccccagttcacccccagcgaggcccacctgaagatctacgagagcgtgctgacccccccccccctgggcgcccccgaggcccccgagcccgagcccccccccgccgacgacagccccgccgagcccgagcccagagccgtgggcagaaccaaccacctgagcctgcccagattcgcccccgtggtgaccacccccgtgaaggccgaggtgagcccccacggcgcccccgccctgagcaacggcccccagacccaggcccagctgctgcagcccctgcaggccctgcagacccagctgctgccccaggccctgccccccccccagccccagctgcagcccccccccagcccccagcagatgccccccctggagaaggccagaatcgccggcgtgggcagcctgcccctgagcggcgtggaggagaagatgttcagcctgctgaagagagccaaggtgcagctgttcaagatcgaccagcagcagcagcagaaggtggccgccagcatgcccctgagccccggcggccagatggaggaggtggccggcgccgtgaagcagatcagcgacagaggccccgtgagaagcgaggacgagagcgtggaggccaagagagagagacccagcggccccgagagccccgtgcagggccccagaatcaagcacgtgtgcagacacgccgccgtggccctgggccaggccagagccatggtgcccgaggacgtgcccagactgagcgccctgcccctgagagacagacaggacctggccaccgaggacaccagcagcgccagcgagaccgagagcgtgcccagcagaagcagaagaggcaaggtggaggccgccggccccggcggcgagagcgagcccaccggcagcggcggcaccctggcccacacccccagaagaagcctgcccagccaccacggcaagaagatgagaatggccagatgcggccactgcagaggctgcctgagagtgcaggactgcggcagctgcgtgaactgcctggacaagcccaagttcggcggccccaacaccaagaagcagtgctgcgtgtacagaaagtgcgacaagatcgaggccagaaagatggagagactggccaagaagggcagaaccatcgtgaagaccctgctgccctgggacagcgacgagagccccgaggccagccccggcccccccggccccagaagaggcgccggcgccggcggccccagagaggaggtggtggcccaccccggccccgaggagcaggacagcctgctgcagagaaagagcgccagaagatgcgtgaagcagagacccagctacgacatcttcgaggacagcgacgacagcgagcccggcggcccccccgcccccagaagaagaacccccagagagaacgagctgcccctgcccgagcccgaggagcagagcagacccagaaagcccaccctgcagcccgtgctgcagctgaaggccagaagaagactggacaaggacgccctggcccccggccccttcgccagcttccccaacggctggaccggcaagcagaagagccccgacggcgtgcacagagtgagagtggacttcaaggaggactgcgacctggagaacgtgtggctgatgggcggcctgagcgtgctgaccagcgtgcccggcggcccccccatggtgtgcctgctgtgcgccagcaagggcctgcacgagctggtgttctgccaggtgtgctgcgaccccttccaccccttctgcctggaggaggccgagagacccctgccccagcaccacgacacctggtgctgcagaagatgcaagttctgccacgtgtgcggcagaaagggcagaggcagcaagcacctgctggagtgcgagagatgcagacacgcctaccaccccgcctgcctgggccccagctaccccaccagagccaccagaaagagaagacactggatctgcagcgcctgcgtgagatgcaagagctgcggcgccacccccggcaagaactgggacgtggagtggagcggcgactacagcctgtgccccagatgcacccagctgtacgagaagggcaactactgccccatctgcaccagatgctacgaggacaacgactacgagagcaagatgatgcagtgcgcccagtgcgaccactgggtgcacgccaagtgcgagggcctgagcgacgaggactacgagatcctgagcggcctgcccgacagcgtgctgtacacctgcggcccctgcgccggcgccgcccagcccagatggagagaggccctgagcggcgccctgcagggcggcctgagacaggtgctgcagggcctgctgagcagcaaggtggtgggccccctgctgctgtgcacccagtgcggccccgacggcaagcagctgcaccccggcccctgcggcctgcaggccgtgagccagagattcgaggacggccactacaagagcgtgcacagcttcatggaggacatggtgggcatcctgatgagacacagcgaggagggcgagacccccgacagaagagccggcggccagatgaagggcctgctgctgaagctgctggagagcgccttcggctggttcgacgcccacgaccccaagtactggagaagaagcaccagactgcccaacggcgtgctgcccaacgccgtgctgccccccagcctggaccacgtgtacgcccagtggagacagcaggagcccgagacccccgagagcggccagccccccggcgaccccagcgccgccttccagggcaaggaccccgccgccttcagccacctggaggaccccagacagtgcgccctgtgcctgaagtacggcgacgccgacagcaaggaggccggcagactgctgtacatcggccagaacgagtggacccacgtgaactgcgccatctggagcgccgaggtgttcgaggagaacgacggcagcctgaagaacgtgcacgccgccgtggccagaggcagacagatgagatgcgagctgtgcctgaagcccggcgccaccgtgggctgctgcctgagcagctgcctgagcaacttccacttcatgtgcgccagagccagctactgcatcttccaggacgacaagaaggtgttctgccagaagcacaccgacctgctggacggcaaggagatcgtgaaccccgacggcttcgacgtgctgagaagagtgtacgtggacttcgagggcatcaacttcaagagaaagttcctgaccggcctggagcccgacgccatcaacgtgctgatcggcagcatcagaatcgacagcctgggcaccctgagcgacctgagcgactgcgagggcagactgttccccatcggctaccagtgcagcagactgtactggagcaccgtggacgccagaagaagatgctggtacagatgcagaatcctggagtacagaccctggggccccagagaggagcccgcccacctggaggccgccgaggagaaccagaccatcgtgcacagccccgcccccagcagcgagccccccggcggcgaggacccccccctggacaccgacgtgctggtgcccggcgcccccgagagacacagccccatccagaacctggacccccccctgagacccgacagcggcagcgcccccccccccgcccccagaagcttcagcggcgccagaatcaaggtgcccaactacagccccagcagaagacccctgggcggcgtgagcttcggccccctgcccagccccggcagccccagcagcctgacccaccacatccccaccgtgggcgaccccgacttccccgccccccccagaagaagcagaagacccagccccctggcccccagacccccccccagcagatgggccagcccccccctgaagaccagcccccagctgagagtgcccccccccaccagcgtggtgaccgccctgacccccaccagcggcgagctggccccccccggccccgcccccagcccccccccccccgaggacctgggccccgacttcgaggacatggaggtggtgagcggcctgagcgccgccgacctggacttcgccgccagcctgctgggcaccgagcccttccaggaggagatcgtggccgccggcgccatgggcagcagccacggcggccccggcgacagcagcgaggaggagagcagccccaccagcagatacatccacttccccgtgaccgtggtgagcgcccccggcctggcccccagcgccacccccggcgcccccagaatcgagcagctggacggcgtggacgacggcaccgacagcgaggccgaggccgtgcagcagcccagaggccagggcaccccccccagcggccccggcgtggtgagagccggcgtgctgggcgccgccggcgacagagccagaccccccgaggacctgcccagcgagatcgtggacttcgtgctgaagaacctgggcggccccggcgacggcggcgccggccccagagaggagagcctgccccccgccccccccctggccaacggcagccagcccagccagggcctgaccgccagccccgccgaccccaccagaaccttcgcctggctgcccggcgcccccggcgtgagagtgctgagcctgggccccgcccccgagccccccaagcccgccaccagcaagatcatcctggtgaacaagctgggccaggtgttcgtgaagatggccggcgagggcgagcccgtgcccccccccgtgaagcagccccccctgccccccaccatcagccccaccgcccccaccagctggaccctgccccccggccccctgctgggcgtgctgcccgtggtgggcgtggtgagacccgcccccccccccccccccccccccctgaccctggtgctgagcagcggccccgccagcccccccagacaggccatcagagtgaagagagtgagcaccttcagcggcagaagcccccccgccccccccccctacaaggcccccagactggacgaggacggcgaggccagcgaggacaccccccaggtgcccggcctgggcagcggcggcttcagcagagtgagaatgaagacccccaccgtgagaggcgtgctggacctggacagacccggcgagcccgccggcgaggagagccccggccccctgcaggagagaagccccctgctgcccctgcccgaggacggccccccccaggtgcccgacggcccccccgacctgctgctggagagccagtggcaccactacagcggcgaggccagcagcagcgaggaggagccccccagccccgacgacaaggagaaccaggcccccaagagaaccggcccccacctgagattcgagatcagcagcgaggacggcttcagcgtggaggccgagagcctggagggcgcctggagaaccctgatcgagaaggtgcaggaggccagaggccacgccagactgagacacctgagcttcagcggcatgagcggcgccagactgctgggcatccaccacgacgccgtgatcttcctggccgagcagctgcccggcgcccagagatgccagcactacaagttcagataccaccagcagggcgagggccaggaggagccccccctgaacccccacggcgccgccagagccgaggtgtacctgagaaagtgcaccttcgacatgttcaacttcctggccagccagcacagagtgctgcccgagggcgccacctgcgacgaggaggaggacgaggtgcagctgagaagcaccagaagagccaccagcctggagctgcccatggccatgagattcagacacctgaagaagaccagcaaggaggccgtgggcgtgtacagaagcgccatccacggcagaggcctgttctgcaagagaaacatcgacgccggcgagatggtgatcgagtacagcggcatcgtgatcagaagcgtgctgaccgacaagagagagaagttctacgacggcaagggcatcggctgctacatgttcagaatggacgacttcgacgtggtggacgccaccatgcacggcaacgccgccagattcatcaaccacagctgcgagcccaactgcttcagcagagtgatccacgtggagggccagaagcacatcgtgatcttcgccctgagaagaatcctgagaggcgaggagctgacctacgactacaagttccccatcgaggacgccagcaacaagctgccctgcaactgcggcgccaagagatgcagaagattcctgaactag

SEQ ID NO: 320293 - DNA, 8148 bp, Artificial Sequence
  derived and/or modified sequence
atggcggcggcggcgggcggcggcagttgccccgggcctggctccgcgcggggccgcttcccgggccggccgcggggcgccggcgggggcgggggccgcggcggacggggcaacggggccgaaagagtgcgggtagctctgcggcgcggcggtggcgcgacggggccgggcggagccgagcccggggaggacacggccctgctccgtttgctggggctccgccggggcctgcgccggctccgccgcctgtgggccggcccgcgggtccagcggggccggggacggggtcggggccggggctggggcccgagtcgaggctgcgtgccggaggaggagagcagtgacggggaatccgacgaggaggagtttcagggttttcattcagatgaagatgtggcccccagttccctgcgctctgcgctccgatcccagcgaggtcgagcgccccgaggtcggggtcgcaagcataagacgaccccccttcctcctcctcgcctagcagatgtggctcctacccccccaaagacccctgcccggaaacggggtgaggaaggcacagaacggatggtgcaggcactgactgaacttctccggcgggcccaggcaccccaagcaccccggagccgggcatgtgagccctccaccccccggcggtctcggggacggcccccaggacggccagcaggcccctgcaggaggaagcagcaagcagtagtggtggcagaagcagctgtgacaatccccaaacctgagcccccacctcctgtggttccagtgaaacatcagactggcagctggaaatgcaaggaggggcccggtccaggacctgggacccccaggcgtggaggacagtcaagccgtggaggccgtggaggcaggggccgcggccgaggtggtgggctcccctttgtgatcaagtttgtttcaagggccaaaaaagtaaagatgggacaattgtccttgggactcgaatcaggtcaaggtcaaggtcaacatgaggaaagttggcaggatgtcccccaaagaagagttggatctggacagggagggagcccttgctggaaaaagcaggaacagaagctggatgacgaggaagaagagaagaaagaagaagaagaaaaagacaaggagggagaagagaaggaagaaagagctgtagctgaggagatgatgccagctgcggaaaaggaagaggcaaagctgccaccaccgcctctgactcctccagccccttcacctcctccacccctcccacccccttcgacatctcctccacccccactctgccctccaccaccacccccagtgtccccaccacctctaccatcccctccaccgcctcctgcccaagaggagcaggaggaatcccctcctcctgtggtcccagctacgtgctccaggaagaggggccggcctcccctgactcccagccagcgggcggagcgggaagctgctcgggcagggccagagggcacctctcctcccactccaacccccagcaccgccacgggaggccctccggaagacagtcccaccgtggcccccaaaagcaccaccttcctgaagaatatccggcagtttattatgcctgtggtgagtgcccgctcctcccgtgtcatcaagacaccccggcgatttatggatgaagacccccccaaacccccaaaggtggaggtctcacctgtcctgcgacctcccattaccacctccccacctgttccccaggagccagcaccagtcccctctccaccacgtgccccaactcctccatctaccccagttccactccctgagaagagacggtccatcctaagggaacccacatttcgctggacctcactgacccgggagctgccccctcctcccccagcccctccacctcccccggccccctccccaccccctgctcctgccacctcctcccggaggcccctactccttcgggcccctcagtttaccccaagcgaagcccacctgaagatctacgaatcggtgcttactcctcctcctcttggggctcctgaagcccctgagccagagcctcctcctgccgatgactctccagctgagcctgagcctcgggcagtgggccgcaccaaccacctcagcctgcctcgattcgcccctgtggtcaccactcctgttaaggccgaggtgtcccctcacggggctccagctctgagcaacgggccacagacacaggctcagctactgcagcccctgcaggccttgcaaacccagctcctgccccaggcactaccgccaccacagccacagctgcagccaccgccgtcaccacagcagatgcctcccctggaaaaagcccggattgcgggcgtgggttccttgccgctgtctggggtagaggagaagatgttcagcctcctcaagagagccaaagtgcagctattcaagatcgatcagcagcagcagcagaaggtggcagcttccatgccgctgagccctggagggcagatggaggaggtggccggggctgtcaagcagatctccgacagaggccctgtccggtctgaagatgagtcggtggaagctaagagagagcggccctcaggtcccgagtcccctgtgcaaggtccccgcatcaaacatgtctgccgtcatgctgctgtggccctgggtcaggcccgggccatggtgcctgaagatgtccctcgcctcagtgccctccctctccgggatcggcaggacctcgccacagaggatacatcatcggcgtccgagactgagagtgtcccgtcacggtcccggcggggaaaggtggaggcagcaggccctgggggagaatcagagcccacaggttctggagggaccctggcccacacaccccggcgctcactgccctcccatcacggcaagaagatgcgcatggctcgatgtggacactgtcggggctgcctacgtgtgcaggactgtgggtcctgtgtcaactgcctagacaagcccaagtttgggggccctaacaccaagaagcagtgctgtgtataccggaagtgtgacaaaatagaggctcggaagatggaacgactggctaaaaaaggccggacgatagtgaagacgctgttgccctgggattccgatgaatctcctgaggcctcccctggtcctccaggcccacgccggggggcgggagctggggggccccgggaggaggtggtggcccacccagggcccgaggagcaggactccctcctgcagcgcaagtcagctcggcgctgcgtcaaacagcgaccctcctatgatatcttcgaggattcggatgactcggagcccgggggcccccctgctcctcggcgtcggaccccccgagaaaatgagctgccactgccagaacctgaggagcagagccggccccgcaaacctaccctgcagcctgtgttgcagctcaaggcccgaaggcgcctggacaaggatgctttggcccctggcccctttgcttcttttcccaatggctggactggaaagcagaagtctcccgatggtgtgcaccgcgtccgtgtggattttaaggaggattgtgatttagagaacgtgtggctgatggggggcctgagtgtgctcacctctgtgccagggggccccccgatggtgtgcttgctgtgtgccagcaaaggactccacgagctggtgttctgtcaagtctgctgtgacccattccacccattctgcctggaggaggccgagcggcccctgccccagcatcacgacacctggtgctgccgtcgctgcaaattctgccacgtctgtggacgcaaaggtcgtggatccaagcacctcctggagtgcgagcgctgccgccatgcataccacccggcctgtctggggcccagctatccaacccgggccacgcgcaaacggcgccactggatctgttcagcctgtgtgcgctgtaagagctgtggggcaactccaggcaagaactgggacgtcgagtggtctggagattacagcctctgccccaggtgcacccagctatatgagaaaggaaactactgcccgatctgtacacgctgctatgaagacaacgactatgagagcaagatgatgcagtgcgcacagtgcgatcactgggtgcatgccaagtgcgaggggctctcagatgaagactacgagatcctttcaggactgccagactcggtgctgtacacctgcggaccgtgtgctggggcagcgcagccccgctggcgagaggccctgagcggggccctccaggggggcctgcgccaggtgctccagggcctgctgagctccaaggtggtgggcccactgctgctctgcacccagtgtgggccagatgggaagcaactgcacccaggaccctgcggcctgcaagctgtgagtcagcgcttcgaggatggccactacaagtctgtgcacagcttcatggaggacatggtgggcatcctcatgcggcactcggaggagggagagaccccggaccgccgggctggaggccagatgaaggggctcctgctgaagctgctagaatctgcgttcggctggttcgacgcccacgaccccaagtactggcgacggagtacccggctgccaaacggagtccttcccaatgcggtgttgcccccatccctggatcatgtctatgcgcagtggagacagcaggaaccagagaccccagaatcagggcagcctccaggggatccctcagcagcattccagggcaaggatccggctgccttctcacacctggaggacccccgtcagtgtgcactctgcctcaaatacggggatgcagactccaaggaggcggggcggctcttgtacatcgggcagaacgagtggacacacgtcaactgtgccatctggtcggcggaagtcttcgaggagaacgacggctccctcaagaatgtgcatgctgctgtggcccgagggaggcagatgcgctgcgagctctgcctgaagcctggcgccacggtgggctgctgcctgtcctcctgcctcagcaacttccacttcatgtgtgcccgggccagctactgcatcttccaggatgacaagaaagtcttctgccagaaacacactgatctcctggatggcaaggaaattgtgaaccccgatggttttgatgttctccgccgagtctatgtggacttcgagggcatcaacttcaagcggaagttcttgacggggcttgaacccgatgccatcaacgtgctcattggttccatccgcattgactccctgggtactctgtctgatctctcggactgcgagggacggctcttccccattggctaccagtgctcccgtctgtactggagcacagtggatgctcggaggcgctgctggtatcggtgccgaattctggagtatcggccatgggggccgagggaagagccagctcacctggaggctgcagaggagaaccagaccattgtgcacagccccgccccttcctcagagcccccaggtggtgaggaccccccactggacacagatgttcttgtccctggagctcctgagcgccactcgcccattcagaacctggaccctccactgcggccagattcaggcagcgcccctcctccagccccccgttctttttcgggggctcgaatcaaagtgcccaactactcgccatcccggaggcccttggggggtgtctcctttggccccctgccctcccctggaagtccatcttcactgacccaccacatccccacagtgggagacccggacttcccagctccccccagacgttcccgtcgtcccagccctttggctcccaggccgcctccatcacggtgggcctcccctcctctaaaaacctcccctcagctcagggtgccccctcctacctcagtcgtcacagccctcacacctacctcaggggagctggctccccctggcccggccccatctccaccaccccctgaagacctgggcccagacttcgaggacatggaggtggtgtcaggactgagtgctgctgacctggacttcgcggccagcctgctggggactgagcccttccaggaagagattgtagccgctggggccatggggagcagccacgggggcccgggggacagctccgaggaggagtccagccccacctcccgctacatccacttccctgtgactgtggtgtccgcccctggtctggcccccagcgctacccctggagccccccgcattgaacagctggacggcgtggacgacggcactgacagtgaggctgaggcggtgcagcagcctcggggccagggcacgcctccttcggggccaggagtagtccgggcaggggtccttggggctgcaggggacagggcccggcctcctgaggacctgccatcggaaattgtggattttgtgttgaagaacctagggggtcctggggatggaggtgctggccctagagaggagtcactccccccggcgcctcccctggctaatggcagccagccctcccaaggcctgaccgccagcccagctgaccccacccgcacatttgcctggctcccaggggccccaggggtccgggtgttaagccttggccctgcccctgagccccccaaacccgccacatccaaaatcatacttgtcaacaagctggggcaagtatttgtgaagatggctggggagggtgaacctgtcccacccccagtgaagcagccacctttgccccccaccatttcccccacggctcccacctcctggactctgcccccaggccccctcctcggcgtgctgcccgtggtcggagtggtccgccctgccccgcccccgccaccccctcccctgacgctggtgctgagcagtgggccagccagcccgccccgccaggccatccgcgtcaagagggtgtccactttctccggccggtccccgccagcacctcccccatacaaagccccccggctggatgaagatggagaggcctcagaggatacccctcaggttccagggcttggcagtggcgggtttagccgtgtgaggatgaaaacccccacagtgcgtggggtccttgacctggatcggcctggggagcccgctggggaagaaagtcctgggcccctccaggaacggtcccctttgctgccacttccggaagatggtcctccccaggtccccgatggtcccccagacctgctgcttgagtcccagtggcaccactattcaggtgaggcttcgagctctgaggaagagcctccatccccagatgataaagagaaccaggccccaaaacggactggcccacatctgcgcttcgagatcagcagtgaggatgggttcagcgttgaggcagagagcttggagggggcgtggagaactctgatcgagaaagtgcaagaggcccgagggcatgcccgactcagacatctctcctttagtggaatgagtggggcgagactcctgggcatccaccatgatgctgtcatcttcctggccgagcagctccccggagcccagcgttgccagcactataagttccgttaccaccagcagggagagggccaggaggagccgcccctgaatccccatggggctgctcgggcagaggtctatctccggaagtgcacctttgacatgttcaacttcctggcctcccagcaccgggtgctccctgagggggccacctgtgatgaggaagaggatgaggtgcagctcaggtcaaccagacgtgccaccagcctggagctgcccatggccatgcgttttcgtcaccttaagaagacgtccaaagaagctgtgggtgtctacagatcagccatccacgggcgaggcctgttctgtaagcgcaacatcgacgcgggggagatggtcatcgagtactctggcattgtcatccgctcggtgttgactgacaagcgggagaagttctacgatgggaagggcatcgggtgctatatgttccgcatggatgactttgatgtagtggacgccacgatgcatggcaatgccgcccgcttcatcaaccactcctgtgagcccaactgcttctctcgggtcatccacgtggagggccagaaacacattgttatcttcgccctgcgccgcatcctgcgtggtgaggagctcacctacgactacaagttccccatcgaggatgccagcaacaagctgccctgcaactgtggcgccaagcgctgccgtcggttccttaactga

SEQ ID NO: 320294 - DNA, 8469 bp, Artificial Sequence
  derived and/or modified sequence
atggcggcggcggcgggcggcggcagttgccccgggcctggctccgcgcggggccgcttcccgggccggccgcggggcgccggcgggggcgggggccgcggcggacggggcaacggggccgaaagagtgcgggtagctctgcggcgcggcggtggcgcgacggggccgggcggagccgagcccggggaggacacggccctgctccgtttgctggggctccgccggggcctgcgccggctccgccgcctgtgggccggcccgcgggtccagcggggccggggacggggtcggggccggggctggggcccgagtcgaggctgcgtgccggaggaggagagcagtgacggggaatccgacgaggaggagtttcagggttttcattcagatgaagatgtggcccccagttccctgcgctctgcgctccgatcccagcgaggtcgagcgccccgaggtcggggtcgcaagcataagacgaccccccttcctcctcctcgcctagcagatgtggctcctacccccccaaagacccctgcccggaaacggggtgaggaaggcacagaacggatggtgcaggcactgactgaacttctccggcgggcccaggcaccccaagcaccccggagccgggcatgtgagccctccaccccccggcggtctcggggacggcccccaggacggccagcaggcccctgcaggaggaagcagcaagcagtagtggtggcagaagcagctgtgacaatccccaaacctgagcccccacctcctgtggttccagtgaaacatcagactggcagctggaaatgcaaggaggggcccggtccaggacctgggacccccaggcgtggaggacagtcaagccgtggaggccgtggaggcaggggccgcggccgaggtggtgggctcccctttgtgatcaagtttgtttcaagggccaaaaaagtaaagatgggacaattgtccttgggactcgaatcaggtcaaggtcaaggtcaacatgaggaaagttggcaggatgtcccccaaagaagagttggatctggacagggagggagcccttgctggaaaaagcaggaacagaagctggatgacgaggaagaagagaagaaagaagaagaagaaaaagacaaggagggagaagagaaggaagaaagagctgtagctgaggagatgatgccagctgcggaaaaggaagaggcaaagctgccaccaccgcctctgactcctccagccccttcacctcctccacccctcccacccccttcgacatctcctccacccccactctgccctccaccaccacccccagtgtccccaccacctctaccatcccctccaccgcctcctgcccaagaggagcaggaggaatcccctcctcctgtggtcccagctacgtgctccaggaagaggggccggcctcccctgactcccagccagcgggcggagcgggaagctgctcgggcagggccagagggcacctctcctcccactccaacccccagcaccgccacgggaggccctccggaagacagtcccaccgtggcccccaaaagcaccaccttcctgaagaatatccggcagtttattatgcctgtggtgagtgcccgctcctcccgtgtcatcaagacaccccggcgatttatggatgaagacccccccaaacccccaaaggtggaggtctcacctgtcctgcgacctcccattaccacctccccacctgttccccaggagccagcaccagtcccctctccaccacgtgccccaactcctccatctaccccagttccactccctgagaagagacggtccatcctaagggaacccacatttcgctggacctcactgacccgggagctgccccctcctcccccagcccctccacctcccccggccccctccccaccccctgctcctgccacctcctcccggaggcccctactccttcgggcccctcagtttaccccaagcgaagcccacctgaagatctacgaatcggtgcttactcctcctcctcttggggctcctgaagcccctgagccagagcctcctcctgccgatgactctccagctgagcctgagcctcgggcagtgggccgcaccaaccacctcagcctgcctcgattcgcccctgtggtcaccactcctgttaaggccgaggtgtcccctcacggggctccagctctgagcaacgggccacagacacaggctcagctactgcagcccctgcaggccttgcaaacccagctcctgccccaggcactaccgccaccacagccacagctgcagccaccgccgtcaccacagcagatgcctcccctggaaaaagcccggattgcgggcgtgggttccttgccgctgtctggggtagaggagaagatgttcagcctcctcaagagagccaaagtgcagctattcaagatcgatcagcagcagcagcagaaggtggcagcttccatgccgctgagccctggagggcagatggaggaggtggccggggctgtcaagcagatctccgacagaggccctgtccggtctgaagatgagtcggtggaagctaagagagagcggccctcaggtcccgagtcccctgtgcaaggtccccgcatcaaacatgtctgccgtcatgctgctgtggccctgggtcaggcccgggccatggtgcctgaagatgtccctcgcctcagtgccctccctctccgggatcggcaggacctcgccacagaggatacatcatcggcgtccgagactgagagtgtcccgtcacggtcccggcggggaaaggtggaggcagcaggccctgggggagaatcagagcccacaggttctggagggaccctggcccacacaccccggcgctcactgccctcccatcacggcaagaagatgcgcatggctcgatgtggacactgtcggggctgcctacgtgtgcaggactgtgggtcctgtgtcaactgcctagacaagcccaagtttgggggccctaacaccaagaagcagtgctgtgtataccggaagtgtgacaaaatagaggctcggaagatggaacgactggctaaaaaaggccggacgatagtgaagacgctgttgccctgggattccgatgaatctcctgaggcctcccctggtcctccaggcccacgccggggggcgggagctggggggccccgggaggaggtggtggcccacccagggcccgaggagcaggactccctcctgcagcgcaagtcagctcggcgctgcgtcaaacagcgaccctcctatgatatcttcgaggattcggatgactcggagcccgggggcccccctgctcctcggcgtcggaccccccgagaaaatgagctgccactgccagaacctgaggagcagagccggccccgcaaacctaccctgcagcctgtgttgcagctcaaggcccgaaggcgcctggacaaggatgctttggcccctggcccctttgcttcttttcccaatggctggactggaaagcagaagtctcccgatggtgtgcaccgcgtccgtgtggattttaaggaggattgtgatttagagaacgtgtggctgatggggggcctgagtgtgctcacctctgtgccagggggccccccgatggtgtgcttgctgtgtgccagcaaaggactccacgagctggtgttctgtcaagtctgctgtgacccattccacccattctgcctggaggaggccgagcggcccctgccccagcatcacgacacctggtgctgccgtcgctgcaaattctgccacgtctgtggacgcaaaggtcgtggatccaagcacctcctggagtgcgagcgctgccgccatgcataccacccggcctgtctggggcccagctatccaacccgggccacgcgcaaacggcgccactggatctgttcagcctgtgtgcgctgtaagagctgtggggcaactccaggcaagaactgggacgtcgagtggtctggagattacagcctctgccccaggtgcacccagctatatgagaaaggaaactactgcccgatctgtacacgctgctatgaagacaacgactatgagagcaagatgatgcagtgcgcacagtgcgatcactgggtgcatgccaagtgcgaggggctctcagatgaagactacgagatcctttcaggactgccagactcggtgctgtacacctgcggaccgtgtgctggggcagcgcagccccgctggcgagaggccctgagcggggccctccaggggggcctgcgccaggtgctccagggcctgctgagctccaaggtggtgggcccactgctgctctgcacccagtgtgggccagatgggaagcaactgcacccaggaccctgcggcctgcaagctgtgagtcagcgcttcgaggatggccactacaagtctgtgcacagcttcatggaggacatggtgggcatcctcatgcggcactcggaggagggagagaccccggaccgccgggctggaggccagatgaaggggctcctgctgaagctgctagaatctgcgttcggctggttcgacgcccacgaccccaagtactggcgacggagtacccggctgccaaacggagtccttcccaatgcggtgttgcccccatccctggatcatgtctatgcgcagtggagacagcaggaaccagagaccccagaatcagggcagcctccaggggatccctcagcagcattccagggcaaggatccggctgccttctcacacctggaggacccccgtcagtgtgcactctgcctcaaatacggggatgcagactccaaggaggcggggcggctcttgtacatcgggcagaacgagtggacacacgtcaactgtgccatctggtcggcggaagtcttcgaggagaacgacggctccctcaagaatgtgcatgctgctgtggcccgagggaggcagatgcgctgcgagctctgcctgaagcctggcgccacggtgggctgctgcctgtcctcctgcctcagcaacttccacttcatgtgtgcccgggccagctactgcatcttccaggatgacaagaaagtcttctgccagaaacacactgatctcctggatggcaaggaaattgtgaaccccgatggttttgatgttctccgccgagtctatgtggacttcgagggcatcaacttcaagcggaagttcttgacggggcttgaacccgatgccatcaacgtgctcattggttccatccgcattgactccctgggtactctgtctgatctctcggactgcgagggacggctcttccccattggctaccagtgctcccgtctgtactggagcacagtggatgctcggaggcgctgctggtatcggtgccgaattctggagtatcggccatgggggccgagggaagagccagctcacctggaggctgcagaggagaaccagaccattgtgcacagccccgccccttcctcagagcccccaggtggtgaggaccccccactggacacagatgttcttgtccctggagctcctgagcgccactcgcccattcagaacctggaccctccactgcggccagattcaggcagcgcccctcctccagccccccgttctttttcgggggctcgaatcaaagtgcccaactactcgccatcccggaggcccttggggggtgtctcctttggccccctgccctcccctggaagtccatcttcactgacccaccacatccccacagtgggagacccggacttcccagctccccccagacgttcccgtcgtcccagccctttggctcccaggccgcctccatcacggtgggcctcccctcctctaaaaacctcccctcagctcagggtgccccctcctacctcagtcgtcacagccctcacacctacctcaggggagctggctccccctggcccggccccatctccaccaccccctgaagacctgggcccagacttcgaggacatggaggtggtgtcaggactgagtgctgctgacctggacttcgcggccagcctgctggggactgagcccttccaggaagagattgtagccgctggggccatggggagcagccacgggggcccgggggacagctccgaggaggagtccagccccacctcccgctacatccacttccctgtgactgtggtgtccgcccctggtctggcccccagcgctacccctggagccccccgcattgaacagctggacggcgtggacgacggcactgacagtgaggctgaggcggtgcagcagcctcggggccagggcacgcctccttcggggccaggagtagtccgggcaggggtccttggggctgcaggggacagggcccggcctcctgaggacctgccatcggaaattgtggattttgtgttgaagaacctagggggtcctggggatggaggtgctggccctagagaggagtcactccccccggcgcctcccctggctaatggcagccagccctcccaaggcctgaccgccagcccagctgaccccacccgcacatttgcctggctcccaggggccccaggggtccgggtgttaagccttggccctgcccctgagccccccaaacccgccacatccaaaatcatacttgtcaacaagctggggcaagtatttgtgaagatggctggggagggtgaacctgtcccacccccagtgaagcagccacctttgccccccaccatttcccccacggctcccacctcctggactctgcccccaggccccctcctcggcgtgctgcccgtggtcggagtggtccgccctgccccgcccccgccaccccctcccctgacgctggtgctgagcagtgggccagccagcccgccccgccaggccatccgcgtcaagagggtgtccactttctccggccggtccccgccagcacctcccccatacaaagccccccggctggatgaagatggagaggcctcagaggatacccctcaggttccagggcttggcagtggcgggtttagccgtgtgaggatgaaaacccccacagtgcgtggggtccttgacctggatcggcctggggagcccgctggggaagaaagtcctgggcccctccaggaacggtcccctttgctgccacttccggaagatggtcctccccaggtccccgatggtcccccagacctgctgcttgagtcccagtggcaccactattcaggtgaggcttcgagctctgaggaagagcctccatccccagatgataaagagaaccaggccccaaaacggactggcccacatctgcgcttcgagatcagcagtgaggatgggttcagcgttgaggcagagagcttggagggggcgtggagaactctgatcgagaaagtgcaagaggcccgagggcatgcccgactcagacatctctcctttagtggaatgagtggggcgagactcctgggcatccaccatgatgctgtcatcttcctggccgagcagctccccggagcccagcgttgccagcactataagttccgttaccaccagcagggagagggccaggaggagccgcccctgaatccccatggggctgctcgggcagaggtctatctccggaagtgcacctttgacatgttcaacttcctggcctcccagcaccgggtgctccctgagggggccacctgtgatgaggaagaggatgaggtgcagctcaggtcaaccagacgtgccaccagcctggagctgcccatggccatgcgttttcgtcaccttaagaagacgtccaaagaagctgtgggtgtctacagatcagccatccacgggcgaggcctgttctgtaagcgcaacatcgacgcgggggagatggtcatcgagtactctggcattgtcatccgctcggtgttgactgacaagcgggagaagttctacgatgggaagggcatcgggtgctatatgttccgcatggatgactttgatgtagtggacgccacgatgcatggcaatgccgcccgcttcatcaaccactcctgtgagcccaactgcttctctcgggtcatccacgtggagggccagaaacacattgttatcttcgccctgcgccgcatcctgcgtggtgaggagctcacctacgactacaagttccccatcgaggatgccagcaacaagctgccctgcaactgtggcgccaagcgctgccgtcggttccttaactgaggccgtggctgcccaccacgacccctcacacctcctgctgccgtcgctgccatcttgcccctagcctgggggctccctagcccctcccagagcatctcacccccaccctcatgttcagggtggatgtgggcatgcaggtgacaagggccctgcctccacccctccagcccatccagcaatcgccccctttctgccctgggggcccaggatgtagatattgtacaaaggtttctaaatcccttcttttctatgcacttttttatttaagaggtggggtcccaggtgggaacccccccacaataaagtctgtcaatgtttgga

SEQ ID NO: 320295 - DNA, 8148 bp, Artificial Sequence
  derived and/or modified sequence
atggccgccgccgctggcggaggcagttgtccgggtcccggatctgctcgaggacggtttccgggtcggccaaggggagctggtggcggggggggccggggtggtcggggaaatggggccgaacgggtgcgtgtcgccctgcgcaggggcggaggcgccaccggacccggcggagccgagccgggcgaggacaccgcgctgctccggctccttggactcaggaggggactgagaagactgcgcagactgtgggcagggcccagagtccagagaggccggggtagagggagggggagaggatggggtccctcccgcgggtgcgttccagaagaggagtcttctgatggagaaagcgacgaggaggaatttcagggctttcacagcgatgaggacgtggcgccgtcgagtctccgctctgctttgcggagtcaaagaggccgggcacctagagggcgaggcaggaaacacaagaccactcccctgccccctccacgcttggccgatgtcgcgcctacacctccgaaaacccctgcccgcaagcgaggcgaggaggggacggaaagaatggtgcaagccctgactgaactgctgaggagagctcaggcaccacaggctccacgtagtcgggcttgcgaacctagtactccacgccgcagccgggggcgacctcctggaaggcctgctggaccctgtaggagaaaacaacaggccgtggtggtggcagaagccgcagttactattccgaaacctgaacctccgccacccgtagtccctgtgaagcaccagaccggctcctggaaatgcaaggagggtccaggcccaggccctggcacaccacgccgtggaggccaaagctcacgcggaggaaggggaggtaggggtcggggccgggggggcggactgccctttgtcatcaagtttgtgagtagggccaaaaaggtcaaaatgggccagttgtctctggggctggaaagtggacaggggcagggccaacatgaggagagttggcaggatgtgcctcaaaggagggttggtagcggccaggggggctcaccctgctggaaaaaacaggaacagaagttggacgacgaggaagaagaaaaaaaggaggaggaggaaaaggataaagaaggcgaagagaaggaagaaagagctgttgcagaagagatgatgcccgccgcagagaaggaggaagctaagcttccacctcctcccctgacaccgcccgctcctagccctccgccacccctgcctccacctagtacgagcccacccccacctttgtgccccccaccccctccccctgtcagcccaccccccttgccctcacctccacccccaccggcacaggaggaacaggaagagtctcccccccccgtggtgccggccacttgtagcagaaaaaggggaaggccccctctgacaccttcacagcgcgctgaaagggaagctgcccgggcgggacctgagggaactagcccaccaaccccgaccccctctacagcgacgggcggacctcctgaggattctcccaccgtggctcctaaatcaactactttcctaaaaaacataagacagttcataatgccagtggtgagtgctcgtagttcaagagtgatcaaaactcccaggagattcatggacgaggacccacctaagccacccaaagtcgaagtgagtccagtgctacgacctccaataaccacttcaccaccagtgcctcaggaaccagctcctgttccgagcccaccccgtgccccaacaccgcctagcaccccagtgcctctccccgaaaagaggcgctctattctccgagaacctactttccgctggactagtttgacaagggaacttcctccgccacctcctgcccctccacccccaccagccccatccccaccccctgcccccgccacctcctcgagacggccactacttcttagggctccgcagttcactcctagtgaagcccatttgaaaatctatgaaagtgtgttaaccccacctcccctcggagcccctgaagctcctgagcccgaacctcccccggctgacgactcacctgctgagcccgagcccagggctgtcggcagaaccaaccatctctctctgccacgatttgcaccggtggtcacaacccccgtaaaggctgaggtgtccccacacggagcaccagccttgtccaacggtccacagactcaggctcaacttctgcagcccctgcaggcacttcagacacagctgctcccccaggctctgcctcccccacagcctcagttacagcctccgccctctccacagcagatgcctcctttggaaaaggcccggattgcgggggtgggatcactgccgctgagtggtgtggaagagaagatgttcagcctgcttaagcgtgcaaaggtgcagcttttcaagatcgaccaacagcagcagcagaaagtggcagcctcgatgccattatctcccgggggccagatggaagaagttgcgggcgctgtgaagcagatctccgatagggggcctgtacggtcggaagacgagtcagttgaggctaaaagggagaggccatcgggcccagagtctccagtccaagggcctcggattaaacacgtctgtcgccacgccgctgtggccctagggcaggcacgcgctatggtccctgaagatgttccgcgattatcagccctcccgctccgcgaccgacaggatctggctaccgaagatactagtagcgccagcgagacagagtcagtgcctagcaggtcgaggcgtgggaaggtcgaagctgctggacccggcggggagtcagaacccaccggatcgggagggactctagcccatactcctcgcagatcactcccttcccaccatggcaagaaaatgcggatggcccggtgcggacactgccggggttgcctgagagtccaggattgtggcagctgcgtgaattgcctggacaaacccaagtttggaggccccaacacaaaaaaacagtgttgcgtttatcggaaatgtgacaagattgaggcccgcaaaatggaacgtttggccaagaagggccggacgattgtcaagactctgttgccatgggactcggatgagtcacctgaagccagtcccggcccccctggcccaaggcgaggtgcgggagccggcggcccaagagaagaagtggtggcgcatcctggaccagaagaacaagattccctactccagaggaaatctgcaaggcgctgtgttaaacagcgtccctcatacgacattttcgaggattccgatgatagtgagccgggcgggcccccagctcccagaaggaggacacctagagaaaatgagctgccactgccagagccagaagagcagagtcgtccgaggaaacccaccctccagcctgtcctgcagctgaaggccagaaggcggctggataaggatgccctggccccaggcccattcgcaagtttcccaaacggctggacggggaaacaaaagtcccctgacggagtgcatagggttcgcgtcgactttaaggaagactgcgacttggagaacgtgtggctcatgggtggattgtcggtactcaccagcgtcccaggcgggcctcctatggtgtgcctgctgtgtgcctcgaaaggacttcatgagctggtgttctgccaggtatgttgcgacccttttcatcctttctgtctagaggaggccgaaaggcctctcccccaacatcatgacacgtggtgttgccggagatgtaagttttgtcacgtctgcggacgaaaagggcggggatctaagcatctactggagtgtgaacgatgcaggcatgcataccatcccgcgtgcctcggcccatcctaccccaccagggctacaagaaagaggcgccattggatctgctccgcatgtgttcgctgtaaaagctgcggggcaactcctggaaagaactgggacgtggaatggagcggcgactacagcctctgccctcggtgtactcagctctacgagaagggaaactattgtcctatctgcaccaggtgttacgaggacaacgattacgaatcaaaaatgatgcagtgtgctcagtgcgatcactgggtgcacgctaagtgcgaggggctctccgacgaggactatgagatcctctctggtctccctgattccgtgttgtatacctgtgggccttgtgctggcgcggcccaacccaggtggcgggaggctctgagcggagctctgcagggcgggttaagacaggtcctccagggcctccttagttctaaagtcgtgggacccttgcttctgtgcacacagtgtgggccagacggaaaacagctgcaccctggaccatgtggactgcaggcggtttcccagcgattcgaggacggccattataagagtgttcactcttttatggaagatatggtcgggatactgatgaggcacagtgaggagggtgaaactcccgatcggagagcagggggccagatgaaagggctgctgttgaagctccttgagagcgcatttggttggttcgacgcgcacgatcccaaatactggcggagatctacgcggctgccaaacggcgtactgccgaatgccgtgctgcctccttctctggaccatgtgtatgcccaatggcggcaacaagaaccggagacccctgaatccggccagcccccaggggacccctccgctgcctttcaggggaaagatcccgctgcgttttcgcacctcgaagatccgagacagtgtgctctgtgcctgaaatatggcgatgccgactcaaaagaagccggccgcctgctgtacattggacagaatgaatggacacacgtgaactgtgctatttggtcagccgaagtttttgaggaaaacgacggctctctcaaaaatgttcacgctgctgtcgctcgtgggcggcaaatgcgttgtgaactgtgccttaagcctggggccacagtcggatgctgtctctctagctgcctgtcaaacttccattttatgtgtgcccgagcttcctattgtattttccaggacgataagaaggtgttttgccagaaacatactgatctgctggacgggaaagaaatcgtcaatccagatgggttcgatgttctgcgaagggtgtacgtggacttcgaagggattaacttcaaaagaaagtttctaacaggactggagcccgacgctattaatgtgctgatcggatccatcaggattgactccctgggtacactctctgacctgagcgattgcgagggccgcctgtttcccattgggtatcagtgctcccgcctttattggagcacagtagacgcgcggcgccggtgctggtaccgttgtcgcattctggagtaccgaccatgggggccaagggaagagcccgcccaccttgaggccgctgaggaaaaccaaacaatcgtccactcccccgcgcccagcagtgagccccccgggggtgaggatcccccactggacacagacgtgttggtgccaggagcccccgagagacacagtcctattcagaatctcgacccaccccttcggccagactccggatcggctcctccgcccgccccccgctctttttctggagctcgcattaaggtgcccaattactctccctcccggcggccccttggcggggtgagcttcggacccctgccaagtcctggaagcccttcttctctcacccatcacattcccactgtgggcgatccggatttcccggctccaccacggagatcacggcggccaagtcccctggctcccagacccccaccatctcgctgggcctcacccccacttaaaacatcacctcaactgagagtaccaccaccgacaagtgtggtcacggcgctgacaccgacctctggcgagctggcacctcctggacctgctccttctcccccgcctccggaagacctcgggccagactttgaggacatggaggttgtaagtggactttctgcagccgacctggactttgctgcctcgttgctaggcacagaaccctttcaggaagaaattgtcgccgcaggggctatgggatccagtcatggcggccctggtgattctagcgaagaggagtccagtccaacgtcacgttacattcactttccggtgaccgtcgtgtcagcccctggattggcgccaagtgcaacaccaggcgctccacgaattgagcaattggacggtgtcgatgacggtacggattccgaggcagaggcggttcagcaaccacggggccaaggcacacccccatctggccctggagttgttcgggcgggagtcctaggcgcggctggggatagagcccggcccccagaagatctgccaagtgagattgtagacttcgtgctcaagaatctgggaggccctggcgacggaggggctggccctagagaggagagtctcccccccgctccaccccttgccaatggtagccagccaagccagggactaaccgccagccccgccgatcctacgcggacattcgcttggttacccggggcccctggtgtcagggtgttgagtctgggacccgcacccgaaccccccaagcctgctacttccaaaattatcctcgttaataaactgggccaggtttttgtgaagatggccggagaaggcgagcctgtgcctcctccggtgaagcaacccccactcccacctacaattagcccaacagcccccacttcttggactctgcctccaggacctctgttgggagttctgcccgtcgtaggcgtagtaaggccggctcccccaccacctcccccccctctgactttggtactgagcagcggcccagccagtccccccagacaggccattagggtaaagagagtgtccaccttttccggccggtcgcctcccgcccctccaccttataaggcccctaggctggacgaggacggagaagcttccgaggacacaccccaggtgcctggcctgggttccggaggctttagcagagtacgcatgaaaaccccgacggtgaggggcgttcttgatctggatagacccggcgagcccgccggtgaggaatcaccgggccccctgcaggagagatcacccctcctgcctctccctgaagacggacctcctcaggttcccgacggcccccctgatctgctcctcgagtcacagtggcatcattattctggggaagcatctagttcggaggaggagcctccaagccccgacgacaaagagaatcaggcaccaaaaagaaccggaccccacctgagattcgaaatcagctctgaagatgggttctccgtggaggcagagtcactagagggcgcctggcgtactctgattgagaaggtccaggaagcccgtgggcatgctcgactgagacacctaagctttagcggcatgtcaggggcccggttactggggatacatcacgatgctgtgatttttctggccgaacagcttcccggggctcagcgatgtcagcactataagtttcgatatcaccagcagggagaggggcaggaggagccaccgctgaacccccacggggcagcaagagcagaggtgtatcttagaaaatgcaccttcgacatgttcaactttctggctagccagcaccgcgtgcttcctgaaggtgcaacgtgtgatgaagaagaagatgaggtgcagctgcgctccacccggcgggctacaagcttagagctacccatggctatgcgcttccggcatctgaaaaaaactagcaaagaagctgtgggtgtctatagaagcgcaattcacgggaggggactgttctgcaagcgcaacatagacgcgggagagatggtgattgaatatagcggcatcgtgattcgatcagtactgacagacaaaagagagaagttctatgatggtaaggggattggctgttacatgttccggatggatgatttcgacgtggtcgacgcgacgatgcacggtaacgctgctcggttcatcaatcatagctgcgagccaaactgttttagcagagtcattcatgtcgagggccaaaaacacatagttatttttgcgctgaggcgcattctgaggggcgaggaactaacatatgattataagttcccaattgaggacgcgagcaataagctgccctgtaactgcggggccaagagatgtcggcgattcctgaactag

SEQ ID NO: 320296 - DNA, 8148 bp, Artificial Sequence
  derived and/or modified sequence
atggccgccgccgccggcggcggcagctgccccggccccggcagcgccagggggcgcttccctgggaggccccgtggagctggcggtgggggggggagaggaggcagaggaaacggtgctgaaagggtgcgggtggctcttcgacggggcggcggcgccaccggtccaggaggtgcggagccaggggaagacaccgcactccttaggctgttggggctacggcgcggacttcggcgcctgcgccgcctttgggccggccccagggtgcaaaggggccgcggaagaggtcgcggcagggggtggggcccaagtcgaggctgcgtaccagaagaggaaagcagcgatggagaaagcgatgaggaggagtttcagggatttcattccgatgaagatgtggcaccttcatctctgagaagtgccctgcgctcccagagaggcagagcccccagaggcaggggcaggaagcataagacgacaccattgcctcctccacgcctcgctgacgtggcaccaaccccgccaaagacacccgcccgcaagagaggagaggaaggaacagagaggatggtgcaggcactcactgaactcctccggcgcgcacaagccccacaggcacctagatcgagggcgtgcgaaccaagtactccccgacggagccgtggcagaccacccgggcggcccgccgggccatgccggaggaaacagcaggctgtcgtagttgccgaagcggctgtgacgataccgaagcctgaacccccacctccggtagtgccagtgaagcaccaaacaggaagctggaaatgcaaggagggacccgggcctggtcccggtaccccccgtcgcggaggtcaatcttctagaggtggtaggggtggcagagggagaggccgcggcggggggttgcctttcgtgataaagtttgtgtctcgggccaagaaagttaaaatgggccagctcagtctaggcctcgaaagtggacagggccaaggacagcatgaagaatcatggcaggacgttccccaaaggcgtgtagggagcggacaggggggtagcccttgctggaaaaaacaggagcagaaactcgatgatgaggaggaagagaaaaaggaggaggaagaaaaggataaggagggggaggaaaaggaggaacgcgccgtggcggaagagatgatgccggccgcggagaaggaagaagctaagttgccccccccaccgcttaccccccctgcaccttcaccccccccgccacttcccccacctagcacaagcccaccaccacctttatgtccaccacctccgcccccggtgtcgccccctcccctaccgtccccccctcccccaccggcccaggaggagcaagaagaatcgcccccccccgtggtgccagccacttgcagtcgcaagaggggacggccacctctgaccccatcacaacgtgccgagcgtgaggccgcacgtgccggtcctgaggggaccagcccccccaccccaactccgtctacagcaacaggagggcctccggaggacagccccactgtggcccctaaatctaccacatttctcaagaatataaggcaatttatcatgcctgttgtttctgctcgctcctctagagtcatcaagacccccaggaggtttatggacgaagacccgccaaagcccccaaaagtggaggtgtcccccgtcctgagacccccaataactaccagccctcctgttcctcaggagccagcccctgtcccaagccccccacgtgccccaaccccaccaagcactccagtgccacttccagagaagaggcgctccatcttgcgcgaacccacctttagatggacctcgttgactagggagcttcctccacctccaccagccccaccgcctcctcccgcaccctctcccccacccgcccccgcaacctcctcacgccggccactgctcctgagagcccctcagtttacccccagtgaagctcacctcaagatctacgagtccgtcctgacccccccacccctaggcgctccagaagcccccgaacctgagcctcccccagccgacgacagtcccgctgagcccgagcctagggctgtgggaaggacaaaccatctctccttaccacgttttgccccagttgtgaccacgcctgtgaaagccgaggtgagccctcacggtgcacctgcgctatccaatggcccccagacccaggcacaactgcttcagccccttcaggcactgcagactcagctgctccctcaggccctacctcccccacaacctcaactgcagcctccccccagcccccagcaaatgccgccattagagaaagccaggatcgccggcgtgggctccctgcctcttagcggcgtggaggagaaaatgttttcattgctgaagagggccaaggtgcagttattcaagatcgaccagcaacaacagcagaaagttgctgcctcgatgcccttgtccccaggcggccaaatggaggaggtggctggagccgtgaaacagatatcagacagaggcccagtgaggtccgaggacgagagcgtagaagccaagcgcgagcgaccttctggaccggagtctcccgtgcaaggtccccggatcaaacacgtctgccgacatgctgccgtggccctgggccaggcacgtgccatggtgccagaggacgtgccaagattaagtgccctgccattacgggatcgccaagacctggctacggaggacaccagctcagcctcagagaccgagtccgtccctagccgttcacggcggggtaaggtcgaagctgccggtcctggtggcgagtcagaaccaaccgggtctggggggacccttgctcacactcctaggcgaagtctccctagccaccatggcaagaagatgcgcatggctagatgcgggcactgccgcggctgcttaagggtccaggattgcggttcgtgtgtgaattgcctggataaacccaaattcggcgggcctaacaccaagaagcagtgctgcgtataccgcaaatgcgataagatcgaggctcgtaaaatggaacgactcgctaagaagggcaggaccatagttaagacattactgccatgggactctgatgagtcaccggaggcctcaccaggtcctccggggcctcgaaggggcgcaggggcagggggtcccagggaggaagtggttgctcaccccggacccgaagaacaggactctctcttgcagcgcaaaagtgcgcgcaggtgcgtcaaacagagaccctcttacgacatcttcgaggacagtgacgactcagaacccggcggccccccagcccctcgtcggagaacacctagggaaaatgagctaccacttcccgaaccagaggagcagagtcgaccgagaaaacctactctgcaaccagtgctgcaacttaaagcgcggcgacgcctagataaggatgcactggcccctgggccattcgcctcctttcccaacggatggaccgggaagcaaaagtcaccagatggagtgcaccgtgtcagggtggattttaaggaggattgcgatctggaaaacgtatggttgatgggaggcctaagcgtactcacttctgtgcccgggggcccgccaatggtgtgccttttgtgcgcttccaaaggactccatgagctcgtcttctgtcaggtttgttgtgatccctttcaccccttctgcctggaggaagcagaacgccctctgccccaacaccacgatacgtggtgttgtcgccgttgcaagttttgtcacgtctgtggccgcaagggccgtgggagcaagcacctgcttgaatgtgaacggtgccgccatgcctatcatcctgcctgcctgggcccaagttaccccacccgagccaccagaaaacgaagacattggatttgctcggcctgtgtaaggtgtaaaagctgcggcgcaacgcctgggaagaattgggatgtagagtggtctggggactattctttatgcccccgatgcactcaattgtacgagaagggaaactattgtcctatctgcacccggtgctatgaagataatgactacgagagtaagatgatgcagtgcgctcaatgcgatcactgggtgcatgcgaagtgcgaaggcctttcagacgaggactacgagatcctgagtggcctgccagactctgttttgtatacttgtgggccctgtgctggagcggcccagcctaggtggagagaggcactcagcggggcgctgcagggcggactccggcaggtcctgcaggggctgctgagttccaaggtagttggcccattgctcctctgtactcagtgcggcccagacggtaagcagctgcaccccggcccatgcggcctgcaggccgttagtcagcgctttgaggatggccattacaagagcgtgcattctttcatggaggacatggttggtattctaatgagacatagcgaagaaggggagactcctgaccggagagccggaggacaaatgaagggcttacttttgaagctgttggagtcagccttcggttggtttgacgctcatgacccaaagtattggcgacgctccacaaggctgcccaacggcgttttgcctaatgccgtgctgcctccgtccttggaccacgtgtacgcacagtggcgccagcaagaaccggagacccccgagagcggacagccacctggtgaccctagtgccgccttccaagggaaggatcccgcggctttttctcatctggaggatccgcgccagtgtgctctgtgcctgaaatatggggatgctgacagcaaggaggctggtagactgttgtacattggccagaacgagtggacacatgtgaattgcgccatctggtctgctgaagtcttcgaagagaacgacggcagtctaaaaaacgtgcatgccgctgtcgcccgaggcaggcagatgcggtgcgaattatgtttaaagccgggcgctacagtcggctgctgcctgtcctcctgtctgtccaacttccactttatgtgtgccagagcctcatactgtattttccaggacgataagaaagtattttgccaaaagcataccgacctgctcgacggcaaggaaatcgtgaatccagacggcttcgatgtgctccgtcgggtgtatgtagacttcgagggcattaacttcaaacgtaagttcttgaccgggctggagcccgatgcgataaacgtcctgatagggtcaataaggatagacagcctggggaccctatcggatctcagtgattgcgagggtagactgtttcccatagggtaccagtgttctcggctctattggtctaccgtggatgcacgacgccgctgttggtatagatgtcgtatcttggaatacagaccttgggggcctagggaggagccagcgcatctcgaggctgctgaagaaaatcagacaatcgtgcattctcctgcgcccagcagtgagcctcctggtggcgaggatcctcccttggacactgatgtgctcgtccccggtgcccctgaaagacacagccctatacagaatcttgacccacctttacgccccgacagcggttctgctcctccgcccgcacctcgctcattcagcggcgcccggatcaaagtgcccaattatagtccaagccgaagacctctcggaggcgtcagcttcggtcctttgccaagtcccggctctccaagctccctgacccatcacattccgacagtaggagaccctgattttcccgctccacctcgtaggtcccgacgtccatcgccacttgctccccgcccccccccttcccgctgggcaagcccccctctgaagacatcccctcagttgcgagtcccaccccccacttctgtcgtgactgccttgacgcccaccagtggagagcttgcaccgccaggcccagcgccttccccacctcctccagaggacctcggaccagacttcgaggatatggaggtggtaagtgggctgtcagcggccgatctggactttgccgcatctttactgggcacagagcccttccaggaagagattgtggccgccggtgctatgggaagttcacacggtggccctggggacagctcagaggaggaatcctcccctaccagtagatatattcactttcctgtgactgtggtgtccgcccctggcttggcccccagcgccactccaggcgcgccaagaatcgaacagctcgatggcgtggatgacggcaccgattccgaagccgaggcggtgcagcagccgcggggccaaggcaccccaccaagcgggccaggggtcgtgagagctggcgtgttaggggctgccggtgaccgggcacgtccacccgaggatctgccgtccgaaattgtggacttcgtcttgaagaacctgggcggtcctggcgacggcggggctgggccacgcgaagagtccctgcccccagctccccccctggccaatggctcacagcccagccagggacttaccgctagtcctgcggaccctactagaaccttcgcttggctgcctggagcccctggagtgcgggttctgagcttggggcctgcgccagagcctcccaagcctgccactagcaagattatcctggtcaacaaacttggacaggtgtttgtcaagatggcaggcgaaggagaaccagtgccccctcccgttaagcagcctcccctgcccccgacgatatctcccactgcaccaaccagttggactctgccacctggcccgctccttggagtgctgcccgttgtgggcgtggtcagaccagcgcccccacccccgccaccacctctcaccttggtgctatctagtgggcccgcaagtcctccccggcaagcaataagggtgaagcgcgtgtccaccttctccggacgctcccccccagcaccaccaccatataaggctccccgtttagacgaggatggcgaggccagcgaggacacccctcaggtcccaggtctgggatcgggaggcttctcccgcgtccggatgaaaaccccaaccgtgcgcggcgtgctagatctcgatagacctggggagcccgcaggcgaagagagcccagggccacttcaagagcggtcgcccctgctccctttacccgaagacgggccacctcaggttccggatggtccaccagacttgctgctggaatctcagtggcatcattatagcggggaagcctcatcttccgaggaggaacccccctctcctgacgataaggagaaccaggctcccaaaagaacaggcccccaccttagatttgaaatcagcagcgaggacggattcagcgttgaagctgaatccctggagggggcgtggcggactctgattgaaaaagtgcaagaggccagaggacacgcgcggctgcgccacctctctttctccggcatgtctggcgccagactattaggaattcatcatgacgctgtcattttccttgcagagcagcttccaggggcgcaaaggtgccaacactataagtttagatatcatcaacagggcgaaggccaggaggaacctcccctaaatccacatggagcagccagagccgaggtgtaccttcgcaaatgcacattcgacatgtttaattttttagctagccagcacagggttctccctgaaggagccacttgtgacgaggaggaggacgaggtacagctgcgctctacacgcagagctactagtttggagcttccaatggcaatgagatttcggcacctgaagaagacatccaaagaagccgtgggggtttaccgctcggcgatccacggtaggggattgttttgtaaaaggaacatcgatgctggcgagatggtgatcgaatatagcggaattgtgatccggtcagtgctgacggacaagcgcgagaaattctacgatggcaaaggaatcggctgttatatgtttcgaatggacgattttgatgtggtcgacgcaacaatgcacggtaacgctgccaggtttatcaatcattcatgcgaacctaattgcttctctcgcgtgatccacgtggagggacagaaacacatcgtgatttttgctctgcgtcgcatcctgagaggcgaggagctcacctatgactataaattcccaatcgaagacgcgagtaataaattgccctgcaactgtggtgcgaagcgttgtcggaggtttctcaactag

SEQ ID NO: 320297 - DNA, 8148 bp, Artificial Sequence
  derived and/or modified sequence
atggccgctgcagcaggcggtggctcatgtccgggaccaggtagtgcccgaggaaggttcccaggccgaccacgtggagcaggagggggaggaggtcgagggggaaggggcaacggagcggaacgcgtgagagtagctctgcggagaggcggtggcgcaacgggtcctggcggagcggagccaggagaagatacagcacttctccggctcctcggcctgagacggggacttaggagactgcgccgtctgtgggccggtccacgagtccagagaggccgaggccgtggtcgcggacgaggctggggccctagcagggggtgtgtccccgaggaggagagttccgacggggaatccgatgaagaggaatttcagggattccattccgacgaggatgtcgccccttcaagcttacggagcgcactgaggagccaaaggggtcgtgcccctagagggagagggcgaaaacacaaaacaaccccactgccacctccgagactcgccgatgtggctcctactccacccaaaaccccagccagaaagcgtggcgaggaaggcacagaacggatggttcaggctctgactgaactgctccggagagctcaggctccacaggcgccaaggagccgagcttgcgaaccttcaacccctaggaggagtcggggaagacccccagggagaccagccggaccctgccggaggaaacagcaggccgtggtggtagccgaagccgctgtgacaatacccaaaccagagccaccccctccagtagtccccgtaaaacaccaaacaggctcttggaagtgtaaagagggtcctggccctggaccagggacaccgcgtaggggaggtcagagttcacgcggtgggcgaggcggacgcggacgagggcgaggaggcggacttccctttgtgatcaaatttgtaagtagggctaaaaaggttaagatgggccagctcagccttggtcttgaatccggccaggggcagggtcaacatgaggaatcctggcaggacgtgccccaacggagagtgggcagcgggcaagggggatctccttgttggaagaaacaggagcagaaactcgatgatgaggaagaagaaaaaaaagaggaggaagagaaagacaaagagggagaggagaaagaggagagggcggtcgccgaagagatgatgcccgcagctgagaaggaggaggcaaagctgcctcccccacccttaactccccctgctccctcccctccccctccgcttcctcctccttcgacatcccctcccccaccattgtgcccgccaccacccccacccgtgagcccccctccactgccttcccctcctcccccacccgcacaggaagagcaggaagagtcccctccacccgtggtacccgcaacctgtagccgcaagagaggcaggcctccactcacccctagccagcgcgcagaacgcgaagctgccagggcaggccctgagggaacctcaccacccacgcctactccgagcactgccactggcggaccacccgaggactccccgactgtcgcccctaagtcaacgacctttctgaagaacatccgacagtttatcatgcctgtcgtgtccgccaggtctagtcgcgtgattaagacaccacggaggtttatggatgaagatcctcctaagcccccaaaagtcgaggtgtcacctgttctccgtccgcctatcactacgtctcctcctgtccctcaggagcccgcacccgtgccaagcccacctagggcccctactccaccctccacacccgtgcccctgccggaaaagaggcgctcgatcctgcgtgaacccacgttcagatggacctctctgactagagaacttccaccaccaccacccgcacctccacctccacccgcaccgtctcccccacccgctcccgcaacgagctcaaggcggcctttgctgctgcgggcaccccagttcacacctagcgaagcccacctcaagatctacgagagtgtgctgacgcccccaccactgggagctcctgaggctccagaacctgagcccccacccgcagatgactctcctgccgaaccagagcctcgagccgtggggagaacaaatcatctgtcactgcccagattcgcacctgtcgtgaccacacccgtgaaggcagaggtgtccccccacggggctcccgctctctctaatggaccacagacacaggcgcagctgcttcagcccctgcaagcgctccagacccagctgttgccacaggcactacccccaccacagcctcagctgcagcctccaccctccccacaacagatgccacctctggagaaggctcgtatagccggagttgggtccctgcccctaagcggtgtggaggagaagatgtttagtctgctgaagcgagctaaagtgcaacttttcaaaattgaccagcagcagcaacagaaagtggcagccagtatgcccctaagtcccggagggcagatggaagaggttgccggagctgtcaagcagatcagtgacagaggcccagtaaggagcgaggatgaatcagtcgaggccaaaagagaaaggccgtccggtcccgaatcccctgttcagggcccaagaattaagcatgtgtgcagacacgccgcagtggctctcggtcaggctcgggctatggttccggaggacgtcccccgtctaagtgcgctgccgctgcgcgatcgccaagacctggcaacggaagatacttctagtgccagcgagaccgagtccgttccctctcggagtaggcggggtaaagtggaggcggctggcccaggcggagagagcgagcccacaggaagtggcggtacattggcgcacacgcctaggcgatctctaccaagccatcacggcaagaagatgcgtatggcacgctgtgggcactgtcgaggatgcctcagggtgcaggattgcgggtcctgtgtcaattgtcttgacaagccaaaattcggagggcctaacactaaaaagcagtgttgcgtgtatagaaagtgcgataaaattgaggcccgaaagatggagagactggccaaaaaaggcaggacaatagttaaaaccctcttgccttgggactcagatgagtctcccgaggctagccccggtcctcctggcccacggagaggagctggtgccggagggcctcgagaggaggtggtggctcaccccggtcctgaggagcaagactccctgctgcaacgcaaatcggcccgtaggtgtgtgaaacaacggccaagctatgatattttcgaagacagcgacgactcggaaccagggggtccacctgcccctcgccgtagaaccccacgcgagaatgagttacccctgcctgagccagaggagcaatcaagaccacggaagcccacacttcagccggtgttgcagctgaaagcccgaaggcgacttgataaggacgccctggcccctggccctttcgcatccttccctaatggctggaccggtaaacaaaaatctccggacggcgtacacagagtcagggtagatttcaaggaagattgcgatctggagaacgtttggctgatgggcggactctctgtgctcacctctgtgccgggtggtccacccatggtgtgcctcctgtgcgctagcaagggactacacgaactggtgttctgccaggtttgttgcgacccatttcatcccttctgcctcgaggaggccgaaaggcccctcccacagcaccacgacacctggtgttgccgacgatgtaagttttgccacgtgtgtggcaggaagggtcgtggctctaagcacctgctcgagtgtgagagatgtagacacgcttaccatcctgcctgcctgggtccctcctaccccacccgtgcaactcgtaaacgtcgccattggatttgcagcgcctgcgtgagatgcaaatcttgcggtgcgacaccgggaaagaactgggacgtggagtggtctggagattatagcctctgcccacgctgtacccagctgtatgagaagggtaactattgtcccatctgcacgcgctgctacgaggacaatgactatgaatcaaagatgatgcaatgcgcccagtgtgatcattgggtgcacgcgaagtgcgagggtctgagcgacgaggactatgaaatccttagtggtctcccagacagtgtactctacacctgcggaccctgcgctggagcagcacagccaaggtggcgggaagcactgtccggcgctctacaagggggtctgaggcaggtcctgcagggactgctgagcagcaaagtggtgggccctctgctgctctgcactcagtgcggccctgacggtaaacaattgcatcctggtccctgcggcttacaagccgtcagtcagcgatttgaagacgggcactacaagagcgtgcattcgttcatggaagatatggttggaatcttaatgcgccattccgaggagggggaaacccctgatagaagagcgggaggccagatgaaagggctgctgctcaaactgctcgagagcgccttcggttggtttgacgcccatgaccctaagtattggcgcagatcaactaggctcccgaacggggtgctacctaacgctgttttaccccctagtcttgatcacgtctatgcccagtggcggcagcaggagccagagacaccagaatcaggccaacccccaggtgaccccagcgcagccttccaagggaaagacccggctgccttcagccacctggaagatcctcgacagtgcgccctctgcttgaaatatggtgatgccgactctaaggaagccggtaggttgctgtatattggccaaaatgaatggacgcatgtgaactgcgctatctggagcgccgaggtgtttgaagagaatgatggctccctcaagaatgtacacgccgcagtggcgagaggacgtcaaatgcgctgtgaactttgcctaaagcccggagcaactgtaggctgctgcttgtcctcctgtctgtccaacttccactttatgtgtgccagagcaagctattgcatttttcaggacgacaaaaaggttttttgccagaagcacaccgacctactggatggcaaggagattgtgaatccggacggtttcgacgttctcaggagagtctacgtggattttgaaggcatcaatttcaagcgcaagttcctgaccgggctggagcccgacgccatcaacgtgttaatcggaagcatcaggatcgatagcctaggcaccctgagcgatttatctgactgtgaagggcgattgttcccaattgggtatcagtgcagtcgtctgtactggtccactgtcgatgccagaagacgatgttggtaccgctgccgcatcctcgaatatcgcccatggggacccagagaggagccagcccatcttgaggccgcagaggaaaaccagacaatcgttcactcaccagccccatcctcagaaccccctggcggagaggacccaccgctcgataccgatgttctcgtgcctggagcccctgaacgtcactctcctattcagaatctggaccctcccctacgacctgactcaggcagcgcacctccaccggctcctcggagtttcagtggagcaaggatcaaagtgccaaactattctcccagccgcaggccactcggcggtgtctccttcggccctctgcccagccccggttcaccatcatcactaacccatcatatccccactgttggcgatcccgattttcctgcaccccctaggagatcccgtcgacccagtcctctggctccgagaccccctccaagccgatgggccagccccccactgaagacctctccccagcttcgtgtgcccccacccacaagcgttgtgacagccctgacacccacctccggcgaacttgcacccccaggccctgccccaagtcccccacccccagaagatctgggtcccgacttcgaagacatggaagttgtgtccgggttatctgctgcagatttggatttcgccgctagcctgctggggacagagccatttcaagaggaaatcgtggctgcaggggctatggggtcatcacacggaggaccgggtgattcatccgaagaggaaagcagcccaacctcccggtacattcattttcccgtcaccgtggtttctgcccctggtctggccccatctgccacccccggtgcaccccgtatcgaacaacttgatggggtggacgatggcacagacagcgaggccgaggcggtccagcagccacgcggacagggcaccccaccctcagggcctggtgttgtgagagcgggagtgttaggggctgccggagatcgggctcgaccgccagaggacttgccatctgaaatcgtggacttcgttctcaagaatttgggtggaccgggagatgggggtgcgggtccaagagaagaatcgttgcctcctgctcctcccctcgccaatgggagccagcctagccagggtttaaccgcctcaccagccgaccccacccggaccttcgcatggctgcccggtgctcccggtgtgcgtgtcctttctctgggcccagcccctgaacctcctaagcctgctaccagcaaaattattctggttaacaaactgggccaggtgttcgtcaaaatggccggagagggagagcctgtccccccacccgtcaagcagccgccactgcctccaactattagccccacagctccaacatcgtggaccctgccaccagggcctctcctgggtgtccttccggtggttggcgttgtgaggcctgctcctcctcccccacccccaccactgaccctggtcctcagctcaggccctgcatcaccccctaggcaggctatacgggtcaagcgtgtgtctaccttctccggacgtagtccacccgcaccacccccatacaaagctccacgcctggacgaagatggagaggcttcagaggacacacctcaagtgcccggattgggctctgggggttttagccgagtgcgtatgaaaaccccaacagtccgtggtgtgctggatttagatcgacctggggagccggctggagaagaatcacccggaccactgcaggagaggagcccactgctacccctcccggaggatggaccgcctcaggtgcccgacggcccaccggatctccttctggagagtcagtggcaccattactccggtgaggcaagttcctcggaggaagagcccccttcccccgatgataaggagaaccaagcccctaagagaacaggacctcacttaagattcgagattagcagcgaagatggtttcagcgtggaagccgaaagtttggagggagcttggagaacgctgattgagaaagtccaggaggctcggggtcacgctcgcctaagacatctttctttttcaggtatgagcggagctcgcctacttggaattcatcacgacgcagttatcttcctggctgaacagctaccaggtgctcagaggtgccagcattacaaatttagataccaccagcagggcgagggccaggaagaacctcctctgaaccctcatggtgcggctagagcagaggtttatcttcgtaaatgcaccttcgatatgttcaacttcctcgcgtctcagcatcgtgtgctcccagaaggagccacgtgcgacgaggaagaagatgaggtgcagctcagatctaccaggagagccactagcctggaactccccatggctatgagattccggcaccttaagaagactagcaaggaagcggttggtgtctatcgatcagcgatccacggtaggggactattttgtaaaagaaatatcgatgccggtgaaatggtgatagagtatagcggaatcgttattcggtctgtgctgacagacaagagagaaaaattctatgatggtaaaggtattgggtgctacatgtttcgcatggatgattttgacgtggttgacgccaccatgcacggaaatgccgctcgctttattaaccactcatgcgagccaaactgtttctcccgcgtgatccatgtcgagggacaaaaacatatcgtgatatttgctcttcgcaggattttgcggggtgaagaactcacatatgattataaatttcctatcgaagacgccagcaacaagctgccgtgcaactgcggagccaagcggtgtcggaggtttttaaattac

SEQ ID NO: 320298 - DNA, 300 bp, Artificial Sequence
  derived and/or modified sequence
atgtgggagcactggctgggggacagcggcgtgggcctgctgatgaggctgcggagtgatgtgtcccaggtgtgcctgcagctgaatgcctgtgtggaggtggaggaccccctgcccggctggctgacccactgcctgcccggccgggccggctgctggtgggaggcctctgtgcccttccacggctgcttccagtacagctgtggcatccccccagagcaggtgatgaaggagaacaaggccgaggccgctgtgctcttcaccgccagcttccgcagccacgtgcccagcgacctgtag

SEQ ID NO: 320299 - protein, 582 aa, Artificial Sequence
  derived and/or modified sequence
MAAAAGGGSCPGPGSARGRFPGRPRGAGGGGGRGGRGNGAERVRVALRRGGGATGPGGAEPGEDTALLRLLGLRRGLRRLRRLWAGPRVQRGRGRGRGRGWGPSRGCVPEEESSDGESDEEEFQGFHSDEDVAPSSLRSALRSQRGRAPRGRGRKHKTTPLPPPRLADVAPTPPKTPARKRGEEGTERMVQALTELLRRAQAPQAPRSRACEPSTPRRSRGRPPGRPAGPCRRKQQAVVVAEAAVTIPKPEPPPPVVPVKHQTGSWKCKEGPGPGPGTPRRGGQSSRGGRGGRGRGRGGGLPFVIKFVSRAKKVKMGQLSLGLESGQGQGQHEESWQDVPQRRVGSGQGGSPCWKKQEQKLDDEEEEKKEEEEKDKEGEEKEERAVAEEMMPAAEKEEAKLPPPPLTPPAPSPPPPLPPPSTSPPPPLCPPPPPPVSPPPLPSPPPPPAQEEQEESPPPVVPATCSRKRGRPPLTPSQRAEREAARAGPEGTSPPTPTPSTATGGPPEDSPTVAPKSTTFLKNIRQFIMPVPLSQSLLLPMTLQLSLSLGQWAAPTTSACLDSPLWSPLLLRPRCPLTGLQL

SEQ ID NO: 320300 - DNA, 1749 bp, Artificial Sequence
  derived and/or modified sequence
atggcggctgcggcaggaggtgggtcctgtcccggaccagggagcgcccgaggccgcttccccggacgccctcgaggtgctgggggaggcggggggcgcggcggacgcgggaacggcgctgaaagagtccgcgtggcccttagaagaggtggaggagccaccggaccaggaggggcggagcctggcgaggacacagcccttttaagacttctcgggctgcgaaggggccttcggagactcaggaggctctgggccggtccgagggtccagcgtggaagaggcaggggccgtgggcgcggctggggcccatctcgcggttgtgtgccagaggaggagagttcagacggggagtctgacgaagaggagtttcaggggtttcatagcgatgaagatgtggccccgagctctttacgaagtgcccttcgcagccagcggggccgggctcctagagggcggggccgtaaacataagactactcctctgcctccacccagactcgcggacgtcgcaccgacgccgcctaaaacaccggcacggaagcggggggaagagggaactgagcggatggtacaagccctaacggagctgctgcgccgcgcccaggcgccccaggcgccgcgatcacgagcatgcgagcccagcacacctagaagaagccggggaagaccccccggcaggcccgctgggccatgtaggaggaaacagcaggctgttgtggtggccgaagccgctgtaacaatccccaagcctgaaccgccaccacccgtggttcctgtgaagcaccagacggggtcatggaaatgtaaggaaggccctggccccggcccaggaacaccccgtcggggcggccagtcatctagaggaggacggggcgggcgcggaagaggcaggggtggtggcttacctttcgttattaagttcgtgtctcgcgccaagaaggtgaaaatgggacagcttagcctcggccttgaatcaggtcaaggtcagggacagcatgaagagtcttggcaagacgtgcctcagaggcgcgttggaagcgggcaaggaggttctccatgttggaaaaagcaggagcagaaactggatgatgaagaagaggaaaaaaaggaagaggaggaaaaggacaaagagggggaggaaaaggaagaacgcgctgtggctgaagaaatgatgccagctgcggagaaggaggaagccaagctgccccctcccccgctgacccccccagctccgagccccccccctccattgcctccaccctccacaagccctcccccccctctgtgcccacctcctccccccccagtgagcccccctcccctgccaagcccccccccaccccccgcccaggaagaacaggaagaaagccccccacctgtcgtcccagctacatgctcccggaagagaggcagacctcccttaacacctagtcagagagccgagagggaggctgccagagccggcccggaaggaacatccccccccaccccgaccccttccactgccaccggcggccctcccgaagacagcccaaccgtcgcaccaaagagcaccaccttcctgaagaatattcggcaatttatcatgccagtcccactgtcacagtcactgctcctgcccatgaccctgcagctgagcctgagcctggggcaatgggccgcccctactaccagcgcctgccttgactcacccttatggtcaccactgctgctccggccacggtgcccacttactggcttgcagctgtag

SEQ ID NO: 320301 - DNA, 1749 bp, Artificial Sequence
  derived and/or modified sequence
atggctgctgctgctgggggcggcagctgccccggccctggcagcgcccggggccgcttccctggccggcccagaggagctgggggcggcggcggccggggcggcagaggaaatggagctgagcgggtgcgggtggccctgcggcggggcggcggggccaccggccctgggggcgctgagcctggagaggacacagccctgctgcggctgctgggcctgcggcggggcctgcggcggctgcggcggctgtgggccggcccccgggtgcagaggggccggggccggggccggggccggggctggggccccagccggggctgtgtgcctgaggaggagagcagtgatggagagagtgatgaggaggagttccagggcttccacagtgatgaagatgtggcccccagcagcctgcggagcgccctgcggagccagaggggccgggccccccggggccggggcaggaagcacaagaccacccccctgcccccaccccggctggctgatgtggcccccaccccacccaagaccccagccaggaagagaggagaggagggcacagagaggatggtgcaggccctgacagagctgctgcggcgggcccaggccccccaggcccccaggagccgggcctgtgagcccagcaccccaagaagaagccggggccggcccccaggccggcctgctggcccctgcaggaggaagcagcaggccgtggtggtggccgaggccgctgtgaccatccccaagccagagcccccacctcctgtggtgcctgtgaagcaccagacaggctcctggaagtgcaaggagggccctggccctggccctggcaccccccggcggggcggccagagcagccggggcggccggggcggccggggccggggccggggcggcggcctgccctttgtgatcaagtttgtgtcccgggccaagaaggtgaagatgggccagctgagcctgggcctggagagcggccagggccagggccagcacgaggagagctggcaggatgtgccccagaggagagtgggcagcggccagggcggcagcccctgctggaagaagcaggagcagaagctggatgatgaggaggaggagaagaaggaggaggaggagaaggacaaggagggggaggagaaggaggagagagctgtggccgaggagatgatgcctgctgctgagaaggaggaggccaagctgcccccaccacccctgaccccaccagcccccagccccccaccacccctgcccccacccagcaccagccccccaccacccctgtgccccccacctcctcctcctgtgagccccccacccctgcccagccccccacctcctccagcccaggaggagcaggaggagagccccccacctgtggtgcctgccacctgcagcaggaagaggggccggccccccctgacccccagccagagagctgagcgggaggccgcccgggccggccctgagggcaccagcccccccacccccacccccagcacagccactggaggccccccagaggacagccccaccgtggcccccaagagcaccaccttcctgaagaacatccggcagttcatcatgcctgtgcccctgagccagagcctgctgctgcccatgaccctgcagctgagcctgagcctgggccagtgggccgcccccaccaccagcgcctgcctggacagccccctgtggagccccctgctgctgcggccccgctgccccctgaccggcctgcagctgtag

SEQ ID NO: 320302 - DNA, 1749 bp, Artificial Sequence
  derived and/or modified sequence
atggccgccgccgccggcggcggcagctgccccggccccggcagcgcccgtggccggttccctgggagaccccgtggcgcaggtggaggtggtgggagaggcggccgcgggaatggagctgagagggtgagagtggcactgcgccgaggtggaggagccacaggaccaggtggtgcagagccgggggaggacactgcgctactccgcctgctcggcctgaggcgcggactgcgtagactgagacggttgtgggcaggaccccgggttcagcgtggccggggaaggggcaggggccggggctgggggccaagcagagggtgcgtgcctgaggaggaaagttctgacggagaatctgatgaggaagagtttcagggttttcatagtgacgaagacgtcgccccttcttccctgcgcagcgctttacgctctcaacgtgggagggctccacggggccgcggccgcaagcacaaaaccactccgctgccacctcccagactggcggacgtggctcctacaccacctaagactcctgcccgaaagcgtggcgaggagggcacggaacgcatggtgcaggcccttaccgagctcctccgcagagcacaagccccacaagcaccccgtagcagagcctgtgagccctctactccaaggaggtcacgcggtaggcctccaggacggcctgccggcccctgtcgcaggaagcaacaggcagtcgttgttgccgaagcagccgtgactattcctaaaccagaacccccccctcctgtggttccagttaagcaccagaccggttcctggaaatgcaaagaaggccctggcccgggccccggtacgcccagaaggggtgggcagtcctctaggggtgggagaggaggccgaggcagaggccgaggcggcgggctcccattcgtaataaaattcgtgtctcgggccaagaaggtgaagatgggccagctgtctctggggctagagagtggccaaggacagggtcagcatgaggaaagctggcaggacgtaccccagcgcagggtcggctctggacagggcggatccccctgctggaagaaacaggaacaaaaactcgatgacgaggaggaagagaagaaagaggaggaggagaaggataaggaaggcgaggagaaggaggaacgggccgtggctgaggagatgatgccagccgccgaaaaggaagaggctaagctacctccacccccgctaacccccccggcgccgtcacccccgccacccctaccgccaccaagcacaagccctcctcccccactgtgcccaccaccccctccccccgtgagtccacctcccctgccaagtccccccccgccgcccgctcaggaagagcaagaagagtcaccaccccctgtagttcccgccacatgcagccgcaagcgcggccggccacctctgacaccgtcacagagggccgagcgggaagccgcccgcgcgggcccagaggggacatctccaccgactccgacaccctctacggcaactggagggccgcctgaggacagccccacggtggcccctaagtccacgacttttttaaaaaatattcggcaattcataatgcctgtccctctaagtcagtccttgctgttacctatgaccttgcagctgtccctgagtcttggccagtgggccgctcccaccacttcggcatgcctggactctcctctctggagtcctttactactcaggcctaggtgcccactcaccggattgcagctctag

SEQ ID NO: 320303 - DNA, 1749 bp, Artificial Sequence
  derived and/or modified sequence
atggccgcagcggcaggcggaggttcctgccccggaccaggaagcgcacgcggtagattccccggacgaccacgcggagctggagggggagggggaagaggaggcagaggcaacggagccgagagagtgagagtagctttgcgcagggggggaggagctacagggcctggaggagccgaaccaggagaagatacagctcttctgagattgctgggactgcgtcgaggattgaggagattaagacgtttatgggcgggacctcgagtgcagcggggtcgcggaagggggagaggaagagggtggggaccctcgcgcggatgtgtgcccgaagaggaatcgtctgatggcgaatctgatgaggaagagttccagggatttcacagtgatgaagacgttgcacccagctccctcaggagtgctctgcgcagccagagaggtcgggcacccaggggacggggtcgaaagcataagaccacgcccctcccccctcctaggctggccgatgtggccccaactcctccaaagaccccagcacgcaagaggggtgaggaggggacggagaggatggttcaggcccttaccgagttgctaaggcgggctcaagcccctcaggctcctagatctagggcttgcgaacctagcaccccacgcagaagtagaggtcgacctcccggacgtcccgctggtccctgcaggcggaaacaacaggctgtagtcgttgcagaagcagccgtgactatacccaagcccgagccacccccacctgtcgtgcccgtcaagcatcagacagggagttggaagtgcaaagaggggccaggaccaggacccggaaccccaagacgaggaggtcagagctcccgagggggacggggaggtagaggtaggggacgcggaggcggtctccctttcgtgatcaagttcgtgagtcgcgcaaaaaaggtgaagatgggtcaacttagcctcggcctggaatctgggcaaggccagggacagcatgaagaatcctggcaggacgtgccacagcggcgagtgggatcaggtcaaggcggaagtccttgctggaagaagcaggagcagaaactggatgatgaagaggaagagaaaaaagaggaagaagagaaagataaagagggcgaagagaaagaagaacgcgcagtcgccgaggagatgatgcctgccgctgaaaaggaagaagccaaattgcctccacctcccctgacaccacccgcaccctcacctcccccaccactgccgccaccctccacgtccccacctccacctctttgccctcctccgccaccccctgtctctccccctcccttaccttccccaccccctcctcccgctcaggaagagcaagaggaatcacccccaccggtcgtgcctgcgacctgctctcggaagagagggcgtcctcctttgacaccatcccagagagccgagagagaagcagccagagccggacctgaggggaccagtccgcctacgccaacccctagcactgccaccggcggaccccctgaggattcgcctaccgtcgcccctaagagtacaacattcttgaaaaacattcgccaatttattatgccagtgccactgagtcagagccttcttctaccaatgaccttgcagttgagcttgtcccttggtcaatgggcggcacccaccacatcagcttgcctggatagcccactgtggtctcctttgctactcaggccaagatgtccattgaccggattgcagttatag

SEQ ID NO: 320304 - DNA, 1749 bp, Artificial Sequence
  derived and/or modified sequence
atggccgccgccgccggcggcggcagctgccccggccccggcagcgccagaggcagattccccggcagacccagaggcgccggcggcggcggcggcagaggcggcagaggcaacggcgccgagagagtgagagtggccctgagaagaggcggcggcgccaccggccccggcggcgccgagcccggcgaggacaccgccctgctgagactgctgggcctgagaagaggcctgagaagactgagaagactgtgggccggccccagagtgcagagaggcagaggcagaggcagaggcagaggctggggccccagcagaggctgcgtgcccgaggaggagagcagcgacggcgagagcgacgaggaggagttccagggcttccacagcgacgaggacgtggcccccagcagcctgagaagcgccctgagaagccagagaggcagagcccccagaggcagaggcagaaagcacaagaccacccccctgcccccccccagactggccgacgtggcccccaccccccccaagacccccgccagaaagagaggcgaggagggcaccgagagaatggtgcaggccctgaccgagctgctgagaagagcccaggccccccaggcccccagaagcagagcctgcgagcccagcacccccagaagaagcagaggcagaccccccggcagacccgccggcccctgcagaagaaagcagcaggccgtggtggtggccgaggccgccgtgaccatccccaagcccgagccccccccccccgtggtgcccgtgaagcaccagaccggcagctggaagtgcaaggagggccccggccccggccccggcacccccagaagaggcggccagagcagcagaggcggcagaggcggcagaggcagaggcagaggcggcggcctgcccttcgtgatcaagttcgtgagcagagccaagaaggtgaagatgggccagctgagcctgggcctggagagcggccagggccagggccagcacgaggagagctggcaggacgtgccccagagaagagtgggcagcggccagggcggcagcccctgctggaagaagcaggagcagaagctggacgacgaggaggaggagaagaaggaggaggaggagaaggacaaggagggcgaggagaaggaggagagagccgtggccgaggagatgatgcccgccgccgagaaggaggaggccaagctgccccccccccccctgaccccccccgcccccagcccccccccccccctgcccccccccagcaccagcccccccccccccctgtgcccccccccccccccccccgtgagccccccccccctgcccagccccccccccccccccgcccaggaggagcaggaggagagccccccccccgtggtgcccgccacctgcagcagaaagagaggcagaccccccctgacccccagccagagagccgagagagaggccgccagagccggccccgagggcaccagcccccccacccccacccccagcaccgccaccggcggcccccccgaggacagccccaccgtggcccccaagagcaccaccttcctgaagaacatcagacagttcatcatgcccgtgcccctgagccagagcctgctgctgcccatgaccctgcagctgagcctgagcctgggccagtgggccgcccccaccaccagcgcctgcctggacagccccctgtggagccccctgctgctgagacccagatgccccctgaccggcctgcagctgtag

SEQ ID NO: 320305 - DNA, 1749 bp, Artificial Sequence
  derived and/or modified sequence
atggcggcggcggcgggcggcggcagttgccccgggcctggctccgcgcggggccgcttcccgggccggccgcggggcgccggcgggggcgggggccgcggcggacggggcaacggggccgaaagagtgcgggtagctctgcggcgcggcggtggcgcgacggggccgggcggagccgagcccggggaggacacggccctgctccgtttgctggggctccgccggggcctgcgccggctccgccgcctgtgggccggcccgcgggtccagcggggccggggacggggtcggggccggggctggggcccgagtcgaggctgcgtgccggaggaggagagcagtgacggggaatccgacgaggaggagtttcagggttttcattcagatgaagatgtggcccccagttccctgcgctctgcgctccgatcccagcgaggtcgagcgccccgaggtcggggtcgcaagcataagacgaccccccttcctcctcctcgcctagcagatgtggctcctacccccccaaagacccctgcccggaaacggggtgaggaaggcacagaacggatggtgcaggcactgactgaacttctccggcgggcccaggcaccccaagcaccccggagccgggcatgtgagccctccaccccccggcggtctcggggacggcccccaggacggccagcaggcccctgcaggaggaagcagcaagcagtagtggtggcagaagcagctgtgacaatccccaaacctgagcccccacctcctgtggttccagtgaaacatcagactggcagctggaaatgcaaggaggggcccggtccaggacctgggacccccaggcgtggaggacagtcaagccgtggaggccgtggaggcaggggccgcggccgaggtggtgggctcccctttgtgatcaagtttgtttcaagggccaaaaaagtaaagatgggacaattgtccttgggactcgaatcaggtcaaggtcaaggtcaacatgaggaaagttggcaggatgtcccccaaagaagagttggatctggacagggagggagcccttgctggaaaaagcaggaacagaagctggatgacgaggaagaagagaagaaagaagaagaagaaaaagacaaggagggagaagagaaggaagaaagagctgtagctgaggagatgatgccagctgcggaaaaggaagaggcaaagctgccaccaccgcctctgactcctccagccccttcacctcctccacccctcccacccccttcgacatctcctccacccccactctgccctccaccaccacccccagtgtccccaccacctctaccatcccctccaccgcctcctgcccaagaggagcaggaggaatcccctcctcctgtggtcccagctacgtgctccaggaagaggggccggcctcccctgactcccagccagcgggcggagcgggaagctgctcgggcagggccagagggcacctctcctcccactccaacccccagcaccgccacgggaggccctccggaagacagtcccaccgtggcccccaaaagcaccaccttcctgaagaatatccggcagtttattatgcctgtgcccctgagccagagcctcctcctgccgatgactctccagctgagcctgagcctcgggcagtgggccgcaccaaccacctcagcctgcctcgattcgcccctgtggtcaccactcctgttaaggccgaggtgtcccctcacggggctccagctctga

SEQ ID NO: 320306 - DNA, 375 bp, Artificial Sequence
  derived and/or modified sequence
atgaccctgaacgagcacgccgccttcaagcacctgttcaacaaggcacatctggcccccccacttatccatctgaccctgtcaggacattcaacatgcttccgggagcaccgggtgggcggcaaggttaccgaccagcaggacccaaaagctgaagaattctttctcgtccagaacaagatgaaatccctgccgtgtctcctcttgagcacccagaccggtcagccgtctgatttttccatattttccccaccctttcctccattttactccacaaagccccccctgagttcctggccaatccccaacgagccattaggaacgcctcctagaaggggcagaggccgggcggagggtttactgacttctcagtag

SEQ ID NO: 320307 - DNA, 2240 bp, Artificial Sequence
  derived and/or modified sequence
gccagcaggcgatggaatagggactacgagacaccctgcagcctctcctgggaggacaacgccccttctccctctccatgcactcttgaggcagcaaagaggaggcatctggacgcgtttacctcctccccacccccacagcttggccctcactaaactatcttgtgtccttcctcctgctatgattgattcgcccaggaaggagggagcgctctcccctcctctgggaggctggagactcggggacagaagatgcgctggagggaagagaacggagcgtcggacaccagaaaaactttgggggattcggggtgagaaagaaggcgtgaagagagaagggaggctcagcaggggaggaggggcgggggcgggggcgggagcgggaggagtcactgcgccgcggccgcccctccccgccctccactcggcggccccgggtcttcctccccctcctcctccccctcctcctccccctcctcttcctccgcctcctggtgtggctggctgcggccagaatcggagccccaaccgcgctgccggtgagtgaccagccccaggggacagagacgggaggcctgggaccccccctctccagggtggggcctcccgccgtgtctgggaaagtttgcgggcgccccgggacgcgggcatctccagggccgctcggcgcctccccatctccccgcgcccgccctggccgcccccaggggcgccctggggcccgcagagggatggcctcccggcagggactcctcggctcccctctgttctgagactgctgctgggaccggggtccgactctaaagagaaaactcaaacagcaaaaaaaggaatatcgactcagttccgagggcgggggccggggctcgttctcacccgcgcgcggcccctcgacctctcggacccgggccaccagctctgcgcccctcacgcctccctcggggtctctgtgtctctctcccgctcccggactccctcctccttctgactgctgttatttgggctgttgtccctccccgctccctggtacctcagctcggaccttagcctgtgcctgcagcccggagtcccctcctgccctggaaggcaaggagccaggccacggggccacagccgcgggggccaccacactggcccaaatatttcctgcaggtatgaccattcactgggtattggggttgggtcccttggacccacaaactgaacctcgtgggtacagggaaaaattaaaatatattcctccttaggattgtactgcttctgttggtttggcatctttttatttttaacccttctaactgtgctttcttcgaataataatgatacttcatgtaattagcgtttctaatatctaaagacagaagaaggaagaaaataaacggaagagagagaatgcttgctaaaaatactcatttttgacttcagtccacactcgactgttttcctgggagatagaagttcagtgtagcttgttttcagactaaccgcaaacacgattacagcctcctccaggctagaagttttaatttgcctgacatgcagcacactgtttgttggtattcccagcctggcattcccgtctgcatagctctagtctccctcccaactcccccacccccactttctttctcataaaagggagctgtgaaaacaaggcaatgggagaggctcaaacgagctggaccacataataaaaacagccctacttattttaatcctgaggctatggactcccctggactctgattgggtggaagaattgtttagttcatttgtgtggtttttctgtcagtagttattatggttgaatcagtgtttccatgacagtcttgcttctgtgggcacgatggggagcctgttaattctcggatgggtctggacagatcaagtctggagtctggagagatttttcagggcttgacctgggctgatattgcaaacctctgcacactcactcagaaccagagcagccgggagcagcctgagctggggttttcttccacatgatctgggaagaaaaagctctaccaaggagcgaactgtgtgagcatggttgctgggggatgttgaatgttttacgtttttaggaagaacacacttctcaaaactttagccattcctgtttccatacaaacaataaatgtggttgtaacaaatgtagtagatcagattctgaacaaccccttaaaaaacaggtccaagtattgaaccatttggaaataaagattttattttatttg

SEQ ID NO: 320308 - protein, 537 aa, Artificial Sequence
  derived and/or modified sequence
MCDLRRPAAGGMMDLAYVCEWEKWSKSTHCPSVPLACAWSCRNLIAFTMDLRSDDQDLTRMIHILDTEHPWDLHSIPSEHHEAITCLEWDQSGSRLLSADADGQIKCWSMADHLANSWESSVGSLVEGDPIVALSWLHNGVKLALHVEKSGASSFGEKFSRVKFSPSLTLFGGKPMEGWIAVTVSGLVTVSLLKPSGQVLTSTESLCRLRGRVALADIAFTGGGNIVVATADGSSASPVQFYKVCVSVVSEKCRIDTEILPSLFMRCTTDLNRKDKFPAITHLKFLARDMSEQVLLCASSQTSSIVECWSLRKEGLPVNNIFQQISPVVGDKQPTILKWRILSATNDLDRVSAVALPKLPISLTNTDLKVASDTQFYPGLGLALAFHDGSVHIVHRLSLQTMAVFYSSAAPRPVDEPAMKRPRTAGPAVHLKAMQLSWTSLALVGIDSHGKVLSTRILAMKASLCKLSPCTVTRVCDYHTKLFLIAISSTLKSLLRPHFLNTPDKSPGDRLTEICTKITDVDIDKVMINLKTEEFVL

SEQ ID NO: 320309 - DNA, 2861 bp, Artificial Sequence
  derived and/or modified sequence
ggccccacgcctcaggcgactggttgttaccgaggaagatggcggcgccagacccgaggcgctagggaagatcgcaccgcggacgcccgctgagcttggcgcacgggccgaccaggagctggtgactgccctcatgtgtgatttgcggcggccagcggcaggtgggatgatggacttggcctacgtctgtgagtgggagaaatggtccaagagcacccactgcccatcggtgcccctggcctgcgcctggtcctgccgaaatctcatcgccttcaccatggacctgcgcagcgatgaccaggacctgacccgcatgatccacatcctggacacggagcacccctgggacctgcactcgatcccctcagagcaccacgaggccatcacctgcctggagtgggaccagtcaggctcccggctcctgtcagcagatgccgacgggcagatcaagtgctggagcatggcggaccacctggctaatagctgggagagctcagtgggcagcctagtggagggggaccccattgtggccctgtcctggctgcacaatggtgtgaaactggccctgcacgtggagaagtcgggcgcctccagcttcggggagaagttctcccgagtcaagttctcaccgtcgctcacgctgttcggcggcaagcccatggagggctggatcgcggtgacggtcagcggcctggtcaccgtgtccctgctgaagcccagcgggcaggtgctgacgtccaccgagagcctgtgccggctgcgcggccgcgtggccctggccgacatcgccttcaccggcggcggcaacatcgtggtggccacggcggacggcagcagcgcgtcgcccgtgcagttctacaaggtgtgcgtgagcgtggtgagcgagaagtgccgtatcgacacggagatcctgccctccctgttcatgcgctgcaccaccgacctcaaccgcaaggacaagtttcccgccatcacccacctcaagttcctggcccgggacatgtcggagcaggtgcttttgtgcgcgtccagccagaccagcagcatcgtggagtgctggtccctgcgcaaggagggactccccgtgaacaacatcttccagcagatctcccccgtggttggcgacaaacagcccacaattctcaaatggcggatcctatcggccaccaacgatctggaccgtgtgtcggccgtggcgctgcccaagctgcccatctcgctcaccaacaccgacctcaaggtggccagcgacacacagttctaccctggcctcgggctggccctggccttccacgacggcagcgtccacatcgtgcaccggctctcactgcagaccatggccgtcttctacagctccgcggccccgaggcctgtggatgagccggccatgaagcgcccccgcaccgcgggccccgccgtccacttaaaggctatgcagctatcgtggacgtcactggccctggtggggattgacagccacgggaaggtcctctccacccggatcctggccatgaaggcctcgctctgcaagctgtcgccctgcacggtgacccgcgtgtgcgactaccacaccaagctcttcctcatcgccatcagctccaccctgaagtcgctgctgcgcccccactttctcaacacgcctgacaagagccccggcgaccggctgaccgagatctgcaccaagatcaccgacgtcgacattgacaaggtcatgatcaacctcaagacggaggaatttgtgctggacatgaacacactgcaggcgctgcagcagctcttgcagtgggtgggcgacttcgtgctgtacctgctggccagcctacccaaccagggttccctgctgaggccgggccacagctttctgcgggacggcacctcgctgggcatgcttcgggaattgatggtggtcatccgcatctggggccttctgaagcccagctgcctgcccgtgtatacggccacctcggatacccaggacagcatgtccctgctcttccgcctgctcaccaagctctggatctgctgtcgcgatgagggcccagcgagcgagccggacgaggcgctggtggatgaatgctgcctgctgcccagccagctgcttatccccagcctggactggctgccagccagcgacggcctggttagccgcctgcagcccaagcagccccttcgtctgcagtttggccgggcgcccacgctgcctggcagtgctgccaccctgcagctcgacggcctcgccagggccccaggccagcccaagatcgaccacctgcggaggctgcaccttggcgcttgccccacggaggaatgcaaggcctgcaccaggtgcggctgtgtcaccatgctcaagtcgcccaacagaaccacggcggtgaagcagtgggagcagcgctggatcaagaactgcctgtgcggtgggctctggtggcgggtgcccctcagctacccctgagcccagctgcccctcagctactcctcagctacccctcagctgcccctgagcccggctgctgcaagagccaccgctcgccctggactctcctcggcgcggttaacctcagcccgccctgcagggctgttgaaggccgtgggccggacgcctgcgtgaccagcagagcttctgaggaagcccctgcctttgtccagctgggcccgcagtccacacaccactctcccaggacccccagatccctggaccatctgcatccagaggaccgtccgtgacggccgggggtccaggcggaccttgtggtgacccggctcgggcgtctcctcggtttccttgcctcacccgcggagagcgctgaacctggacaagcagcggctgggaaggacaggtccaataaacgccctctgcgccc

SEQ ID NO: 320310 - DNA, 975 bp, Artificial Sequence
  derived and/or modified sequence
atgtgtgacctgcgccgtcctgctgcaggagggatgatggatctcgcctacgtgtgcgaatgggaaaagtggtcaaaatcaactcactgccctagtgtgcctctggcctgcgcttggtcatgcagaaacctgattgcttttacaatggatctgcggtcagatgaccaggaccttaccagaatgatccatattctggacacagaacacccctgggacctccattctattccttccgaacatcacgaagcaataacatgtctcgagtgggaccagagcgggtcacgcttactcagcgctgatgccgacggccagattaaatgctggtcaatggccgatcatctggctaactcttgggagtcttctgtgggatccctggtggagggggatcctatcgtagccctgagctggctgcataacggggtgaagctggccctgcacgtcgaaaagagtggagcctcaagctttggagaaaagttttcaagggtcaagtttagcccatctctgacgttgttcggaggaaagcccatggagggttggatcgcagttacagtgagcgggttggtgactgtgtctctgttatttctcctggagtactgtatggtgaccggctatgactggtgggatatacttttgcatgtgcagcctagcatggtccaaagcttggtagagaagctgcacgaggagtataccagacagacagcagccttacagcaggtgctatccacgcggatactggcgatgaaggcctccttgtgtaaattgtctccctgcacggtcactcgcgtctgcgactaccataccaagctctttttgattgccatttcctctactctaaaatcactgctgcggccccattttctgaatacccccgacaaatcaccaggcgacagactcactgagatctgcaccaagatcacggacgtcgacatagataaagtgatgattaatctgaaaacagaggagtttgtgttgtag

SEQ ID NO: 320311 - DNA, 975 bp, Artificial Sequence
  derived and/or modified sequence
atgtgtgacctgcggcggcctgctgctgggggcatgatggacctggcctacgtgtgtgagtgggagaagtggagcaagagcacccactgccccagcgtgcccctggcctgtgcctggagctgcaggaacctgattgccttcaccatggacctgcggagtgatgaccaggacctgaccaggatgatccacatcctggacacagagcacccctgggacctgcacagcatccccagcgagcaccacgaggccatcacctgcctggagtgggaccagagcggcagccggctgctgtctgcagatgctgatggccagatcaagtgctggagcatggctgaccacctggccaacagctgggagagctctgtgggcagcctggtggagggggaccccatcgtggccctgtcctggctgcacaatggagtgaagctggccctgcacgtggagaagagcggggccagcagctttggagagaagttcagccgggtgaagttcagccccagcctgaccctgtttggaggcaagcccatggagggctggattgctgtgacagtgtctggcctggtgacagtgtccctgctcttcctgctggagtactgcatggtgacaggctatgactggtgggacatcctgctgcacgtgcagcccagcatggtgcagagcctggtggagaagctgcacgaggagtacacccggcagacagctgccctgcagcaggtgctgagcacccgcatcctggccatgaaggccagcctgtgcaagctgagcccctgcaccgtgaccagggtgtgtgactaccacaccaagctgttcctgattgccatcagcagcaccctgaagagcctgctgcggccccacttcctgaacaccccagacaagagccctggggaccggctgacagagatctgcaccaagatcacagatgtggacatcgacaaggtgatgatcaacctgaagacagaggagtttgtgctgtag

SEQ ID NO: 320312 - DNA, 975 bp, Artificial Sequence
  derived and/or modified sequence
atgtgcgacctgcggcggcccgccgccggcggcatgatggacctggcctacgtttgtgagtgggaaaaatggtcgaagtcaactcactgtcccagcgtccccctcgcttgtgcctggtcttgccgtaacctgatcgccttcaccatggacctgaggagtgacgaccaggacctgacaaggatgatacacatcttggacactgagcatccatgggacctgcacagtataccatctgagcaccacgaggcaattacctgccttgaatgggaccaaagcgggagccggctgctcagcgccgatgccgacggacagattaaatgctggtcaatggcagaccacctggccaattcttgggaaagctccgtgggaagcctcgtggaaggggatccaatcgttgccctctcttggctgcacaacggcgtgaagctcgccctgcacgtggagaaatcaggagcatccagcttcggcgagaaattcagcagggtcaaattctctccctctttgactctgttcggaggcaaacctatggagggttggatcgccgtgaccgtgtccgggttagtgactgtatcgttactcttcctccttgaatattgcatggtaactggatacgactggtgggacatcctcctgcacgttcaaccttccatggtacaaagcctggtggaaaaattgcacgaggagtatacaagacagactgcggctcttcagcaggtgctgagcacaaggattttggcaatgaaagcctccctgtgcaagctatctccatgtaccgtaacaagagtgtgcgattatcacacaaagctatttctgatcgccatctcctcaaccctgaagtctcttctgcgaccccatttccttaacaccccagacaagagccctggcgacaggttaactgaaatttgcacaaagatcactgacgtagacatcgataaggtaatgatcaatcttaagactgaggagttcgttctttag

SEQ ID NO: 320313 - DNA, 975 bp, Artificial Sequence
  derived and/or modified sequence
atgtgtgacctcaggcgcccagcagccggtggcatgatggatctggcatatgtttgcgagtgggaaaaatggtcaaaaagtactcactgtccaagcgtaccgctagcctgcgcatggtcatgtcgaaacctaattgcctttactatggatctgcgtagcgacgaccaagacctgacgaggatgatccacattttggataccgaacatccctgggacctgcactctattcctagtgaacaccacgaggcaatcacttgcctcgagtgggaccagagcggctctaggttactgtccgctgatgccgacggccagataaagtgctggagcatggcagatcacctggccaactcatgggagagcagcgtggggagcctggtggagggggaccccattgtcgctttgtcgtggcttcacaacggagtcaagcttgcgctgcatgtggaaaagtcaggagcaagtagttttggagaaaaattcagtcgcgtgaagttcagcccttccctcactctgtttggaggcaaaccaatggaggggtggatcgccgtaactgtttccggtcttgtcacagttagtctcctattcctactcgagtactgcatggttactgggtacgattggtgggatatcctactgcacgtccaaccgagcatggttcagtccctcgtggagaaactccatgaagagtacacgcgtcagaccgctgctctgcagcaagtgttgagcactcgcatccttgccatgaaagcttccctgtgtaagctgagtccctgtactgtcacacgcgtgtgtgattatcatactaaactgtttttgatagccatttccagcacactgaaatccctgctgagaccgcactttctgaacacccccgacaagtctcccggagatagacttactgaaatctgcacaaagattacggacgtcgatattgacaaagtcatgatcaacctaaaaaccgaggagtttgttctttag

SEQ ID NO: 320314 - DNA, 975 bp, Artificial Sequence
  derived and/or modified sequence
atgtgcgacctgagaagacccgccgccggcggcatgatggacctggcctacgtgtgcgagtgggagaagtggagcaagagcacccactgccccagcgtgcccctggcctgcgcctggagctgcagaaacctgatcgccttcaccatggacctgagaagcgacgaccaggacctgaccagaatgatccacatcctggacaccgagcacccctgggacctgcacagcatccccagcgagcaccacgaggccatcacctgcctggagtgggaccagagcggcagcagactgctgagcgccgacgccgacggccagatcaagtgctggagcatggccgaccacctggccaacagctgggagagcagcgtgggcagcctggtggagggcgaccccatcgtggccctgagctggctgcacaacggcgtgaagctggccctgcacgtggagaagagcggcgccagcagcttcggcgagaagttcagcagagtgaagttcagccccagcctgaccctgttcggcggcaagcccatggagggctggatcgccgtgaccgtgagcggcctggtgaccgtgagcctgctgttcctgctggagtactgcatggtgaccggctacgactggtgggacatcctgctgcacgtgcagcccagcatggtgcagagcctggtggagaagctgcacgaggagtacaccagacagaccgccgccctgcagcaggtgctgagcaccagaatcctggccatgaaggccagcctgtgcaagctgagcccctgcaccgtgaccagagtgtgcgactaccacaccaagctgttcctgatcgccatcagcagcaccctgaagagcctgctgagaccccacttcctgaacacccccgacaagagccccggcgacagactgaccgagatctgcaccaagatcaccgacgtggacatcgacaaggtgatgatcaacctgaagaccgaggagttcgtgctgtag

SEQ ID NO: 320315 - protein, 749 aa, Artificial Sequence
  derived and/or modified sequence
MLEELECGAPGARGAATAMDCKDRPAFPVKKLIQARLPFKRLNLVPKGKADDMSDDQGTSVQSKSPDLEASLDTLENNCHVGSDIDFRPKLVNGKGPLDNFLRNRIETSIGQSTVIIDLTEDSNEQPDSLVDHNKLNSEASPSREAINGQREDTGDQQGLLKAIQNDKLAFPGETLSDIPCKTEEEGVGCGGAGRRGDSQECSPRSCPELTSGPRMCPRKEQDSWSEAGGILFKGKVPMVVLQDILAVRPPQIKSLPATPQGKNMTPESEVLESFPEEDSVLSHSSLSSPSSTSSPEGPPAPPKQHSSTSPFPTSTPLRRITKKFVKGSTEKNKLRLQRDQERLGKQLKLRAEREEKEKLKEEAKRAKEEAKKKKEEEKELKEKERREKREKDEKEKAEKQRLKEERRKERQEALEAKLEEKRKKEEEKRLREEEKRIKAEKAEITRFFQKPKTPQAPKTLAGSCGKFAPFEIKEHMVLAPRRRTAFHPDLCSQLDQLLQQQSGEFSFLKDLKGRQPLRSGPTHVSTRNADIFNSDVVIVERGKGDGVPERRKFGRMKLLQFCENHRPAYWGTWNKKTALIRARDPWAQDTKLLDYEVDSDEEWEEEEPGESLSHSEGDDDDDMGEDEDEDDGFFVPHGYLSEDEGVTEECADPENHKVRQKLKAKEWDEFLAKGKRFRVLQPVKIGCVWAADRDCAGDDLKVLQQFAAHWVHPESRGDVCRMLRVSSPQSRYLNRLNSCVKSTLSCFT

SEQ ID NO: 320316 - protein, 783 aa, Artificial Sequence
  derived and/or modified sequence
MLEELECGAPGARGAATAMDCKDRPAFPVKKLIQARLPFKRLNLVPKGKADDMSDDQGTSVQSKSPDLEASLDTLENNCHVGSDIDFRPKLVNGKGPLDNFLRNRIETSIGQSTVIIDLTEDSNEQPDSLVDHNKLNSEASPSREAINGQREDTGDQQGLLKAIQNDKLAFPGETLSDIPCKTEEEGVGCGGAGRRGDSQECSPRSCPELTSGPRMCPRKEQDSWSEAGGILFKGKVPMVVLQDILAVRPPQIKSLPATPQGKNMTPESEVLESFPEEDSVLSHSSLSSPSSTSSPEGPPAPPKQHSSTSPFPTSTPLRRITKKFVKGSTEKNKLRLQRDQERLGKQLKLRAEREEKEKLKEEAKRAKEEAKKKKEEEKELKEKERREKREKDEKEKAEKQRLKEERRKERQEALEAKLEEKRKKEEEKRLREEEKRIKAEKAEITRFFQKPKTPQAPKTLAGSCGKFAPFEIKEHMVLAPRRRTAFHPDLCSQLDQLLQQQSGEFSFLKDLKGRQPLRSGPTHVSTRNADIFNSDVVIVERGKGDGVPERRKFGRMKLLQFCENHRPAYWGTWNKKTALIRARDPWAQDTKLLDYEVDSDEEWEEEEPGESLSHSEGDDDDDMGEDEDEDDGFFVPHGYLSEDEGVTEECADPENHKVRQKLKAKEWDEFLAKGKRFRVLQPVKIGCVWAADRDCAGDDLKVLQQFAACFLETLPAQEEQTPKASKRERRDEQILAQLLPLLHGNVNGSKVIIREFQEHCRRGLLSNHTGKATLTSSPLGAS

SEQ ID NO: 320317 - DNA, 2250 bp, Artificial Sequence
  derived and/or modified sequence
atgctcgaggagcttgagtgcggggcccccggggctaggggggcggcaacagctatggactgcaaggatcgacccgcgttccctgtgaaaaagctcattcaagcccggctgcccttcaagaggttgaacctggtgcctaagggcaaggccgatgatatgtctgacgaccagggaacttccgttcagtcaaaaagcccagacctggaggctagcttggacacgttggaaaataactgtcacgtcgggtctgatatcgattttcggcccaaactggtgaatggaaagggcccactcgataacttcctgcgcaaccgcatcgagacaagcattggccagtctaccgtgataatagacctgacagaagattctaacgagcagccagacagtttggtggatcacaacaaattgaactccgaggctagtccctcgcgggaagcgattaatgggcagcgggaagatacaggtgatcaacagggattacttaaagctatacaaaacgataagttggcctttcctggggaaacactctctgacatcccttgtaagactgaggaggaaggcgtaggctgtggaggagctgggcgacggggcgattcacaggagtgttctccgcgttcatgcccggaactgacctctggcccccgtatgtgtccccggaaagaacaggattcctggtcagaggccggcgggattctcttcaaggggaaagtccccatggttgtgctgcaggacatcttggccgtcagaccacctcagatcaagtcactgccggctacaccccaggggaaaaatatgacccccgagtccgaggtccttgagagtttccctgaagaggactctgtgttgtctcactcctcccttagctcaccgtctagcacctcatcacccgagggtcctcctgctccacctaagcaacactcctcaacctctccatttccgacatccacacctttacgtcgaatcacaaagaagtttgtgaagggatctaccgaaaagaataagctacgccttcagagagaccaggaacggctcgggaaacagttgaagctgagggccgagagagaggagaaggaaaagttgaaggaagaagcgaagagggcaaaggaagaagccaagaagaagaaggaggaggagaaagagctgaaggaaaaggaacgccgcgaaaaacgcgagaaagacgaaaaggagaaagcagaaaagcagaggctgaaggaggaaaggcggaaagagcgtcaggaggccctagaagctaaactggaggaaaagagaaagaaagaggaggaaaagaggctgagggaagaggagaaacgcatcaaagcggaaaaagctgagataacacgtttctttcagaagccaaagacacctcaagcccccaaaaccctggcggggtcatgtgggaaatttgcaccatttgagatcaaagagcacatggtgttggccccgcgccgtaggaccgccttccatccagatttgtgtagtcagctggatcagctcttgcagcagcagtccggtgagttttccttccttaaggacctcaagggaagacagcctcttagaagtggccccactcatgtgtccacccgcaacgctgacatcttcaatagtgatgtggttatcgttgaacggggaaaaggtgatggcgtgccggaaaggcgaaaatttggtcggatgaagttgctacaattctgtgagaaccatagacctgcatattggggcacttggaataaaaagacggcgctgatccgagcgagggacccatgggcgcaggacaccaaactgctggactacgaggtggactctgatgaggagtgggaagaggaagaacctggagagtcattgtcccactccgaaggggatgacgatgacgacatgggcgaagatgaagacgaggacgatggattttttgtaccccatggatacctcagcgaggatgaaggagtgacggaagaatgtgccgatccggagaatcataaggttcgtcagaaactgaaagccaaggagtgggatgagttcctggctaaggggaaacgatttcgcgtgttacagccggtgaaaattgggtgcgtgtgggccgctgacagagattgcgccggggatgatctcaaggtactacaacagttcgctgctcactgggtgcaccctgagtcacgaggagatgtctgccggatgttacgcgttagtagcccccaatctcgatatctgaatagactgaattcatgtgttaaaagcacgctgagctgcttcacgtag

SEQ ID NO: 320318 - DNA, 2352 bp, Artificial Sequence
  derived and/or modified sequence
atgctcgaggaactggaatgcggggcccccggcgccagaggcgctgccacagccatggactgtaaagatagaccagctttccctgtaaagaagctcattcaggcacggctgccttttaagcgcctgaacctggtccccaaaggcaaagcggacgatatgtctgatgaccaaggaacgtctgtacagtctaaatctcctgacctggaggcgtcattggacactctggaaaacaactgccacgtgggctctgatattgacttcagaccaaagttggtaaatggaaaaggtccattagacaactttctgaggaaccgaatcgaaacaagcatcggccagtctactgtgattatcgacctcaccgaagactctaacgagcagcccgattcgctcgtcgatcataacaagcttaattcagaggcctcaccaagccgggaggctatcaatggccaaagggaggatactggcgatcaacaggggctgctgaaagcaatccagaatgacaagctcgctttccctggggagaccctgtctgacattccttgcaaaacagaagaggaaggggtgggctgcggtggtgccgggaggcgtggagattctcaggaatgtagcccccgctcctgccccgaattaacatccggaccgcgcatgtgccccagaaaggaacaggactcctggagcgaggcgggaggcatactgttcaagggtaaagtacccatggtggtgctccaggatatattagcagtccggccccctcagattaaaagcctccctgccaccccacagggaaagaatatgaccccagaatctgaggttctcgaatcattccccgaggaagacagcgtgctgagccacagtagtctgagctctccttcaagcacttctagcccagaagggcctccagctccgcctaaacagcattctagcacaagccccttccccacttccacccctttgcgaaggattacaaagaaattcgtgaagggtagcactgaaaagaataagctgagactccagagagaccaggagaggcttggcaaacagctgaaattgagagcagaacgtgaggaaaaggagaagctgaaagaagaggctaagagagctaaggaagaggccaagaagaaaaaggaagaagagaaggagctgaaggaaaaggagcgtcgcgaaaagagagaaaaagatgaaaaagaaaaagctgaaaaacagaggctcaaggaagaaaggcggaaagagagacaagaagcactggaggctaaactagaggaaaagagaaagaaagaggaagagaagagactgcgagaggaagaaaaaagaattaaggctgagaaagcagaaattaccagatttttccagaaacccaaaactccgcaggcgccaaaaacccttgccggctcttgcggtaagttcgcaccttttgagataaaggagcacatggtcctcgccccccggaggcgcaccgccttccatccggatttgtgcagtcaattagatcagctcctgcagcaacagtcaggggagttttctttcctaaaggacctgaagggtaggcaaccactcagatccggtcccacccacgtgagtaccagaaatgccgacatattcaattcagacgtggtaatcgtcgagcggggaaagggcgatggggtgcctgaaaggaggaaatttggccgaatgaagctcttacagttctgcgagaatcatcgccccgcatattggggaacctggaacaagaaaactgcccttattagagccagagatccctgggcacaagatacgaagcttctcgattatgaggtagacagtgacgaggaatgggaggaagaagagccaggggagagcctgtcgcattcagaaggcgatgatgatgatgatatgggagaagatgaagacgaggacgatgggttcttcgtgccccacgggtatttaagcgaggacgaaggcgttaccgaggagtgcgcagaccccgagaatcacaaagttcggcagaaactgaaggccaaagagtgggatgagtttctggcgaaaggaaagcgcttcagagtcctccagccagtgaaaatcggctgcgtgtgggctgcagatcgtgactgcgccggagacgaccttaaggtcctgcagcaatttgctgcatgtttcctggagactctgcctgcccaggaggaacagaccccaaaagccagtaagagggagaggcgcgatgagcagattctggcacagctgctgccactgttgcacggcaacgtgaacggatccaaggtgatcatccgggagtttcaggagcactgtcgacgaggcctcctcagtaatcacactggcaaggccactctgactagttcacctctgggagcctcttag

SEQ ID NO: 320319 - DNA, 2250 bp, Artificial Sequence
  derived and/or modified sequence
atgctggaggagctggagtgtggggcccctggggcccggggagctgccacagccatggactgcaaggacaggcctgccttccctgtgaagaagctgatccaggcccggctgcccttcaagaggctgaacctggtgcccaagggcaaggcagatgacatgtctgatgaccagggcacctctgtgcagagcaagagcccagacctggaggccagcctggacaccctggagaacaactgccacgtgggcagtgacatcgacttccggcccaagctggtgaatggcaagggccccctggacaacttcctgaggaaccgcatcgagaccagcatcggccagagcaccgtcatcatcgacctgacagaggacagcaatgagcagcctgacagcctggtggaccacaacaagctgaacagcgaggccagccccagccgggaggccatcaatggccagcgggaggacaccggggaccagcagggcctgctgaaggccatccagaatgacaagctggccttccctggagagaccctgagtgacatcccctgcaagacagaggaggagggcgtgggctgcggcggggccggcagaagaggagacagccaggagtgcagccccaggagctgcccagagctgaccagcggccccaggatgtgccccaggaaggagcaggacagctggagcgaggccggcggcatcctcttcaagggcaaggtgcccatggtggtgctgcaggacatcctggccgtgcggcccccccagatcaagagcctgcctgccaccccccagggcaagaacatgaccccagagagcgaggtgctggagagcttccctgaggaggacagcgtgctgagccacagcagcctgagcagccccagcagcaccagcagccctgagggccccccagccccacccaagcagcacagcagcaccagccccttccccaccagcacccccctgcggcgcatcaccaagaagtttgtgaagggcagcacagagaagaacaagctgcggctgcagagggaccaggagcggctgggcaagcagctgaagctgcgggcagagcgggaggagaaggagaagctgaaggaggaggccaagagggccaaggaggaggccaagaagaagaaggaggaggagaaggagctgaaggagaaggagcggcgggagaagcgggagaaggatgagaaggagaaggccgagaagcagaggctgaaggaggagaggaggaaggagcggcaggaggccctggaggccaagctggaggagaagaggaagaaggaggaggagaagaggctgcgggaggaggagaagaggatcaaggccgagaaggccgagatcacccgcttcttccagaagcccaagaccccccaggcccccaagaccctggccggcagctgtgggaagtttgccccctttgagatcaaggagcacatggtgctggcccccaggagaagaacagccttccacccagacctgtgcagccagctggaccagctgctgcagcagcagagcggggagttctccttcctgaaggacctgaagggccggcagcccctgcggagcggccccacccacgtgtccaccagaaatgctgacatcttcaacagtgatgtggtgattgtggagcggggcaaaggagatggagtgcctgagaggaggaagtttggccgcatgaagctgctgcagttctgtgagaaccacaggcctgcctactggggcacctggaacaagaagacagccctgatccgggcccgggacccctgggcccaggacaccaagctgctggactatgaggtggacagtgatgaggagtgggaggaggaggagcctggagagagcctgagccacagtgaaggagatgatgatgatgacatgggagaagatgaagatgaagatgatggcttctttgtgccccacggctacctgtctgaagatgagggcgtgacagaggagtgtgccgaccctgagaaccacaaggtgcggcagaagctgaaggccaaggagtgggatgagttcctggccaagggcaagcgcttccgggtgctgcagcctgtgaagattggctgtgtgtgggccgctgaccgggactgtgctggagatgacctgaaggtgctgcagcagtttgctgcccactgggtgcaccctgagagcagaggagatgtgtgcaggatgctgcgggtgagcagcccccagagccgctacctgaaccggctgaacagctgtgtgaagagcaccctgagctgcttcacctag

SEQ ID NO: 320320 - DNA, 2352 bp, Artificial Sequence
  derived and/or modified sequence
atgctggaggagctggagtgtggggcccctggggcccggggagctgccacagccatggactgcaaggacaggcctgccttccctgtgaagaagctgatccaggcccggctgcccttcaagaggctgaacctggtgcccaagggcaaggcagatgacatgtctgatgaccagggcacctctgtgcagagcaagagcccagacctggaggccagcctggacaccctggagaacaactgccacgtgggcagtgacatcgacttccggcccaagctggtgaatggcaagggccccctggacaacttcctgaggaaccgcatcgagaccagcatcggccagagcaccgtcatcatcgacctgacagaggacagcaatgagcagcctgacagcctggtggaccacaacaagctgaacagcgaggccagccccagccgggaggccatcaatggccagcgggaggacaccggggaccagcagggcctgctgaaggccatccagaatgacaagctggccttccctggagagaccctgagtgacatcccctgcaagacagaggaggagggcgtgggctgcggcggggccggcagaagaggagacagccaggagtgcagccccaggagctgcccagagctgaccagcggccccaggatgtgccccaggaaggagcaggacagctggagcgaggccggcggcatcctcttcaagggcaaggtgcccatggtggtgctgcaggacatcctggccgtgcggcccccccagatcaagagcctgcctgccaccccccagggcaagaacatgaccccagagagcgaggtgctggagagcttccctgaggaggacagcgtgctgagccacagcagcctgagcagccccagcagcaccagcagccctgagggccccccagccccacccaagcagcacagcagcaccagccccttccccaccagcacccccctgcggcgcatcaccaagaagtttgtgaagggcagcacagagaagaacaagctgcggctgcagagggaccaggagcggctgggcaagcagctgaagctgcgggcagagcgggaggagaaggagaagctgaaggaggaggccaagagggccaaggaggaggccaagaagaagaaggaggaggagaaggagctgaaggagaaggagcggcgggagaagcgggagaaggatgagaaggagaaggccgagaagcagaggctgaaggaggagaggaggaaggagcggcaggaggccctggaggccaagctggaggagaagaggaagaaggaggaggagaagaggctgcgggaggaggagaagaggatcaaggccgagaaggccgagatcacccgcttcttccagaagcccaagaccccccaggcccccaagaccctggccggcagctgtgggaagtttgccccctttgagatcaaggagcacatggtgctggcccccaggagaagaacagccttccacccagacctgtgcagccagctggaccagctgctgcagcagcagagcggggagttctccttcctgaaggacctgaagggccggcagcccctgcggagcggccccacccacgtgtccaccagaaatgctgacatcttcaacagtgatgtggtgattgtggagcggggcaaaggagatggagtgcctgagaggaggaagtttggccgcatgaagctgctgcagttctgtgagaaccacaggcctgcctactggggcacctggaacaagaagacagccctgatccgggcccgggacccctgggcccaggacaccaagctgctggactatgaggtggacagtgatgaggagtgggaggaggaggagcctggagagagcctgagccacagtgaaggagatgatgatgatgacatgggagaagatgaagatgaagatgatggcttctttgtgccccacggctacctgtctgaagatgagggcgtgacagaggagtgtgccgaccctgagaaccacaaggtgcggcagaagctgaaggccaaggagtgggatgagttcctggccaagggcaagcgcttccgggtgctgcagcctgtgaagattggctgtgtgtgggccgctgaccgggactgtgctggagatgacctgaaggtgctgcagcagtttgctgcctgcttcctggagaccctgcctgcccaggaggagcagacccccaaggccagcaagcgggagaggagagatgagcagatcctggcccagctgctgcccctgctgcacggcaatgtgaatggcagcaaggtgatcatccgggagttccaggagcactgccggcggggcctgctgagcaaccacacaggcaaggccaccctgaccagcagccccctgggcgccagctag

SEQ ID NO: 320321 - DNA, 2250 bp, Artificial Sequence
  derived and/or modified sequence
atgctggaggagctggagtgcggcgcccccggcgcccggggcgccgcaactgccatggactgcaaggacaggcccgccttccctgttaagaagttgatacaggccagactgcccttcaagcggttaaacctggtccctaagggcaaagcagatgatatgtctgatgaccaaggcacctccgtacagagcaagagtcccgacttggaggcatccttagatacgttagaaaacaattgtcacgtagggtccgacattgatttccgccctaaactggtcaacggcaagggtccccttgacaactttcttcgcaatagaattgagacatcaatcggccagagtacagtcattatagacctgacggaagattctaacgaacagccagacagtctggtcgaccataataaactgaacagcgaggctagcccttctcgtgaagcaattaatggtcagagggaggatacaggggaccagcagggccttctgaaagccatccagaacgacaaactggccttcccaggagaaactctgagcgatatcccctgtaaaacagaggaggagggtgtcggttgcggaggggccggacgccgcggggattctcaggaatgtagcccacgttcatgtccagaactcacctcaggaccccggatgtgccctcgcaaagagcaggatagctggtctgaagctgggggtatactgtttaaggggaaagtgcccatggtggtcctgcaagatatacttgccgtgagacccccccagatcaaatctctgcccgctacgccccaaggaaaaaacatgacacccgagtcagaagtcctcgagtcttttcctgaggaagattccgtcctgagtcattcttccctgagcagccctagcagtacaagttcccctgaaggccccccggcgccacccaagcagcatagcagcactagccctttccccaccagtacacctctgcgtcggataacgaagaagtttgttaagggctcaacagaaaaaaataagcttcggttgcagagggaccaggagaggcttgggaagcagctgaaactccgggcagaacgcgaagaaaaggagaagctgaaggaggaggccaaacgcgctaaagaggaagcgaaaaaaaagaaagaggaggagaaagagctcaaggagaaggagcgtcgcgagaagcgcgagaaggacgaaaaagaaaaagccgagaaacagcggcttaaggaggagcgacgcaaagaacgacaggaggctctggaggcaaaactggaagagaaaagaaagaaagaagaggaaaagaggctgcgagaggaggagaaacgtataaaggcggagaaggccgaaattacgcgcttctttcaaaagccaaaaacgccacaggccccgaagactctggccggttcctgtggcaagtttgctccctttgagatcaaagaacacatggtgctagccccaagacgtagaacggccttccaccctgacctctgctcacagctagatcagcttttacagcagcagagcggcgaattttcgtttcttaaagatctgaaaggacggcagcctctcaggagtgggccaacacatgtgagcacgcggaatgctgacattttcaatagtgatgtggtgattgtcgaacgtggcaaaggcgatggggttccagaaagacgtaagttcggccgcatgaagctcctacaattttgcgagaatcaccgccccgcttactgggggacctggaacaaaaaaactgccctcatccgtgccagagacccctgggcacaggatactaagctgcttgactatgaagtagactccgatgaggaatgggaggaggaagagcctggcgagtcactcagccatagcgaaggggatgacgacgatgatatgggcgaggatgaagatgaggacgacggattcttcgtgcctcacggctacctatccgaggacgagggtgtcactgaggaatgcgccgacccagagaaccataaggtccgacagaaattaaaggccaaggaatgggacgagttcctcgcgaagggcaagagattccgcgtcttacagcctgtgaaaatcgggtgcgtttgggccgcggaccgagattgcgcaggggatgatctcaaagtcctgcaacaatttgccgcccactgggtccaccccgaatctaggggggatgtatgccggatgttgcgagtatcctccccccagtcgagatatctcaatagattaaattcctgtgtcaagtccactctctcctgcttcacatag

SEQ ID NO: 320322 - DNA, 2352 bp, Artificial Sequence
  derived and/or modified sequence
atgctggaggagctggagtgcggcgcccccggcgcccggggcgccgcaactgccatggattgcaaggataggccggccttccctgtgaagaaacttatccaggcgcgcctcccttttaaacgcctgaacctggtccctaaaggcaaggcggatgacatgtccgatgaccaggggaccagtgttcagagcaaaagccctgacctggaagctagcctggatacactggagaataattgtcatgtgggatccgacattgatttccggcccaagctggttaatgggaagggtccgcttgacaattttcttcgtaatagaatcgaaacctcaatcggacagtcaaccgtcatcatcgacctgacagaagactctaatgagcaaccagactcacttgtggatcacaacaaactaaatagtgaagcctcaccctcgcgagaagcaatcaatgggcagagggaggacacaggggaccagcaggggctgctgaaagccatacagaatgataaactcgcgttccccggcgagaccctttccgacattccatgcaagacagaggaagagggagtgggatgcggtggagctgggcgtcggggcgactcacaggaatgctcgccacggtcctgtccagagttaacatccggcccaaggatgtgccctcgtaaggagcaagacagctggtcagaagcaggcggcatcctcttcaaaggaaaagtgcctatggtcgtcctgcaggatatccttgccgtgagacctccccagataaagtctctgcctgccacaccccagggcaaaaacatgactcccgaatccgaggtccttgaatcgtttcccgaggaggattccgtactgagccactctagcctctcatccccttcgtccaccagctccccggaagggcctccagccccaccgaagcagcatagttctacttcccccttcccaactagtactcccctccggagaattacaaagaaattcgtcaaaggttcaaccgagaaaaataaactgcgcttacagagggatcaggaacgattgggcaaacagctaaaattgagggcggagcgcgaagagaaggaaaaacttaaagaggaagcaaagagggccaaagaggaggccaagaagaaaaaggaggaagagaaagagctgaaagagaaggaacggagggaaaagagggaaaaggatgagaaggagaaagccgaaaaacagagattaaaagaggaaagacgcaaagaaagacaagaggctctggaagcaaaactagaagaaaagcggaaaaaagaggaggagaaaagactcagggaggaagagaagagaatcaaggccgaaaaggcagaaattacgcgattttttcagaagcctaagacaccccaagccccgaagaccctggccggatcttgcggcaaattcgcaccttttgagattaaagagcatatggtgctggcgcctcgcagacggactgcctttcaccctgatctgtgctcccagctggatcagctgttgcagcagcaaagcggggaattctccttcttgaaggacctgaaaggcaggcagcccttgcgttcaggtcctacccacgtatctaccagaaacgccgatatctttaattccgacgtggtgattgtggagcgcggaaagggagacggcgtccccgaacgacggaagttcggccggatgaagctactccagttttgtgagaatcaccgccctgcctactggggcacctggaataagaagacggccctaatcagggctcgggacccctgggcccaagatacaaagctgttagattatgaagtggatagtgacgaagagtgggaagaagaggaacctggagaaagcctctctcactcggaaggtgatgatgacgacgacatgggggaggatgaggacgaggatgacggatttttcgtaccacacggatatctgtctgaggacgagggcgtgaccgaggagtgtgctgatcctgaaaaccacaaggtgcggcaaaaactgaaagccaaagaatgggacgagtttctagctaaaggcaagagattccgggtgctgcagccagtgaagataggttgcgtatgggctgccgatagagactgtgcgggtgacgatcttaaggtcctgcagcaatttgccgcatgcttcctggagaccctccccgcgcaagaggagcagactcctaaagcgagcaagcgagagcgtcgggacgagcaaatccttgcccagctgttgccattactccacgggaatgtgaacggctccaaagtgattatcagggagttccaagagcattgtcggcggggcctgttatctaatcacacaggcaaagcaactctaacctccagtccgttgggagcatcttag

SEQ ID NO: 320323 - DNA, 2250 bp, Artificial Sequence
  derived and/or modified sequence
atgctggaggaactggaatgcggagctcctggagctcgcggagccgcaacggccatggattgcaaggaccgtcccgcattccctgtgaagaaactgatacaggctcgcttacccttcaaaagacttaacctagtacctaagggaaaggccgatgatatgtccgacgaccagggcacgagcgtgcagagtaaatcgccagacctcgaggcctctctggatacattggaaaataattgtcacgtaggttcagacatagatttcaggcccaaattggtgaacggaaagggaccgctcgacaacttcctgcggaacaggattgaaacaagcattggtcaatctacagtgatcattgatctcactgaagactcaaacgagcagcctgattccctggtagaccacaacaaattgaatagcgaagcctccccatctagagaggcaatcaatgggcaacgtgaagacactggagaccaacagggtttactgaaggcgatccagaacgacaaattagccttccctggcgaaactttgagtgacatcccctgtaaaactgaggaagagggcgtcggctgcggcggagccggtaggcggggtgacagtcaggagtgtagcccgagatcctgtccggagctcaccagtggacctcggatgtgcccgaggaaggagcaggattcctggtctgaggcgggtggcatcttgttcaaaggaaaagtacctatggtggtgctgcaggatattctcgccgtgcgtccacctcaaatcaagtcactccctgccacgccacaaggcaagaacatgacccctgaatccgaggtcctggagtccttccccgaagaggattcagtactgtctcactcaagtttaagcagtccctcctctacgtcctctccagagggcccaccagcccctcctaaacagcacagcagtacatcacctttccccacctcgacgcctctccggaggatcactaagaagttcgtaaagggatcaacggagaagaacaagctgcgccttcagagggaccaggagagattgggtaaacagttaaaactgcgcgctgaacgcgaggagaaagaaaagctcaaagaagaagccaagcgagcaaaggaagaggcaaagaaaaaaaaggaggaagagaaagagttgaaagagaaggagagaagagaaaagagagaaaaagacgagaaggagaaagccgagaaacagagactgaaggaagaaagaagaaaggagaggcaagaagctctagaggccaagctggaggagaaacgcaagaaggaggaagaaaagcggttgcgggaggaggagaaacggatcaaggcagagaaagccgagattacccgattctttcagaaacccaaaacaccccaggcaccaaagacactggcagggtcgtgtgggaagtttgccccattcgaaataaaagagcacatggtgctggcacccagacggcgtacagctttccatcccgatctgtgctctcagctcgaccagctcttgcaacaacagagtggcgagttcagctttctgaaggaccttaaaggacgccagcctctgcgctccggccctacccatgtttcaacaagaaatgccgacatcttcaactcagacgtggtgattgttgaacgaggaaaaggcgatggtgtcccagaaagaaggaagttcggtcgaatgaagttgctccaattctgtgaaaatcataggcccgcttattggggtacgtggaataagaagacggccctgatcagggcccgtgatccatgggcccaggatacaaagctgctggattacgaggtggatagcgacgaagagtgggaggaagaagagcctggcgagtccctgtcccacagtgagggcgatgatgatgacgacatgggggaagatgaagatgaagacgatggtttcttcgtaccacacggctacttgagtgaggacgaaggagtaacggaagaatgtgcagaccctgagaaccacaaagtgcggcagaagttgaaggctaaggaatgggatgagttccttgctaagggtaagaggttccgggtcctccaacccgtgaaaatcggctgtgtgtgggctgctgacagagattgtgctggagatgacctaaaagtattgcagcagtttgcggcacactgggtgcatcctgagtcacgaggcgatgtctgtcggatgctgcgcgtgagcagcccacagtcccggtatctaaacaggctcaattcatgtgtgaagagcaccctctcgtgttttacgtag

SEQ ID NO: 320324 - DNA, 2352 bp, Artificial Sequence
  derived and/or modified sequence
atgctggaggaactagagtgtggcgctccgggtgcacggggtgccgcaacagcaatggattgtaaggatagaccagcgttcccagtgaagaagctgatacaggcacgattgccttttaaaagactgaatttggtgccgaaaggtaaagctgatgatatgtcagacgaccagggaacttctgtgcagagtaagtctcccgacctggaggcatccttggacacgctggaaaataattgccatgtcgggtctgacattgactttcgccctaagctggttaatgggaagggccctctcgacaattttctgaggaatcggattgaaacatccatcgggcagagcactgtgatcatcgatctcacagaagatagcaatgagcagcctgactctctggtggaccacaataagcttaattccgaagctagcccttcgcgcgaagcgatcaatgggcagcgcgaggacacaggcgaccagcagggtctgctgaaggcaatccagaatgacaagttggcctttccgggagaaacgctttcggatattccctgcaagaccgaggaagagggcgtgggctgcggaggcgctggacgccgaggcgattctcaggaatgctcgccgagaagctgtcctgagttgaccagtggtccaagaatgtgcccccgaaaggaacaggactcttggtcggaggctggtggcatattgttcaagggaaaagtgcctatggtcgtcctccaggacattttagccgtgcgccctcctcagattaagagcctgcctgccaccccgcagggcaaaaacatgactcccgagtctgaggtcctggagtctttccccgaagaggacagtgtactgagccactctagcctgtccagcccttcctccaccagtagcccggagggacctcctgccccaccaaaacagcactcatctacatcaccattccccacctccacccccctgcgcaggatcacaaagaaatttgtcaagggaagtactgagaagaataagcttagactacagcgggaccaggagagactgggaaagcagcttaagcttagggcagaacgcgaggaaaaggagaagctgaaagaagaggctaagcgcgcaaaggaggaggcaaagaagaagaaggaggaggagaaggaactgaaagagaaggagagaagagaaaaacgcgagaaagacgagaaggagaaggcagagaagcaaagactaaaggaggagaggagaaaggaacggcaggaagctctggaggccaagctggaggagaagcgtaagaaagaagaggaaaagaggttgcgggaagaggaaaagaggattaaggctgagaaagcagagatcacaaggtttttccagaaacccaaaacgccacaggctcccaagaccctcgcgggatcctgtggcaagtttgctcccttcgagataaaggaacacatggtgttggccccacgacggaggactgccttccaccctgacttatgttcccaacttgatcagttgctgcagcagcagtccggcgagttctcttttctcaaagatttgaagggaaggcagccactgcgctcaggacccacccatgtgtcaactcgcaatgctgacattttcaactcggacgtggtgatagtggagaggggtaaaggcgatggggtgcccgaacgccgaaagtttggacgtatgaagcttttacagttctgcgaaaaccacaggcctgcttattgggggacatggaataagaagaccgccctgatacgggcacgtgatccttgggctcaggatacaaagcttttagactatgaagtagactcagacgaagagtgggaggaggaggaacctggggaatccctcagccactctgaaggcgatgatgacgacgacatgggggaggatgaggacgaggatgatggcttctttgtgccacatggctacctctccgaggacgagggtgtgacagaagagtgcgccgacccggaaaaccataaagtccgacagaaactcaaagctaaagagtgggacgagttcctagcaaaggggaagagattcagagttctgcagcccgtaaagataggctgtgtttgggcggctgaccgtgactgtgctggggatgatctcaaggtgttgcagcagttcgctgcgtgcttcctggagactctgcctgctcaagaagagcagaccccgaaagcctcaaaaagagaacggcgagatgagcagatcctggcccaactgctgcccttgctccacggcaatgttaacggatcaaaggttataattagagagttccaggaacactgccgccgagggttgttgtcaaaccacacaggaaaggccactcttacttcctcccctctgggcgcaagctag

SEQ ID NO: 320325 - DNA, 2348 bp, Artificial Sequence
  derived and/or modified sequence
ggcggcagcagcggcgcgggcgggagggcgaagagcagcggccgcctgaggggagcccgcgcctccgccgcctgagaggaggtcgagctgccgccggggcgatgctggaggagctggagtgcggggcgcccggcgccaggggagccgccacagccatggattgcaaagatagaccagcttttccagttaagaagttaatacaagcccgtctgccgtttaagcgcctgaatcttgtcccaaaggggaaagccgatgacatgtcagacgatcagggtacttctgtgcaaagtaaaagccccgatttagaggcctctttggacaccttggaaaacaactgtcatgtgggttctgacatagactttagaccgaaacttgtcaacgggaagggtcccttagataactttttaagaaatagaatcgaaaccagtattggccagagcacagtcatcattgatttgacagaggactcgaatgagcagccagacagtcttgtggaccacaataaactaaattctgaagcctctccctccagggaggcaataaatggccagcgagaagacactggggatcagcaggggttgttgaaggccattcagaacgacaagttggcatttcctggagagaccctttcagacattccttgcaaaacagaggaggagggtgttggctgtggaggtgcagggaggagaggcgactcccaggaatgttcgccacggagctgcccggagctgacgagtggcccgagaatgtgccccagaaaggagcaggacagttggagtgaagctgggggcatcctgttcaaagggaaggtgcctatggtggtcttgcaggacatcttggctgtgagaccaccgcaaatcaagtcccttccagccacaccccaaggcaagaacatgacccctgagagtgaggtgctggaatctttccccgaagaagactctgtactcagccattcgtccctgagctctccctcttccaccagctcgcccgaggggccgcctgctcccccaaagcagcacagcagtaccagtcccttccccacctccacgcccctccgcagaataactaagaaattcgtcaaaggctctacagagaagaacaagctcagactgcaaagagatcaggagcgtctgggcaagcagctcaagttacgtgcagaaagggaagaaaaggagaagctgaaagaggaggccaagcgggccaaggaggaggccaagaagaagaaggaggaagagaaggagcttaaggaaaaggagaggcgggagaagcgggagaaggatgagaaggagaaggcggagaagcagcggctcaaggaggagcggcgcaaggagagacaggaagccctggaggctaaacttgaggaaaaaaggaaaaaggaagaagagaaacggttaagagaagaagagaagcgcattaaagcagagaaggccgaaatcacgaggttcttccagaaaccaaagactccacaggcccccaagaccctggccggctcctgtgggaagtttgccccctttgaaattaaagagcacatggtcctggcccctcggcgtcggaccgctttccatccagacctctgcagtcagctggaccagctcctccagcagcagagcggcgagttctccttcttgaaagacctcaaaggccggcagcccctgaggtccggacccacgcacgtttccacccggaatgcagatatttttaacagtgatgtcgtcatcgtggagcgtgggaagggcgacggtgttcccgagaggaggaagtttggcaggatgaagctcctgcagttctgtgagaaccaccggcctgcctactggggtacctggaataagaagacggcactcatccgcgcgcgagacccctgggcccaggacacgaagctcctggactatgaggtggacagtgatgaggagtgggaagaagaggagcctggggagtccctgtcccacagtgagggggatgatgatgacgacatgggagaggatgaagatgaggacgatggtttctttgtgccccatgggtacctgtctgaggacgaaggtgtgacagaggagtgtgccgaccctgagaaccataaggtccgccagaaactgaaggccaaggagtgggacgagttcctggctaaggggaagcgctttcgcgtcctgcaacctgtgaagatcggctgcgtgtgggcggctgacagagactgcgcaggcgatgacctgaaggtactgcagcagttcgcagcccactgggtgcatcctgagagcaggggtgacgtatgtagaatgcttagggtgtcctccccacagagcagatacttgaaccgactcaattcctgtgtaaagagcactttgtcctgcttcacg

SEQ ID NO: 320326 - DNA, 2453 bp, Artificial Sequence
  derived and/or modified sequence
ggcggcagcagcggcgcgggcgggagggcgaagagcagcggccgcctgaggggagcccgcgcctccgccgcctgagaggaggtcgagctgccgccggggcgatgctggaggagctggagtgcggggcgcccggcgccaggggagccgccacagccatggattgcaaagatagaccagcttttccagttaagaagttaatacaagcccgtctgccgtttaagcgcctgaatcttgtcccaaaggggaaagccgatgacatgtcagacgatcagggtacttctgtgcaaagtaaaagccccgatttagaggcctctttggacaccttggaaaacaactgtcatgtgggttctgacatagactttagaccgaaacttgtcaacgggaagggtcccttagataactttttaagaaatagaatcgaaaccagtattggccagagcacagtcatcattgatttgacagaggactcgaatgagcagccagacagtcttgtggaccacaataaactaaattctgaagcctctccctccagggaggcaataaatggccagcgagaagacactggggatcagcaggggttgttgaaggccattcagaacgacaagttggcatttcctggagagaccctttcagacattccttgcaaaacagaggaggagggtgttggctgtggaggtgcagggaggagaggcgactcccaggaatgttcgccacggagctgcccggagctgacgagtggcccgagaatgtgccccagaaaggagcaggacagttggagtgaagctgggggcatcctgttcaaagggaaggtgcctatggtggtcttgcaggacatcttggctgtgagaccaccgcaaatcaagtcccttccagccacaccccaaggcaagaacatgacccctgagagtgaggtgctggaatctttccccgaagaagactctgtactcagccattcgtccctgagctctccctcttccaccagctcgcccgaggggccgcctgctcccccaaagcagcacagcagtaccagtcccttccccacctccacgcccctccgcagaataactaagaaattcgtcaaaggctctacagagaagaacaagctcagactgcaaagagatcaggagcgtctgggcaagcagctcaagttacgtgcagaaagggaagaaaaggagaagctgaaagaggaggccaagcgggccaaggaggaggccaagaagaagaaggaggaagagaaggagcttaaggaaaaggagaggcgggagaagcgggagaaggatgagaaggagaaggcggagaagcagcggctcaaggaggagcggcgcaaggagagacaggaagccctggaggctaaacttgaggaaaaaaggaaaaaggaagaagagaaacggttaagagaagaagagaagcgcattaaagcagagaaggccgaaatcacgaggttcttccagaaaccaaagactccacaggcccccaagaccctggccggctcctgtgggaagtttgccccctttgaaattaaagagcacatggtcctggcccctcggcgtcggaccgctttccatccagacctctgcagtcagctggaccagctcctccagcagcagagcggcgagttctccttcttgaaagacctcaaaggccggcagcccctgaggtccggacccacgcacgtttccacccggaatgcagatatttttaacagtgatgtcgtcatcgtggagcgtgggaagggcgacggtgttcccgagaggaggaagtttggcaggatgaagctcctgcagttctgtgagaaccaccggcctgcctactggggtacctggaataagaagacggcactcatccgcgcgcgagacccctgggcccaggacacgaagctcctggactatgaggtggacagtgatgaggagtgggaagaagaggagcctggggagtccctgtcccacagtgagggggatgatgatgacgacatgggagaggatgaagatgaggacgatggtttctttgtgccccatgggtacctgtctgaggacgaaggtgtgacagaggagtgtgccgaccctgagaaccataaggtccgccagaaactgaaggccaaggagtgggacgagttcctggctaaggggaagcgctttcgcgtcctgcaacctgtgaagatcggctgcgtgtgggcggctgacagagactgcgcaggcgatgacctgaaggtactgcagcagttcgcagcctgcttcctggagaccctgccggcccaggaggagcagacgcccaaggcctccaagcgggagaggagagacgagcagatcctggcccagctgctgccgctcctgcacggcaatgtgaacgggagcaaggtcatcatccgggagttccaggagcactgccgccggggactgctcagcaaccacaccggcaaggccaccctgacctcgagcccactgggtgcatcctga

SEQ ID NO: 320327 - DNA, 2250 bp, Artificial Sequence
  derived and/or modified sequence
atgctggaggagctggagtgcggcgcccccggcgccagaggcgccgccaccgccatggactgcaaggacagacccgccttccccgtgaagaagctgatccaggccagactgcccttcaagagactgaacctggtgcccaagggcaaggccgacgacatgagcgacgaccagggcaccagcgtgcagagcaagagccccgacctggaggccagcctggacaccctggagaacaactgccacgtgggcagcgacatcgacttcagacccaagctggtgaacggcaagggccccctggacaacttcctgagaaacagaatcgagaccagcatcggccagagcaccgtgatcatcgacctgaccgaggacagcaacgagcagcccgacagcctggtggaccacaacaagctgaacagcgaggccagccccagcagagaggccatcaacggccagagagaggacaccggcgaccagcagggcctgctgaaggccatccagaacgacaagctggccttccccggcgagaccctgagcgacatcccctgcaagaccgaggaggagggcgtgggctgcggcggcgccggcagaagaggcgacagccaggagtgcagccccagaagctgccccgagctgaccagcggccccagaatgtgccccagaaaggagcaggacagctggagcgaggccggcggcatcctgttcaagggcaaggtgcccatggtggtgctgcaggacatcctggccgtgagacccccccagatcaagagcctgcccgccaccccccagggcaagaacatgacccccgagagcgaggtgctggagagcttccccgaggaggacagcgtgctgagccacagcagcctgagcagccccagcagcaccagcagccccgagggcccccccgccccccccaagcagcacagcagcaccagccccttccccaccagcacccccctgagaagaatcaccaagaagttcgtgaagggcagcaccgagaagaacaagctgagactgcagagagaccaggagagactgggcaagcagctgaagctgagagccgagagagaggagaaggagaagctgaaggaggaggccaagagagccaaggaggaggccaagaagaagaaggaggaggagaaggagctgaaggagaaggagagaagagagaagagagagaaggacgagaaggagaaggccgagaagcagagactgaaggaggagagaagaaaggagagacaggaggccctggaggccaagctggaggagaagagaaagaaggaggaggagaagagactgagagaggaggagaagagaatcaaggccgagaaggccgagatcaccagattcttccagaagcccaagaccccccaggcccccaagaccctggccggcagctgcggcaagttcgcccccttcgagatcaaggagcacatggtgctggcccccagaagaagaaccgccttccaccccgacctgtgcagccagctggaccagctgctgcagcagcagagcggcgagttcagcttcctgaaggacctgaagggcagacagcccctgagaagcggccccacccacgtgagcaccagaaacgccgacatcttcaacagcgacgtggtgatcgtggagagaggcaagggcgacggcgtgcccgagagaagaaagttcggcagaatgaagctgctgcagttctgcgagaaccacagacccgcctactggggcacctggaacaagaagaccgccctgatcagagccagagacccctgggcccaggacaccaagctgctggactacgaggtggacagcgacgaggagtgggaggaggaggagcccggcgagagcctgagccacagcgagggcgacgacgacgacgacatgggcgaggacgaggacgaggacgacggcttcttcgtgccccacggctacctgagcgaggacgagggcgtgaccgaggagtgcgccgaccccgagaaccacaaggtgagacagaagctgaaggccaaggagtgggacgagttcctggccaagggcaagagattcagagtgctgcagcccgtgaagatcggctgcgtgtgggccgccgacagagactgcgccggcgacgacctgaaggtgctgcagcagttcgccgcccactgggtgcaccccgagagcagaggcgacgtgtgcagaatgctgagagtgagcagcccccagagcagatacctgaacagactgaacagctgcgtgaagagcaccctgagctgcttcacctag

SEQ ID NO: 320328 - DNA, 2352 bp, Artificial Sequence
  derived and/or modified sequence
atgctggaggagctggagtgcggcgcccccggcgccagaggcgccgccaccgccatggactgcaaggacagacccgccttccccgtgaagaagctgatccaggccagactgcccttcaagagactgaacctggtgcccaagggcaaggccgacgacatgagcgacgaccagggcaccagcgtgcagagcaagagccccgacctggaggccagcctggacaccctggagaacaactgccacgtgggcagcgacatcgacttcagacccaagctggtgaacggcaagggccccctggacaacttcctgagaaacagaatcgagaccagcatcggccagagcaccgtgatcatcgacctgaccgaggacagcaacgagcagcccgacagcctggtggaccacaacaagctgaacagcgaggccagccccagcagagaggccatcaacggccagagagaggacaccggcgaccagcagggcctgctgaaggccatccagaacgacaagctggccttccccggcgagaccctgagcgacatcccctgcaagaccgaggaggagggcgtgggctgcggcggcgccggcagaagaggcgacagccaggagtgcagccccagaagctgccccgagctgaccagcggccccagaatgtgccccagaaaggagcaggacagctggagcgaggccggcggcatcctgttcaagggcaaggtgcccatggtggtgctgcaggacatcctggccgtgagacccccccagatcaagagcctgcccgccaccccccagggcaagaacatgacccccgagagcgaggtgctggagagcttccccgaggaggacagcgtgctgagccacagcagcctgagcagccccagcagcaccagcagccccgagggcccccccgccccccccaagcagcacagcagcaccagccccttccccaccagcacccccctgagaagaatcaccaagaagttcgtgaagggcagcaccgagaagaacaagctgagactgcagagagaccaggagagactgggcaagcagctgaagctgagagccgagagagaggagaaggagaagctgaaggaggaggccaagagagccaaggaggaggccaagaagaagaaggaggaggagaaggagctgaaggagaaggagagaagagagaagagagagaaggacgagaaggagaaggccgagaagcagagactgaaggaggagagaagaaaggagagacaggaggccctggaggccaagctggaggagaagagaaagaaggaggaggagaagagactgagagaggaggagaagagaatcaaggccgagaaggccgagatcaccagattcttccagaagcccaagaccccccaggcccccaagaccctggccggcagctgcggcaagttcgcccccttcgagatcaaggagcacatggtgctggcccccagaagaagaaccgccttccaccccgacctgtgcagccagctggaccagctgctgcagcagcagagcggcgagttcagcttcctgaaggacctgaagggcagacagcccctgagaagcggccccacccacgtgagcaccagaaacgccgacatcttcaacagcgacgtggtgatcgtggagagaggcaagggcgacggcgtgcccgagagaagaaagttcggcagaatgaagctgctgcagttctgcgagaaccacagacccgcctactggggcacctggaacaagaagaccgccctgatcagagccagagacccctgggcccaggacaccaagctgctggactacgaggtggacagcgacgaggagtgggaggaggaggagcccggcgagagcctgagccacagcgagggcgacgacgacgacgacatgggcgaggacgaggacgaggacgacggcttcttcgtgccccacggctacctgagcgaggacgagggcgtgaccgaggagtgcgccgaccccgagaaccacaaggtgagacagaagctgaaggccaaggagtgggacgagttcctggccaagggcaagagattcagagtgctgcagcccgtgaagatcggctgcgtgtgggccgccgacagagactgcgccggcgacgacctgaaggtgctgcagcagttcgccgcctgcttcctggagaccctgcccgcccaggaggagcagacccccaaggccagcaagagagagagaagagacgagcagatcctggcccagctgctgcccctgctgcacggcaacgtgaacggcagcaaggtgatcatcagagagttccaggagcactgcagaagaggcctgctgagcaaccacaccggcaaggccaccctgaccagcagccccctgggcgccagctag

SEQ ID NO: 320329 - DNA, 2871 bp, Artificial Sequence
  derived and/or modified sequence
atgctggaggaactggagtgtggagctccaggagctcggggcgccgccaccgctatggactgcaaggaccggccggctttcccagtgaagaagctcattcaggcgaggttgcctttcaaaagactgaatctagtccctaaaggcaaggcagatgatatgtcagacgaccagggtaccagtgttcagagtaagtcccccgatctggaagcaagtctcgacaccctggagaacaattgccacgtgggttcagatatagatttccgcccaaagctagtgaatggcaagggaccccttgacaacttcctccggaatcgcatcgaaacgtcaattgggcagtccaccgtgataatcgatctgaccgaggactctaacgaacaacctgattctctcgtcgatcacaataagttaaacagcgaagcttccccatccagggaggctatcaatggtcagcgggaagacacaggcgaccagcagggccttcttaaagcaattcaaaacgacaaattggcatttccaggcgaaaccttatcagatatcccatgtaagacagaggaggaaggagtcggctgcgggggggccgggcggagaggagactcccaggagtgctcaccgcgcagctgccccgagctgactagcggacctcgtatgtgtcctcgtaaagaacaagattcctggagcgaggctggaggcattctctttaaaggcaaggttcctatggtggtgctccaagatatccttgctgtcagaccccctcaaatcaagtccctcccagcgaccccacagggtaagaatatgacacctgagtccgaggttttggagtctttccccgaggaggacagtgtactctcccactcgtctctatcgtccccgagttcaaccagctcaccagagggcccccctgcgccacctaaacagcattcgagcacttccccattccccaccagcacccccctaaggaggattaccaaaaaatttgtaaaaggatccacggagaagaataagttgagactgcagagggatcaggaacggttgggcaaacagctgaagctcagggcagagagagaggaaaaagaaaaactaaaggaggaggctaagcgcgccaaggaggaggcaaagaagaagaaagaggaagagaaggagctcaaggaaaaggaacgcagagagaaacgcgaaaaggatgaaaaggagaaagccgaaaagcaacggctaaaggaggaacggcgcaaggagcggcaagaggctttggaagctaaacttgaagagaagagaaaaaaggaggaggagaaaaggctcagggaggaagaaaagcggatcaaggcggagaaggccgagataactcgtttcttccagaaaccgaagacaccgcaggcaccaaaaaccctcgccggtagttgtggaaagttcgcaccatttgagatcaaggaacatatggtgctggcacccagaaggaggaccgccttccaccctgacctgtgcagtcagctggaccagctactccagcaacagagtggtgagtttagcttcctgaaggacctgaagggaagacagccacttcgatccggacccacccatgtctcgacgcgcaatgccgatatcttcaattccgatgtagtgatcgttgagcggggaaagggcgatggcgtgccagagaggagaaaattcggtagaatgaaactgttacagttttgcgagaatcacaggccagcatattggggcacctggaataagaagacggcattgataagggctagggacccctgggcccaggacacgaaactgcttgattacgaagtcgattcagatgaagagtgggaggaggaggagccaggcgaatctctgtcccactctgagggagatgacgacgacgatatgggcgaagatgaggacgaagatgacgggttttttgtgccacacggatatctatccgaagatgaaggtgttacagaggagtgcgcagaccccgagaatcacaaggtgaggcagaagctgaaggcaaaggagtgggacgaattcctcgccaaaggaaaaaggtttagagtcctgcaacccgtgaagattggctgtgtgtgggctgccgaccgcgactgcgccggtgatgatcttaaggttttacagcagttcgctgcctgtttcttggagaccttgcctgcacaggaagaacagaccccaaaggcttcgaagcgcgaacgcagagatgagcaaatcctcgctcaactgttgccgctcttgcacggaaatgtgaatgggtctaaggtgattatcagggaattccaggagcactgtagaaggggcttgttgtccaaccataccggatctccgaggtccccctcaactacctaccttcacacacctacaccttccgaggatgctgccatccctagcaagtcacggttgaaacgacttatctccgagaattccgtctacgagaaacggccagattttcggatgtgttggtacgtacacccccaggtgctgcagagctttcagcaggaacacctgcctgtgccctgtcaatggtcttatgtaacaagcgttccttccgcccctaaggaggatagcgggtccgtcccatcaacaggtccctctcaagggacacctatctcacttaaacgcaaatctgctgggagcatgtgtatcactcagtttatgaaaaagcggagacatgacggacagattggggcggaggacatggacggtttccaggctgacaccgaggaggaggaagaggaggagggagattgtatgatagttgatgttcctgatgcggcagaggtgcaggccccttgtggagcagcctccggcgctggcgggggagttggagttgacacgggaaaggccaccctgacatctagcccccttggggccagctag

SEQ ID NO: 320330 - DNA, 2871 bp, Artificial Sequence
  derived and/or modified sequence
atgctggaggagctggagtgtggggcccctggggcccggggagctgccacagccatggactgcaaggacaggcctgccttccctgtgaagaagctgatccaggcccggctgcccttcaagaggctgaacctggtgcccaagggcaaggcagatgacatgtctgatgaccagggcacctctgtgcagagcaagagcccagacctggaggccagcctggacaccctggagaacaactgccacgtgggcagtgacatcgacttccggcccaagctggtgaatggcaagggccccctggacaacttcctgaggaaccgcatcgagaccagcatcggccagagcaccgtcatcatcgacctgacagaggacagcaatgagcagcctgacagcctggtggaccacaacaagctgaacagcgaggccagccccagccgggaggccatcaatggccagcgggaggacaccggggaccagcagggcctgctgaaggccatccagaatgacaagctggccttccctggagagaccctgagtgacatcccctgcaagacagaggaggagggcgtgggctgcggcggggccggcagaagaggagacagccaggagtgcagccccaggagctgcccagagctgaccagcggccccaggatgtgccccaggaaggagcaggacagctggagcgaggccggcggcatcctcttcaagggcaaggtgcccatggtggtgctgcaggacatcctggccgtgcggcccccccagatcaagagcctgcctgccaccccccagggcaagaacatgaccccagagagcgaggtgctggagagcttccctgaggaggacagcgtgctgagccacagcagcctgagcagccccagcagcaccagcagccctgagggccccccagccccacccaagcagcacagcagcaccagccccttccccaccagcacccccctgcggcgcatcaccaagaagtttgtgaagggcagcacagagaagaacaagctgcggctgcagagggaccaggagcggctgggcaagcagctgaagctgcgggcagagcgggaggagaaggagaagctgaaggaggaggccaagagggccaaggaggaggccaagaagaagaaggaggaggagaaggagctgaaggagaaggagcggcgggagaagcgggagaaggatgagaaggagaaggccgagaagcagaggctgaaggaggagaggaggaaggagcggcaggaggccctggaggccaagctggaggagaagaggaagaaggaggaggagaagaggctgcgggaggaggagaagaggatcaaggccgagaaggccgagatcacccgcttcttccagaagcccaagaccccccaggcccccaagaccctggccggcagctgtgggaagtttgccccctttgagatcaaggagcacatggtgctggcccccaggagaagaacagccttccacccagacctgtgcagccagctggaccagctgctgcagcagcagagcggggagttctccttcctgaaggacctgaagggccggcagcccctgcggagcggccccacccacgtgtccaccagaaatgctgacatcttcaacagtgatgtggtgattgtggagcggggcaaaggagatggagtgcctgagaggaggaagtttggccgcatgaagctgctgcagttctgtgagaaccacaggcctgcctactggggcacctggaacaagaagacagccctgatccgggcccgggacccctgggcccaggacaccaagctgctggactatgaggtggacagtgatgaggagtgggaggaggaggagcctggagagagcctgagccacagtgaaggagatgatgatgatgacatgggagaagatgaagatgaagatgatggcttctttgtgccccacggctacctgtctgaagatgagggcgtgacagaggagtgtgccgaccctgagaaccacaaggtgcggcagaagctgaaggccaaggagtgggatgagttcctggccaagggcaagcgcttccgggtgctgcagcctgtgaagattggctgtgtgtgggccgctgaccgggactgtgctggagatgacctgaaggtgctgcagcagtttgctgcctgcttcctggagaccctgcctgcccaggaggagcagacccccaaggccagcaagcgggagaggagagatgagcagatcctggcccagctgctgcccctgctgcacggcaatgtgaatggcagcaaggtgatcatccgggagttccaggagcactgccggcggggcctgctgagcaaccacacaggcagccccaggagccccagcaccacctacctgcacacccccaccccatctgaagatgctgccatccccagcaagagccggctgaagaggctcatcagcgagaacagcgtgtatgagaagaggccagacttcaggatgtgctggtacgtgcacccccaggtgctgcagagcttccagcaggagcacctgcctgtgccctgccagtggagctatgtgacctctgtgcccagcgcccccaaggaggacagcggctctgtgcccagcacaggccccagccagggcacccccatcagcctgaagaggaagtctgctggctccatgtgcatcacccagttcatgaagaagagaagacatgatggccagatcggggctgaggacatggatggcttccaggccgacacagaggaggaggaggaggaggagggggactgcatgattgtggatgtgcctgatgctgctgaggtgcaggccccctgtggggccgccagcggggccggcggcggcgtgggcgtggacaccgggaaggccaccctgaccagcagccccctgggcgccagctag

SEQ ID NO: 320331 - DNA, 2871 bp, Artificial Sequence
  derived and/or modified sequence
atgctggaggagctggagtgcggcgcccccggcgcccggggcgccgccacagccatggattgtaaggaccgtcccgccttccctgttaagaagcttattcaggcccggctcccattcaaaaggctcaatcttgtgcccaagggaaaggccgatgacatgtcagacgaccaggggacatctgtacagagcaaatcccctgatctggaagcctcccttgacaccctcgagaataactgtcacgtggggagcgatatagacttccggcctaagttggtaaacggaaagggaccactggataactttctgcgcaacaggatcgaaacctcaatcggccagtctaccgtcatcatcgacctcactgaggattctaacgagcagcccgatagcttggttgatcataacaaattaaatagcgaggcatcaccttccagggaggccataaacgggcagcgagaagacacaggggatcaacagggtctgctcaaagctatacagaatgataaactcgcattccccggggagactctgtcagatatcccgtgtaagacagaggaagagggggtgggctgtggtggggccgggaggaggggagattcacaggagtgcagtccccgaagctgccccgagctgacatcgggccctcgtatgtgccccaggaaggagcaagacagctggtctgaagccggaggtatcctttttaaaggtaaagtcccaatggttgtgctacaggacatattggccgttaggcctccacaaattaagagcctgccggctactcctcaggggaaaaatatgacgcctgagagcgaggtgctggaaagttttcctgaggaagacagtgtcctgtcgcactcatcactgagcagcccctcctcaaccagtagcccagagggaccaccagccccacctaagcagcactctagcacctcccccttcccgactagcactccgttaagacgcatcacaaagaagtttgtcaagggctctaccgaaaagaataaactgcgcttgcagagggatcaagagcggcttggaaaacagctgaaactcagggcggagcgggaggaaaaagagaagctgaaggaagaagccaagcgagccaaagaagaagccaaaaagaaaaaggaggaggagaaggagctcaaggaaaaggagcgacgcgaaaagcgcgaaaaagatgaaaaagaaaaagcagagaaacagagactcaaggaggaaaggcgcaaggagcggcaggaagcacttgaagctaagcttgaagagaagcggaagaaagaggaggaaaaaaggttgcgggaggaagagaagcgaatcaaggccgagaaggctgaaattacaagatttttccagaaacctaagacaccccaggctcctaagacattagcaggttcatgcggcaagttcgcacctttcgaaatcaaagaacatatggtactcgcgccacgccgacggacagcctttcaccctgatctctgctcgcagctggatcagctgctgcagcagcagagtggagaatttagcttcctcaaggacttaaagggccgtcaaccactgaggagtggtcccacgcatgtgtccacgaggaatgcggacatcttcaatagcgacgtggtgattgtcgaacgcggaaagggggatggtgtacccgagcgaaggaaatttggccgtatgaagctacttcagttttgtgaaaaccaccggcccgcttactggggcacttggaacaagaaaactgcacttatcagggctcgcgacccttgggctcaggataccaagctgctcgactacgaggttgacagcgacgaggaatgggaggaggaagagcccggggaaagcctgagccatagtgagggagacgacgatgacgacatgggcgaggatgaggatgaggacgacggcttttttgtaccacatggatatctgtcggaagatgagggtgtcaccgaggaatgcgccgacccagagaaccacaaagttcgacaaaagctgaaggcgaaggaatgggatgagttcctggccaaaggcaagcgcttcagggtgctgcagccggtaaaaataggctgcgtgtgggctgcagaccgtgattgtgcaggagacgacctcaaggtgttgcagcagttcgccgcctgctttctcgagaccctccctgcacaggaggaacaaacccccaaagcttctaagcgtgaacggagggacgaacagatccttgcgcagttgctgccactgttgcacggcaatgtgaatggcagtaaggtcattattcgggagttccaggagcactgtagacgtgggctgctgtcaaatcacaccgggagcccaagatcacctagcacaacctatctgcatactcctacgcccagtgaagatgctgctatcccttctaaaagcagactcaagagattgattagcgagaattctgtctacgaaaagcgtcccgattttcgcatgtgttggtatgtacatccacaagtccttcagagcttccaacaagagcacctgccagtcccatgtcagtggagctatgtcacaagcgttcccagcgctcctaaggaggattccgggtctgtgcctagtaccgggccatctcaagggacacccatatccctgaaaaggaaatccgccggatccatgtgcattacccagttcatgaaaaaacggaggcacgatggacagataggagccgaggatatggacggctttcaggccgataccgaggaggaggaagaagaggaaggcgattgcatgatcgtggatgtgccagatgccgccgaggtacaggccccctgcggcgcagcctcaggagctggcggaggcgtgggcgtcgatacaggcaaagccacattgacgtcgtcccctctgggtgcatcttag

SEQ ID NO: 320332 - DNA, 2871 bp, Artificial Sequence
  derived and/or modified sequence
atgctggaggagctggagtgtggggctccaggcgcaaggggggcagccacagctatggattgcaaagaccgtcctgcttttcctgtgaagaagctgattcaggccaggttaccttttaagcgcttgaacctcgtccccaagggaaaagcagacgacatgagcgacgaccagggcactagcgtacaaagtaagtctccagacctggaggccagcctcgacacactggaaaacaactgtcatgtgggctctgacatcgatttccgcccaaaattagtgaatggcaagggaccactggataatttcctgaggaaccgtatcgaaacgagcatcgggcaatctactgtcatcatagaccttactgaagactctaacgaacagccagatagtctcgtggatcacaataagctgaactcggaagcatcacctagccgtgaagctatcaacggacagagagaggacaccggagaccagcaagggctgctgaaagccatccagaacgataaattagcattccctggtgagactctgtcagatatcccatgtaagacagaggaggagggggtcgggtgcggtggcgcaggacgcagaggggacagccaggagtgtagccccagatcctgccccgaattaacttctggccctcggatgtgcccacgtaaggagcaggatagctggagcgaagcgggtggaatcctattcaaggggaaagttccaatggtcgtgctgcaggacattcttgcagtccgccctccacagatcaaaagcctgcccgctaccccccaagggaaaaacatgacgcctgaaagtgaggtcctggagtcttttcccgaggaagatagcgtactatctcactccagcctctcaagtcctagctcaacctcaagccctgagggcccacccgcaccacccaaacaacactcatcgaccagcccattcccaacatctacccctctgagacgcattaccaaaaaattcgtaaaaggctccaccgaaaaaaacaaactgaggcttcaacgagaccaggagcgactgggcaagcagctgaagctgcgggctgagagggaagagaaagaaaagttaaaggaggaagctaaacgggcaaaggaagaagcaaaaaaaaaaaaggaggaggagaaagagctcaaggagaaagaaaggcgcgaaaaaagagaaaaggatgaaaaagagaaagctgaaaaacaacgtttaaaagaggagcggcgaaaggagagacaagaagctctcgaggctaaactagaagagaagaggaaaaaggaagaggagaaacgcttgagagaggaagaaaaacggataaaagccgagaaggccgagatcacgagattcttccaaaagcccaagactccccaagcccctaaaactcttgctgggtcctgcgggaagtttgctcctttcgagattaaagagcacatggttctggcccctaggagaaggacagcctttcacccggatctgtgcagtcaacttgatcagttattgcagcaacagagcggcgagttctcattcctgaaagatctcaaaggtcggcagcccctgcgcagcggtccaacacatgtgagcacaagaaacgccgatatctttaactctgatgtggttatcgttgaaagggggaaaggtgacggagtgccagagcggaggaaatttggcagaatgaagttactgcagttctgcgaaaaccacaggccagcttattggggcacgtggaataaaaagactgccctgatcagagcccgagatccgtgggcccaggacactaagctgttggattatgaggttgacagcgatgaagaatgggaggaggaagagccaggcgagtccctgtcacattcagagggtgacgacgatgacgatatgggggaggacgaggatgaggatgacgggttctttgttccacacgggtacctctccgaagatgaaggcgttacagaggagtgcgccgacccggagaaccacaaagtccgtcaaaagctcaaagccaaagaatgggatgagtttctcgccaaagggaagcggttcagagtgctgcagccagtgaagattgggtgcgtctgggcggcagacagagattgtgccggtgacgatctaaaagtcctacagcagttcgcggcatgctttctggagaccctgccagcccaagaagaacagactccgaaggcatctaagagagagcggagagatgagcaaatactcgctcagcttctgcctctcctccatggtaacgtgaatggatccaaagtgattatcagggaatttcaggagcactgccggaggggtcttctgagtaatcatacaggttccccacgctctccatccacgacctacttgcacacgccaactccctctgaggacgcagcaatcccttccaaaagccgtttgaaaagactgatttccgagaactcagtctacgaaaagcgccctgatttccggatgtgctggtatgtgcaccctcaggttctccagtctttccagcaggagcacctgccggttccttgtcagtggagttacgtgactagcgtacccagtgcccctaaggaggacagcggttcagttccgagtaccggaccctcgcagggtacgcctatttcactcaagcggaaatccgctgggtctatgtgcataacccaattcatgaagaagcggaggcacgacggacagattggtgccgaagacatggacgggtttcaggccgacactgaggaggaggaagaggaagagggtgactgtatgattgtggatgtgcctgacgccgctgaggttcaggccccttgcggagccgcatccggagccggaggcggtgtcggtgtggacaccggaaaagctacactaacctcatctcctctcggcgcttcctag

SEQ ID NO: 320333 - DNA, 3343 bp, Artificial Sequence
  derived and/or modified sequence
gcggcagcagcggcgcgggcgggagggcgaagagcagcggccgcctgaggggagcccgcgcctccgccgcctgagaggaggtcgagctgccgccggggcgatgctggaggagctggagtgcggggcgcccggcgccaggggagccgccacagccatggattgcaaagatagaccagcttttccagttaagaagttaatacaagcccgtctgccgtttaagcgcctgaatcttgtcccaaaggggaaagccgatgacatgtcagacgatcagggtacttctgtgcaaagtaaaagccccgatttagaggcctctttggacaccttggaaaacaactgtcatgtgggttctgacatagactttagaccgaaacttgtcaacgggaagggtcccttagataactttttaagaaatagaatcgaaaccagtattggccagagcacagtcatcattgatttgacagaggactcgaatgagcagccagacagtcttgtggaccacaataaactaaattctgaagcctctccctccagggaggcaataaatggccagcgagaagacactggggatcagcaggggttgttgaaggccattcagaacgacaagttggcatttcctggagagaccctttcagacattccttgcaaaacagaggaggagggtgttggctgtggaggtgcagggaggagaggcgactcccaggaatgttcgccacggagctgcccggagctgacgagtggcccgagaatgtgccccagaaaggagcaggacagttggagtgaagctgggggcatcctgttcaaagggaaggtgcctatggtggtcttgcaggacatcttggctgtgagaccaccgcaaatcaagtcccttccagccacaccccaaggcaagaacatgacccctgagagtgaggtgctggaatctttccccgaagaagactctgtactcagccattcgtccctgagctctccctcttccaccagctcgcccgaggggccgcctgctcccccaaagcagcacagcagtaccagtcccttccccacctccacgcccctccgcagaataactaagaaattcgtcaaaggctctacagagaagaacaagctcagactgcaaagagatcaggagcgtctgggcaagcagctcaagttacgtgcagaaagggaagaaaaggagaagctgaaagaggaggccaagcgggccaaggaggaggccaagaagaagaaggaggaagagaaggagcttaaggaaaaggagaggcgggagaagcgggagaaggatgagaaggagaaggcggagaagcagcggctcaaggaggagcggcgcaaggagagacaggaagccctggaggctaaacttgaggaaaaaaggaaaaaggaagaagagaaacggttaagagaagaagagaagcgcattaaagcagagaaggccgaaatcacgaggttcttccagaaaccaaagactccacaggcccccaagaccctggccggctcctgtgggaagtttgccccctttgaaattaaagagcacatggtcctggcccctcggcgtcggaccgctttccatccagacctctgcagtcagctggaccagctcctccagcagcagagcggcgagttctccttcttgaaagacctcaaaggccggcagcccctgaggtccggacccacgcacgtttccacccggaatgcagatatttttaacagtgatgtcgtcatcgtggagcgtgggaagggcgacggtgttcccgagaggaggaagtttggcaggatgaagctcctgcagttctgtgagaaccaccggcctgcctactggggtacctggaataagaagacggcactcatccgcgcgcgagacccctgggcccaggacacgaagctcctggactatgaggtggacagtgatgaggagtgggaagaagaggagcctggggagtccctgtcccacagtgagggggatgatgatgacgacatgggagaggatgaagatgaggacgatggtttctttgtgccccatgggtacctgtctgaggacgaaggtgtgacagaggagtgtgccgaccctgagaaccataaggtccgccagaaactgaaggccaaggagtgggacgagttcctggctaaggggaagcgctttcgcgtcctgcaacctgtgaagatcggctgcgtgtgggcggctgacagagactgcgcaggcgatgacctgaaggtactgcagcagttcgcagcctgcttcctggagaccctgccggcccaggaggagcagacgcccaaggcctccaagcgggagaggagagacgagcagatcctggcccagctgctgccgctcctgcacggcaatgtgaacgggagcaaggtcatcatccgggagttccaggagcactgccgccggggactgctcagcaaccacaccggcagcccgcggagcccctccaccacctacctgcacacccccacccccagcgaggatgccgccatcccctctaagtcccggctcaagcggctcatttccgagaactcagtgtatgagaagcggcctgacttcaggatgtgctggtacgtgcacccgcaggtgctacagagcttccagcaggagcacctgcccgtgccgtgccagtggagctatgtgacatcggtgccctcggcccccaaagaggacagtggcagcgtcccctccacggggcccagccagggcactcccatctcgctgaagaggaagtcagcgggcagcatgtgcatcacccaattcatgaagaagcgcaggcacgacggccagattggtgctgaagacatggacggcttccaggcagacacggaggaggaggaagaggaggagggcgactgtatgatcgtggatgtcccggatgctgcggaggtccaagccccgtgtggagccgcttccggagctgggggtggtgtgggggtggacaccggcaaggccaccctgacctcgagcccactgggtgcatcctgagagcaggggtgacgtatgtagaatgcttagggtgtcctccccacagagcagatacttgaaccgactcaattcctgtgtaaagagcactttgtcctgcttcacggacctccccaaagtgtgcagagttctatataggatgctggattagttcctttgatatttgtaaaaattcccccaagagccgcatatgaatctgccctttaataaagcattattgagattgctggcctattggggaagcctgcgggcacaggagcaggcgtggaatccaatacttgtaaatgaattgaagcgtcaggaccacccgcctggccacgtgcgcgggcccctggacctaacgaggcagtgtataaacttattctctagccctga

SEQ ID NO: 320334 - DNA, 2871 bp, Artificial Sequence
  derived and/or modified sequence
atgctggaggagctggagtgcggcgcccccggcgccagaggcgccgccaccgccatggactgcaaggacagacccgccttccccgtgaagaagctgatccaggccagactgcccttcaagagactgaacctggtgcccaagggcaaggccgacgacatgagcgacgaccagggcaccagcgtgcagagcaagagccccgacctggaggccagcctggacaccctggagaacaactgccacgtgggcagcgacatcgacttcagacccaagctggtgaacggcaagggccccctggacaacttcctgagaaacagaatcgagaccagcatcggccagagcaccgtgatcatcgacctgaccgaggacagcaacgagcagcccgacagcctggtggaccacaacaagctgaacagcgaggccagccccagcagagaggccatcaacggccagagagaggacaccggcgaccagcagggcctgctgaaggccatccagaacgacaagctggccttccccggcgagaccctgagcgacatcccctgcaagaccgaggaggagggcgtgggctgcggcggcgccggcagaagaggcgacagccaggagtgcagccccagaagctgccccgagctgaccagcggccccagaatgtgccccagaaaggagcaggacagctggagcgaggccggcggcatcctgttcaagggcaaggtgcccatggtggtgctgcaggacatcctggccgtgagacccccccagatcaagagcctgcccgccaccccccagggcaagaacatgacccccgagagcgaggtgctggagagcttccccgaggaggacagcgtgctgagccacagcagcctgagcagccccagcagcaccagcagccccgagggcccccccgccccccccaagcagcacagcagcaccagccccttccccaccagcacccccctgagaagaatcaccaagaagttcgtgaagggcagcaccgagaagaacaagctgagactgcagagagaccaggagagactgggcaagcagctgaagctgagagccgagagagaggagaaggagaagctgaaggaggaggccaagagagccaaggaggaggccaagaagaagaaggaggaggagaaggagctgaaggagaaggagagaagagagaagagagagaaggacgagaaggagaaggccgagaagcagagactgaaggaggagagaagaaaggagagacaggaggccctggaggccaagctggaggagaagagaaagaaggaggaggagaagagactgagagaggaggagaagagaatcaaggccgagaaggccgagatcaccagattcttccagaagcccaagaccccccaggcccccaagaccctggccggcagctgcggcaagttcgcccccttcgagatcaaggagcacatggtgctggcccccagaagaagaaccgccttccaccccgacctgtgcagccagctggaccagctgctgcagcagcagagcggcgagttcagcttcctgaaggacctgaagggcagacagcccctgagaagcggccccacccacgtgagcaccagaaacgccgacatcttcaacagcgacgtggtgatcgtggagagaggcaagggcgacggcgtgcccgagagaagaaagttcggcagaatgaagctgctgcagttctgcgagaaccacagacccgcctactggggcacctggaacaagaagaccgccctgatcagagccagagacccctgggcccaggacaccaagctgctggactacgaggtggacagcgacgaggagtgggaggaggaggagcccggcgagagcctgagccacagcgagggcgacgacgacgacgacatgggcgaggacgaggacgaggacgacggcttcttcgtgccccacggctacctgagcgaggacgagggcgtgaccgaggagtgcgccgaccccgagaaccacaaggtgagacagaagctgaaggccaaggagtgggacgagttcctggccaagggcaagagattcagagtgctgcagcccgtgaagatcggctgcgtgtgggccgccgacagagactgcgccggcgacgacctgaaggtgctgcagcagttcgccgcctgcttcctggagaccctgcccgcccaggaggagcagacccccaaggccagcaagagagagagaagagacgagcagatcctggcccagctgctgcccctgctgcacggcaacgtgaacggcagcaaggtgatcatcagagagttccaggagcactgcagaagaggcctgctgagcaaccacaccggcagccccagaagccccagcaccacctacctgcacacccccacccccagcgaggacgccgccatccccagcaagagcagactgaagagactgatcagcgagaacagcgtgtacgagaagagacccgacttcagaatgtgctggtacgtgcacccccaggtgctgcagagcttccagcaggagcacctgcccgtgccctgccagtggagctacgtgaccagcgtgcccagcgcccccaaggaggacagcggcagcgtgcccagcaccggccccagccagggcacccccatcagcctgaagagaaagagcgccggcagcatgtgcatcacccagttcatgaagaagagaagacacgacggccagatcggcgccgaggacatggacggcttccaggccgacaccgaggaggaggaggaggaggagggcgactgcatgatcgtggacgtgcccgacgccgccgaggtgcaggccccctgcggcgccgccagcggcgccggcggcggcgtgggcgtggacaccggcaaggccaccctgaccagcagccccctgggcgccagctag

SEQ ID NO: 320335 - protein, 372 aa, Artificial Sequence
  derived and/or modified sequence
MKYLRHRRPNATLILAIGAFTLLLFSLLVSPPTCKVQEQPPAIPEALAWPTPPTRPAPAPCHANTSMVTHPDFATQPQHVQNFLLYRHCRHFPLLQDVPPSKCAQPVFLLLVIKSSPSNYVRRELLRRTWGRERKVRGLQLRLLFLVGTASNPHEARKVNRLLELEAQTHGDILQWDFHDSFFNLTLKQVLFLQWQETRCANASFVLNGDDDVFAHTDNMVFYLQDHDPGRHLFVGQLIQNVGPIRAFWSKYYVPEVVTQNERYPPYCGGGGFLLSRFTAAALRRAAHVLDIFPIDDVFLGMCLELEGLKPASHSGIRTSGVRAPSQRLSSFDPCFYRDLLLVHRFLPYEMLLMWDALNQPNLTCGNQTQIY

SEQ ID NO: 320336 - DNA, 1119 bp, Artificial Sequence
  derived and/or modified sequence
atgaagtacctgagacacagaagacccaacgccaccctgatcctggccatcggcgccttcaccctgctgctgttcagcctgctggtgagcccccccacctgcaaggtgcaggagcagccccccgccatccccgaggccctggcctggcccaccccccccaccagacccgcccccgccccctgccacgccaacaccagcatggtgacccaccccgacttcgccacccagccccagcacgtgcagaacttcctgctgtacagacactgcagacacttccccctgctgcaggacgtgccccccagcaagtgcgcccagcccgtgttcctgctgctggtgatcaagagcagccccagcaactacgtgagaagagagctgctgagaagaacctggggcagagagagaaaggtgagaggcctgcagctgagactgctgttcctggtgggcaccgccagcaacccccacgaggccagaaaggtgaacagactgctggagctggaggcccagacccacggcgacatcctgcagtgggacttccacgacagcttcttcaacctgaccctgaagcaggtgctgttcctgcagtggcaggagaccagatgcgccaacgccagcttcgtgctgaacggcgacgacgacgtgttcgcccacaccgacaacatggtgttctacctgcaggaccacgaccccggcagacacctgttcgtgggccagctgatccagaacgtgggccccatcagagccttctggagcaagtactacgtgcccgaggtggtgacccagaacgagagataccccccctactgcggcggcggcggcttcctgctgagcagattcaccgccgccgccctgagaagagccgcccacgtgctggacatcttccccatcgacgacgtgttcctgggcatgtgcctggagctggagggcctgaagcccgccagccacagcggcatcagaaccagcggcgtgagagcccccagccagagactgagcagcttcgacccctgcttctacagagacctgctgctggtgcacagattcctgccctacgagatgctgctgatgtgggacgccctgaaccagcccaacctgacctgcggcaaccagacccagatctactag

SEQ ID NO: 320337 - DNA, 1119 bp, Artificial Sequence
  derived and/or modified sequence
atgaagtacctgaggcatagacgtccaaatgcgacgcttatcctcgccattggggcctttacactgctcttgttctctctgttggtttctccaccaacatgtaaagtgcaggagcagcctccagcaatcccagaggctctggcctggccaactccaccaacgcgtcccgctcccgccccctgccatgcgaacacctctatggtgacccaccccgacttcgccactcagccacaacatgtccagaatttccttttataccgacactgcaggcattttcccctcctgcaagatgtgcctccatccaaatgcgcccaacccgtgtttcttcttctggtgataaagtcgagtcctagcaactatgtccggagggaattgctgagaaggacatggggcagggagagaaaagtgagggggctgcagcttcgcctgctctttttagtcggcacagcctctaatccacacgaggccagaaaggtgaaccgcttgctggagctggaagctcaaacgcacggcgacatacttcagtgggactttcacgacagtttcttcaatttgaccctgaagcaagtgttattccttcagtggcaagaaacaaggtgtgctaacgcgtcttttgttcttaacggcgacgacgacgtgtttgcacatacagacaacatggtgttctatctgcaggatcacgacccagggagacacttattcgtgggccagcttatccagaatgttggacctatcagggccttctggtctaaatattacgtgcccgaggttgtaacacagaatgaacggtaccctccttattgcggtggcggcggattcctgctaagtcgtttcaccgccgccgctcttcgtcgggccgcacacgtgctcgatatcttccctatcgacgatgtatttctgggcatgtgcctcgaattggaaggcctcaagccagctagtcacagtgggatccgtacctccggcgtgcgcgctccctcacagcgcctttccagctttgatccctgcttttatagagatctgctacttgttcaccgcttcctgccttacgagatgctactaatgtgggacgcactaaaccagcccaatcttacatgcggtaatcaaactcagatatactag

SEQ ID NO: 320338 - DNA, 1119 bp, Artificial Sequence
  derived and/or modified sequence
atgaagtacctgcggcacagaagaccaaatgccaccctcatcctggccatcggggccttcaccctgctgctcttcagcctgctggtgtccccacccacctgcaaggtgcaggagcagcccccagccatccctgaggccctggcctggcccaccccacccaccaggcctgccccagccccctgccacgccaacacctccatggtgacccacccagactttgccacccagccccagcacgtgcagaacttcctgctgtaccgccactgccgccacttccccctgctgcaggatgtgccccccagcaaatgtgcccagcccgtcttcctgctgctggtgatcaagagcagccccagcaactacgtgcggcgggagctgctgcggaggacctggggccgggagaggaaggtgcggggcctgcagctgcggctgctcttcctggtgggcacagccagcaacccccatgaggccaggaaggtgaaccggctgctggagctggaggcccagacccacggggacatcctgcagtgggacttccatgacagcttcttcaacctgaccctgaagcaggtgctcttcctgcagtggcaggagacccgctgtgccaatgccagctttgtgctgaatggagatgatgatgtgtttgcccacacagacaacatggtgttctacctgcaggaccatgaccccggccgccacctgtttgtgggccagctgatccagaatgtgggccccatccgggccttctggagcaagtactacgtgcctgaggtggtgacccagaatgaaagatacccaccctactgcggcggcggcggcttcctgctgagccgcttcaccgctgctgccctgcggcgggccgcccacgtgctggacatcttccccattgatgatgtgttcctgggcatgtgcctggagctggagggcctgaagccagccagccacagcggcatccgcaccagcggcgtgcgggcccccagccagaggctgagcagctttgacccctgcttctacagagacctgctgctggtgcaccgcttcctgccctatgagatgctgctgatgtgggatgccctgaaccagcccaacctgacctgtggcaaccagacccagatctactag

SEQ ID NO: 320339 - DNA, 1119 bp, Artificial Sequence
  derived and/or modified sequence
atgaagtacctgcggcaccggcggcccaacgccaccctgatcctggccatcggcgccttcacacttttgctgtttagcctcctagttagtcctcctacatgtaaagtgcaggagcagccccctgccatccccgaggccttggcttggccaacgccacccacaagacctgcccccgccccctgtcatgcaaacacctctatggtgacgcacccagatttcgcaacccaaccacagcacgtgcagaatttcctcctttataggcactgtaggcactttccgttgctacaggatgtcccaccaagcaagtgtgcccaacccgtgttcctgctgctggtgatcaaatcttctcccagcaattacgtaaggcgtgaacttttgcgtcgaacttggggccgcgagagaaaggtgaggggcctgcagcttcgattgctatttcttgtcggaacagcctcaaatcctcatgaagcccgcaaagtgaaccgacttctggagctcgaggcacaaacccatggcgacatcctgcagtgggactttcacgactcgttttttaacctgactttgaaacaagtactgttccttcagtggcaagaaacacgatgcgcgaacgccagtttcgtgcttaacggggacgacgatgtcttcgcccacacagacaatatggtgttctacctgcaggaccacgatccaggaagacacctcttcgtggggcagctgatacagaatgtgggcccaatcagggccttctggtccaagtactatgtgccagaggttgtgacgcagaacgaacgttatccaccctactgcggaggggggggctttctgctgtcgcggtttacggccgccgctctgagaagagccgcccacgtgctggacattttccccatcgacgacgtgttcctcggcatgtgtctcgaactcgagggattaaaaccggcgtctcactcaggcattcggacctcaggcgtccgcgcaccgtctcaacggctgtcatcattcgacccctgtttttacagggatctgctgctcgtccatcggttcctgccttatgagatgctgctgatgtgggacgcactgaaccagcctaatctaacctgcggcaatcagacacagatttattag

SEQ ID NO: 320340 - DNA, 1119 bp, Artificial Sequence
  derived and/or modified sequence
atgaagtatttgcgtcataggagaccaaacgccactctgatcctcgccatcggggcttttactctgctattgttctcccttttggtgagcccacccacttgtaaggtgcaggagcagccccctgccatccccgaggccctggcctggcccacccctccaacaaggcctgccccagccccatgccatgctaacacctcaatggtcacgcatccggatttcgccacccagccacaacacgtacagaattttctcctctatagacactgcaggcacttccctctcctacaggacgtgcccccatcaaaatgtgctcagccggttttcttgctgttagttatcaagtcgtcaccctccaattacgtcagaagggagctgctgcggcgtacttggggcagagagcgtaaggtgagagggctccagctccggctgttgttcctcgttggcacggcctcaaatcctcacgaagcgcgaaaggtgaaccgtttgttagagcttgaggcccagacccacggggatatactacagtgggattttcacgatagctttttcaatctgacactcaagcaggtgctctttctgcaatggcaggaaacaagatgtgctaatgcctcctttgtgctgaacggagacgacgacgtcttcgctcataccgacaatatggtgttttacctccaggaccacgatcccggaagacacttgttcgtgggccagctgattcagaacgtgggcccaattagggctttttggtctaaatactacgttccggaagtggtgactcagaatgaacgctatcctccttattgtggaggcggaggctttctactgagcagatttactgctgccgcactgcggagagccgcacatgtgttagatattttccccatcgatgatgtgttcctgggtatgtgtctagagctggaggggctcaaaccagcatcacattccggaatccgcacctccggagttcgcgcaccaagccagcggttatcctcatttgatccgtgcttttatcgcgatctgctgctcgtccacaggtttctcccctacgagatgctgctcatgtgggacgctctgaatcagcccaacctcacctgtggcaaccaaacgcagatatattag

SEQ ID NO: 320341 - DNA, 2720 bp, Artificial Sequence
  derived and/or modified sequence
agaggggcgggagctctggctcaggtaaaaactctttcttcggctcgcgagctgagaggagcaggtagaggggcagaggcgggactgtcgtctgggggagccgcccaggaggctcctcaggccgaccccagaccctggctggccaggatgaagtatctccggcaccggcggcccaatgccaccctcattctggccatcggcgctttcaccctcctcctcttcagtctgctagtgtcaccacccacctgcaaggtccaggagcagccaccggcgatccccgaggccctggcctggcccactccacccacccgcccagccccggccccgtgccatgccaacacctctatggtcacccacccggacttcgccacgcagccgcagcacgttcagaacttcctcctgtacagacactgccgccactttcccctgctgcaggacgtgcccccctctaagtgcgcgcagccggtcttcctgctgctggtgatcaagtcctcccctagcaactatgtgcgccgcgagctgctgcggcgcacgtggggccgcgagcgcaaggtacggggtttgcagctgcgcctcctcttcctggtgggcacagcctccaacccgcacgaggcccgcaaggtcaaccggctgctggagctggaggcacagactcacggagacatcctgcagtgggacttccacgactccttcttcaacctcacgctcaagcaggtcctgttcttacagtggcaggagacaaggtgcgccaacgccagcttcgtgctcaacggggatgatgacgtctttgcacacacagacaacatggtcttctacctgcaggaccatgaccctggccgccacctcttcgtggggcaactgatccaaaacgtgggccccatccgggctttttggagcaagtactatgtgccagaggtggtgactcagaatgagcggtacccaccctattgtgggggtggtggcttcttgctgtcccgcttcacggccgctgccctgcgccgtgctgcccatgtcttggacatcttccccattgatgatgtcttcctgggtatgtgtctggagcttgagggactgaagcctgcctcccacagcggcatccgcacgtctggcgtgcgggctccatcgcaacgcctgtcctcctttgacccctgcttctaccgagacctgctgctggtgcaccgcttcctaccttatgagatgctgctcatgtgggatgcgctgaaccagcccaacctcacctgcggcaatcagacacagatctactgagtcagcatcagggtccccagcctctgggctcctgtttccataggaaggggcgacaccttcctcccaggaagctgagacctttgtggtctgagcataagggagtgccagggaaggtttgaggtttgatgagtgaatattctggctggcgaactcctacacatccttcaaaacccacctggtactgttccagcatcttccctggatggctggaggaactccagaaaatatccatcttctttttgtggctgctaatggcagaagtgcctgtgctagagttccaactgtggatgcatccgtcccgtttgagtcaaagtcttacttccctgctctcacctactcacagacgggatgctaagcagtgcacctgcagtggtttaatggcagataagctccgtctgcagttccaggccagccagaaactcctgtgtccacatagagctgacgtgagaaatatctttcagcccaggagagaggggtcctgatcttaaccctttcctgggtctcagacaactcagaaggttggggggataccagagaggtggtggaataggaccgccccctccttacttgtgggatcaaatgctgtaatggtggaggtgtgggcagaggagggaggcaagtgtcctttgaaagttgtgagagctcagagtttctggggtcctcattaggagcccccatccctgtgttccccaagaattcagagaacagcactggggctggaatgatctttaatgggcccaaggccaacaggcatatgcctcactactgcctggagaagggagagattcaggtcctccagcagcctccctcacccagtatgttttacagattacggggggaccgggtgagccagtgaccccctgtagcccccagcttcaggcctcagtgtctgccagtcaagcttcacaggcattgtgatggggcagccttggggaatataaaattttgtgaagacttggagatctttttttttttttaagcaaatttacaagtttcaacagacaagtccacattcatccctaaaagtctcattttccagtagaaaatatacactggtaaaaacggggcatggggccgtggctcagggctgtaattctagcacattgggagaccaaagtgggaggatcacttgagcccaggagttctggatcctgtctctgcacaaaataaaaaattactcaggcgtggtggtgctcacatgcctgtagtcccagctatacttgggaggctgaggcgagaggatcgcttgagcccaggagttggaggctgcagtgaaccatgattgcgccactgtactccactgggcggcaataagaagacaaaaacataaaacaggacatgtgtgaggcaaaagctgcaggaatttctatcaggcagatctgacctcatcccacccaccccctgctcagatacccttcatagctccttattgctttcagctcataaccccacat

SEQ ID NO: 320342 - DNA, 495 bp, Artificial Sequence
  derived and/or modified sequence
atggctttctggacccagctcatgctgctgttatggaaaaattttatgtatcgccgccggcagccggtgcagctgttagtggaactgctctggcctctttttctcttcttcatcttggtcgcagtgagacatagtcacccgcccctggagcaccatgagtgccacttccctaataaaccgttaccctcagccggaacagtgccctggttacagggcctcatttgcaatgtgaataatacgtgttttccgcagctgacccccggagaggagcccggccggttaagcaattttaacgatagcttagtgagtcggctgctagcagacgctcggaccgtcctgggcggtgcctccgctcaccgaacgctagctggcctgggaaagctcatagcaacgcttagagcggcacgcagtacagcacagccccagccgacgaaacagtctccacttgaaccacctatgctggacgttgcggaactgcttacatccctgctgtag

SEQ ID NO: 320343 - DNA, 495 bp, Artificial Sequence
  derived and/or modified sequence
atggccttctggacccagctgatgctgctgctgtggaagaacttcatgtacagaagacggcagcctgtgcagctgctggtggagctgctgtggcccctcttcctgttcttcatcctggtggccgtgcgccacagccacccccccctggagcaccacgagtgccacttccccaacaagcccctgcccagcgctggcaccgtgccctggctgcagggcctcatctgcaatgtgaacaacacctgcttcccccagctgaccccaggagaggagcccggccgcctgagcaacttcaatgacagcctggtgtcccggctgctggctgatgccaggacagtgctgggcggggccagcgcccacaggaccctggccggcctgggcaagctgattgccaccctgcgggccgcccggagcacagcccagccccagcccaccaagcagagccccctggagccccccatgctggatgtggccgagctgctgaccagcctgctgtag

SEQ ID NO: 320344 - DNA, 495 bp, Artificial Sequence
  derived and/or modified sequence
atggccttctggacccagctgatgctgctgctgtggaagaacttcatgtatcggagaagacagccagtccagctgctggttgagctactgtggccacttttcctgttctttatattggtggcggtaaggcatagccaccctcccctggaacatcatgaatgtcatttccccaataagccccttccctccgctggcaccgtcccttggctgcagggcctcatttgcaacgtgaacaacacttgtttccctcaactcacacccggcgaggagccaggacgtctgtccaacttcaatgattccctggtgtcacgcttactcgccgacgcgagaacggtcctggggggggccagtgctcaccggaccctggccgggttgggtaaactgatcgctaccttgcgagccgctagatctaccgcccagcctcaacccacaaagcagtcgccccttgagccacccatgctcgacgttgcggaactgctcacatcactgctgtag

SEQ ID NO: 320345 - DNA, 495 bp, Artificial Sequence
  derived and/or modified sequence
atggcattctggacccagttaatgttgctcctctggaagaactttatgtaccgcagacgtcaacctgtgcaactcctcgtcgaactcctgtggcctctcttcctgttttttatcttggttgcagttcgccattcccacccccctctagaacaccatgagtgccacttcccgaacaaacctcttcccagcgccggaactgtgccttggctccagggactcatctgtaacgtgaacaacacatgcttcccccagctcacccctggtgaagaacccggacgcctatccaacttcaacgatagcttggtcagccgtcttctggccgatgccagaacagtgctgggcggtgcctcagctcatcgaaccctcgctgggttgggaaagcttattgcaactttgagggcagccaggtccactgcccaaccccagcccaccaaacaatcaccgctcgagccacccatgctggacgtggcggagcttctgactagtctgctatag

SEQ ID NO: 320346 - DNA, 576 bp, Artificial Sequence
  derived and/or modified sequence
ttggcttaaggggcggcgcgctccctgcctgctgctgggcggagggaaggcggcaagagctgcggagcccctggaagtctcaccatggccttctggacacagctgatgctgctgctctggaagaatttcatgtatcgccggagacagccggtccagctcctggtcgaattgctgtggcctctcttcctcttcttcatcctggtggctgttcgccactcccacccgcccctggagcaccatgaatgccacttcccaaacaagccactgccatcggcgggcaccgtgccctggctccagggtctcatctgtaatgtgaacaacacctgctttccgcagctgacaccgggcgaggagcccgggcgcctgagcaacttcaacgactccctggtctcccggctgctagccgatgcccgcactgtgctgggaggggccagtgcccacaggacgctggctggcctagggaagctgatcgccacgctgagggctgcacgcagcacggcccagcctcaaccaaccaagcagtctccactggaaccacccatgctggatgtcgcggagctgctgacgtcactgctg

SEQ ID NO: 320347 - DNA, 495 bp, Artificial Sequence
  derived and/or modified sequence
atggccttctggacccagctgatgctgctgctgtggaagaacttcatgtacagaagaagacagcccgtgcagctgctggtggagctgctgtggcccctgttcctgttcttcatcctggtggccgtgagacacagccacccccccctggagcaccacgagtgccacttccccaacaagcccctgcccagcgccggcaccgtgccctggctgcagggcctgatctgcaacgtgaacaacacctgcttcccccagctgacccccggcgaggagcccggcagactgagcaacttcaacgacagcctggtgagcagactgctggccgacgccagaaccgtgctgggcggcgccagcgcccacagaaccctggccggcctgggcaagctgatcgccaccctgagagccgccagaagcaccgcccagccccagcccaccaagcagagccccctggagccccccatgctggacgtggccgagctgctgaccagcctgctgtag

SEQ ID NO: 320348 - DNA, 90 bp, Artificial Sequence
  derived and/or modified sequence
tagggtcccagaggcgagaaaggggatcttggagaaaagggagagaagggccccgatggactgcctatgcccggatgttggcagaagtag

SEQ ID NO: 320349 - protein, 332 aa, Artificial Sequence
  derived and/or modified sequence
MPSITTAAASGVSRSPGNRTGSWVTWAWKPSEYITAIMELSALVVKRNNQFFRYKDFLYFLTPCGRRFHRACRLVHDFTDAVIQERRRTLTSQGVDDFLQAKAKSKTLDFIDVLLLSEDKNGKELSDEDIRAEADTFMFGGHDTTASGLSWVLYNLARHPEYQERCRQEVQELLKDREPKEIEWDDLAQLPFLTMCLKESLRLHPPIPTFARGCTQDVVLPDSRVIPKGNVCNINIFAIHHNPSVWPDPEVYDPFRFDPENAQKRSPMAFIPFSAGPRNCIGQKFAMAEMKVVLALTLLRFRILPDHREPRRTPEIVLRAEDGLWLRVEPLG

SEQ ID NO: 320350 - protein, 519 aa, Artificial Sequence
  derived and/or modified sequence
MSLLSLSWLGLRPVAASPWLLLLVVGASWLLARILAWTYAFYHNGRRLRCFPQPRKQNWFLGHLGLVTPTEEGLRVLTQLVATYPQGFVRWLGPITPIINLCHPDIVRSVINTSDAITDKDIVFYKTLKPWLGDGLLLSVGDKWRHHRRLTPAFHFNILKPYIKIFSKSANIMHAKWQRLAMEGSTCLDVFEHISLMTLDSLQKCIFSFDSNCQEKPSEYITAIMELSALVVKRNNQFFRYKDFLYFLTPCGRRFHRACRLVHDFTDAVIQERRRTLTSQGVDDFLQAKAKSKTLDFIDVLLLSEDKNGKELSDEDIRAEADTFMFGGHDTTASGLSWVLYNLARHPEYQERCRQEVQELLKDREPKEIEWDDLAQLPFLTMCLKESLRLHPPIPTFARGCTQDVVLPDSRVIPKGNVCNINIFAIHHNPSVWPDPEVYDPFRFDPENAQKRSPMAFIPFSAGPRNCIGQKFAMAEMKVVLALTLLRFRILPDHREPRRTPEIVLRAEDGLWLRVEPLG

SEQ ID NO: 320351 - DNA, 1904 bp, Artificial Sequence
  derived and/or modified sequence
agcaaaaacctcctggcaaaggaggagaggaggttgtgcgggacaaccttctcctgacagaaggatgtcgctgctgagcctgtcttggctgggcctcaggccggtggcagcatccccgtggctgctcctgctggtggtcggggcctcctggctcctggcccgcatcctggcctggacctatgccttctatcacaacggccgccgcctccggtgtttcccgcagccccggaaacagaactggttcttgggtcacctgggcctggtcactcccacagaggagggcttgagggtcctgacccagctggtggccacctacccccagggctttgtgaggtggttgggccccatcactcccatcatcaacttgtgccaccctgacatcgtccgatctgtcatcaatacctcagatgccattacagacaaggacatagtcttctacaagaccctgaagccctggctgggggatgggctcttgttaagtgttggtgacaagtggagacaccaccgtcgcttgacgcctgccttccatttcaacatcctgaagccctatataaagattttcagcaagagtgcaaacatcatgcatgccaagtggcaacgcctggccatggagggcagcacctgtctggatgtgtttgagcacatcagccttatgaccctggacagtctgcagaaatgcatcttcagctttgacagcaattgtcaggagaagcccagtgaatatattactgcgatcatggagctcagtgcccttgtagtgaaacggaataaccagttcttccggtacaaggacttcctgtacttcctcactccctgtggacggcgcttccacagggcctgcagactggtgcacgacttcacagatgccgtcatccaggagcggcgccgcaccctcactagccagggtgttgatgacttcctccaagccaaggccaagtccaagactttggactttattgatgtgctcctgctgagcgaggataaaaatggtaaagagttgtcagatgaggacataagagcagaagctgacactttcatgtttggaggccatgacaccacggccagtggcctctcctgggtcttgtacaacctcgcgaggcacccagaataccaagaacgctgccggcaggaggtgcaagagcttctgaaggaccgtgagcctaaagagattgaatgggacgacctggcccagttgcccttcctgaccatgtgcctgaaggagagcctgcggttgcatcccccaatccctacattcgcccgcggctgcacccaggacgtggtgctcccagacagccgagtcatccccaaagggaatgtctgtaacatcaacatcttcgcaatccatcacaacccctcagtctggccagaccctgaggtctatgaccccttccgcttcgacccagaaaacgcccagaagaggtcacctatggcttttattcctttctcggcggggcccaggaactgcatcgggcagaagttcgcgatggcagagatgaaggtggtcctggcgctcacgctgctgcgcttccgcatcctgcccgaccacagggagccacgcaggacgccggagattgttttgcgtgcggaggacggactttggctgcgagtagaacccctgggctgaggcctgcagtgacccacccacctacctttgcatcacctacctttgcaccaactaccttttcagatttccggtaataaatctgtgttggcccctgtgcctcagtcccgcggatggccagtagggggcgctggaggactgcggggatctagggcctggctgggaagaggcggggagatgtctctgtgcccaagatactcactgcctctctgggtgagcacaggagccccgtgctgagggtgggatctcccagagtctaagtaaagactttttcccccccaaa

SEQ ID NO: 320352 - DNA, 1519 bp, Artificial Sequence
  derived and/or modified sequence
agcaaaaacctcctggcaaaggaggagaggaggttgtgcgggacaaccttctcctgacagaaggatgtcgctgctgagcctgtcttggctgggcctcaggccggtggcagcatccccgtggctgctcctgctggtggtcggggcctcctggctcctggcccgcatcctggcctggacctatgccttctatcacaacggccgccgcctccggtgtttcccgcagccccggaaacagaactggttcttgggtcacctgggcctggtcactcccacagaggagggcttgagggtcctgacccagctggtggccacctacccccagggctttgtgaggtggttgggccccatcactcccatcatcaacttgtgccaccctgacatcgtccgatctgtcatcaatacctcagatgccattacagacaaggacatagtcttctacaagaccctgaagccctggctgggtaagtaactgtaggtggacgggacggggaccaacttttgtggccaggggaagattctgcccttgcccacagcctttggctgccgtactaggggatgggctcttgttaagtgttggtgacaagtggagacaccaccgtcgcttgtgacgcctgccttccatttcaacatcctgaagccctatataaagattttcagcaagagtgcaaacatcatgcatgccaagtggcaacgcctggccatggagggcagcacctgtctggatgtgtttgagcacatcagccttatgaccctggacagtctgcagaaatgcatcttcagctttgacagcaattgtcaggagaagcccagtgaatatattactgcgatcatggagctcagtgcccttgtagtgaaacggaataaccagttcttccggtacaaggacttcctgtacttcctcactccctgtggacggcgcttccacagggcctgcagactggtgcacgacttcacagatgccgtcatccaggagcggcgccgcaccctcactagccagggtgttgatgacttcctccaagccaaggccaagtccaagactttggactttattgatgtgctcctgctgagcgaggataaaaatggtaaagagttgtcagatgaggacataagagcagaagctgacactttcatgtttggaggccatgacaccacggccagtggcctctcctgggtcttgtacaacctcgcgaggcacccagaataccaagaacgctgccggcaggaggtgcaagagcttctgaaggaccgtgagcctaaagagattgaatgggacgacctggcccagttgcccttcctgaccatgtgcctgaaggagagcctgcggttgcatcccccaatccctacattcgcccgcggctgcacccaggacgtggtgctcccagacagccgagtcatccccaaaggtctatgaccccttccgcttcgacccagaaaacgcccagaagaggtcacctatggcttttattcctttctcggcggggcccaggaactgcatcgggcagaagttcgcgatggcaga

SEQ ID NO: 320353 - DNA, 459 bp, Artificial Sequence
  derived and/or modified sequence
atggaggccgaggcctggggcagccaggcccgggccggcctgggcgctgctgagaactgcctggagggcggcaaccaggccttcctgctggagcgggtgacaggcaccaagggccggggccagggccagcccctggagcgggccggggaggagggggaggccggcggggacccccggcgggaccccggggaggtggtggccaagagccgggtgcgggcccggccccacctgagcctgtacccagccctgcccggggtggccctggccctgctgtgctgccccctgcaggaccgctgcctgcggctggtgcctgcctgccccacagctggcccccagcacccccaggtgctgccctgggccctgcagaagcagggcgtggtgcgcagcggcccctgggccacagaggagatggtgtggggcaccaggactggagtgggcggcctgacagctgtgttctag

SEQ ID NO: 320354 - DNA, 393 bp, Artificial Sequence
  derived and/or modified sequence
atgagcctgtgctcactgttgtcaccacggagcggcttccgctgttgttgcgctgcacctccacctccagctcagccacatcaggaggcccagggtggactggtagagctgctcatgcacgctgcagcccgtaagacgctcttcaatttccccccagctccctcacgtgccagtccaggccatcgggttgcttgtcagcccgatcgtgctcgcaaaagtggatcatgggctgtcgcacagcgaaggagggagcaagaagaagctggggctcgtgcaggcgctgttgatccgctggggctcccgctggttagctctatctcatgtgtccagcattgtaatcttgctgcaggtgtccaaacaggcaggccccctgcctctagcacagactgctag

SEQ ID NO: 320355 - DNA, 942 bp, Artificial Sequence
  derived and/or modified sequence
cctctacctgctccaccctcaatccaccagaaccatgggctgttgcggctgctccggaggctgtggctccagctgtgggggctgtggctccggctgtgggggctgtggctccggctgtgggggctgtggctctggctgtggaggttctggctccagctgctgtgtgcccgtctgctgctgcaagcccgtgtgctgccgtgtgccaacctgttcctgctccagctgtggcaaagggggctgtggctcttctgggggctccaaggggggctgtggctcctgtggaggctgcaaggggggctgtggctcttgtgggggatccaaggggggttgtggctcctgtgggggctccaaggggggctgtggctcttgtgggggatccaagggtggctgtggttccggctgtgggggatgtggctccagctgctgtgtgcctgtctgctgctgcaagcccatgtgctgctgtgtgccagcttgttcctgctccagctgtggcaaagggggctgtggctcctgtgggtgctccaagggggcctgtggttcttgtgggggctccaaggggggctgtggctcctgtggaggctgcaaggggggctgcggttcttgtgggggatccaaggggggttgtggctccggctgtgggggctgtggctccggctgcggtgtgcccgtgtgttgctgttcctgttccagttgtggctcttgcgcggggtctaagggaggctgcgggtcatcctgctcccagtgcagttgctgtaagccctgctgctgttcctcaggctgtgggtcatcctgttgccaatccagctgctgcaagccctgctgctcccagtccagttgctgtgtccccgtgtgctgccagtgcaagatctgatttctggctttgcaggactcttaccatggccaggcattcctgcccagcctttacctccttttcctggcacc

SEQ ID NO: 320356 - protein, 473 aa, Artificial Sequence
  derived and/or modified sequence
MGPGPPAAGAAPSPRPLSLVARLSYAVGHFLNDLCASMWFTYLLLYLHSVRAYSSRGAGLLLLLGQVADGLCTPLVGYEADRAASCCARYGPRKAWHLVGTVCVLLSFPFIFSPCLGCGAATPEWAALLYYGPFIVIFQFGWASTQISHLSLIPELVTNDHEKVELTALRYAFTVVANITVYGAAWLLLHLQGSSRVEPTQDISISDQLGGQDVPVFRNLSLLVVGVGAVFSLLFHLGTRERRRPHAEEPGEHTPLLAPATAQPLLLWKHWLREPAFYQVGILYMTTRLIVNLSQTYMAMYLTYSLHLPKKFIATIPLVMYLSGFLSSFLMKPINKCIGRNMTYFSGLLVILAFAAWVALAEGLGVAVYAAAVLLGAGCATILVTSLAMTADLIGPHTNSGAFVYGSMSFLDKVANGLAVMAIQSLHPCPSELCCRACVSFYHWAMVAVTGGVGVAAALCLCSLLLWPTRLRR

SEQ ID NO: 320357 - DNA, 1422 bp, Artificial Sequence
  derived and/or modified sequence
atgggccccggcccccccgccgccggcgccgcccccagccccagacccctgagcctggtggccagactgagctacgccgtgggccacttcctgaacgacctgtgcgccagcatgtggttcacctacctgctgctgtacctgcacagcgtgagagcctacagcagcagaggcgccggcctgctgctgctgctgggccaggtggccgacggcctgtgcacccccctggtgggctacgaggccgacagagccgccagctgctgcgccagatacggccccagaaaggcctggcacctggtgggcaccgtgtgcgtgctgctgagcttccccttcatcttcagcccctgcctgggctgcggcgccgccacccccgagtgggccgccctgctgtactacggccccttcatcgtgatcttccagttcggctgggccagcacccagatcagccacctgagcctgatccccgagctggtgaccaacgaccacgagaaggtggagctgaccgccctgagatacgccttcaccgtggtggccaacatcaccgtgtacggcgccgcctggctgctgctgcacctgcagggcagcagcagagtggagcccacccaggacatcagcatcagcgaccagctgggcggccaggacgtgcccgtgttcagaaacctgagcctgctggtggtgggcgtgggcgccgtgttcagcctgctgttccacctgggcaccagagagagaagaagaccccacgccgaggagcccggcgagcacacccccctgctggcccccgccaccgcccagcccctgctgctgtggaagcactggctgagagagcccgccttctaccaggtgggcatcctgtacatgaccaccagactgatcgtgaacctgagccagacctacatggccatgtacctgacctacagcctgcacctgcccaagaagttcatcgccaccatccccctggtgatgtacctgagcggcttcctgagcagcttcctgatgaagcccatcaacaagtgcatcggcagaaacatgacctacttcagcggcctgctggtgatcctggccttcgccgcctgggtggccctggccgagggcctgggcgtggccgtgtacgccgccgccgtgctgctgggcgccggctgcgccaccatcctggtgaccagcctggccatgaccgccgacctgatcggcccccacaccaacagcggcgccttcgtgtacggcagcatgagcttcctggacaaggtggccaacggcctggccgtgatggccatccagagcctgcacccctgccccagcgagctgtgctgcagagcctgcgtgagcttctaccactgggccatggtggccgtgaccggcggcgtgggcgtggccgccgccctgtgcctgtgcagcctgctgctgtggcccaccagactgagaagatag

SEQ ID NO: 320358 - DNA, 1422 bp, Artificial Sequence
  derived and/or modified sequence
atgggccctggacccccagctgctggggcagccccgagcccaagaccgctcagtcttgtggctaggctctcttatgccgtgggtcacttcttaaacgatctttgcgcctccatgtggttcacttatttactcctctacttgcactctgtcagagcctactcaagtcgtggcgcaggacttctgcttctgctcggtcaggtcgctgacgggctctgcacacccctagtcggttacgaagccgaccgggccgcctcttgctgtgccaggtatggaccaagaaaggcctggcacctggtgggaactgtgtgtgtgcttctctctttccccttcattttctctccctgcctgggttgcggcgctgctaccccagagtgggccgctcttttgtactatggcccgtttattgtaatctttcagtttggctgggcctcaacgcagatctctcacctgtctctcattccagagctggtgaccaacgaccacgagaaggtagaactgacagcgttgcggtacgctttcactgtggtggccaacatcacagtgtatggggctgcctggctgttgctgcacctgcagggttcttcccgcgtggagcccacacaagatatctcgatttccgatcaattgggcggacaagacgttcctgtttttagaaatctctccttgctagttgtaggggtcggtgccgtattcagcctcctcttccatcttggaactagggagaggcggcgccctcacgccgaagagccgggggagcacacacctctgctagctcccgccacagcccagccactgctgctgtggaagcactggttgagggaacctgccttctatcaggttggaatcctttacatgactactcggctcattgtgaatctgagtcagacctacatggctatgtacctcacctatagtctgcatctaccaaagaaatttatcgctaccatccccctcgtgatgtatctgtctgggttcctgtccagctttttgatgaagcctatcaataagtgcattgggcggaacatgacatatttttccgggctgctcgttatcttagcatttgccgcttgggtggctttagctgagggcctgggagtcgccgtctacgccgctgctgtgcttctaggggctggttgtgcaactatcctcgtgacaagcttagctatgacagctgacctgatcggacctcacacaaatagcggggcctttgtctacgggtctatgagttttcttgacaaggtcgctaacggcttggcggttatggctatccagagcctgcacccttgcccaagtgaactgtgctgtagagcctgtgtgtccttctatcactgggctatggtagctgttactggaggggtcggagtcgctgccgcattgtgtctgtgctcccttttgctctggcccacccggttgcggcgttag

SEQ ID NO: 320359 - DNA, 2082 bp, Artificial Sequence
  derived and/or modified sequence
tggggcggacgcggcggacgtgggtgagggcgcggccgtaagagagcgggacgcggggtgcccggcgcgtggtgggggtccccggcgcctgcccccacggcacccaagaaggcctggccagggtaccctccgcggagcccgggggtggggggcgcgggcccggcgccgcgatgggcccgggacccccagcggccggagcggcgccgtccccgcggccgctgtccctggtggcgcggctgagctacgccgtgggccacttcctcaacgacctgtgcgcgtccatgtggttcacctacctgctgctctacctgcactcggtgcgcgcctacagctcccgcggcgcggggctgctgctgctgctgggccaggtggccgacgggctgtgcacaccgctcgtgggctacgaggccgaccgcgccgccagctgctgcgcccgctacggcccgcgcaaggcctggcacctggtcggcaccgtctgcgtcctgctgtccttccccttcatcttcagcccctgcctgggctgtggggcggccacgcccgagtgggctgccctcctctactacggcccgttcatcgtgatcttccagtttggctgggcctccacacagatctcccacctcagcctcatcccggagctcgtcaccaacgaccatgagaaggtggagctcacggcactcaggtatgcgttcaccgtggtggccaacatcaccgtctacggcgccgcctggctcctgctgcacctgcagggctcgtcgcgggtggagcccacccaagacatcagcatcagcgaccagctggggggccaggacgtgcccgtgttccggaacctgtccctgctggtggtgggtgtcggcgccgtgttctcactgctattccacctgggcacccgggagaggcgccggccgcatgcggaggagccaggcgagcacacccccctgttggcccctgccacggcccagcccctgctgctctggaagcactggctccgggagccggctttctaccaggtgggcatactgtacatgaccaccaggctcatcgtgaacctgtcccagacctacatggccatgtacctcacctactcgctccacctgcccaagaagttcatcgcgaccattcccctggtgatgtacctcagcggcttcttgtcctccttcctcatgaagcccatcaacaagtgcattgggaggaacatgacctacttctcaggcctcctggtgatcctggcctttgccgcctgggtggcgctggcggagggactgggtgtggccgtgtacgcagcggctgtgctgctgggtgctggctgtgccaccatcctcgtcacctcgctggccatgacggccgacctcatcggtccccacacgaacagcggagcgttcgtgtacggctccatgagcttcttggataaggtggccaatgggctggcagtcatggccatccagagcctgcacccttgcccctcagagctctgctgcagggcctgcgtgagcttttaccactgggcgatggtggctgtgacgggcggcgtgggcgtggccgctgccctgtgtctctgtagcctcctgctgtggccgacccgcctgcgacgctgatgagacctgcacgcagtggctcacagcagcacgatttgtgacagcccgaggcggagaacaccgaacacccagtgaaggtgaggggatcagcacggcgccgccaccgtgctggaacgagactcagccacaaggaggtgcgaagctctgacccaggccacagtgcggatgcaccttgaggatgtcacgctcagtgagagacaccagacacagaagggtacgctgtgatcccacttctatgaaatgtccaggacagaccaatccacagaatcagggagaggattcgtgggtgccgggactggggagggggacctgggggtgactaggtgacataatggggacagggctgccttctgggtgatgagaatgttctggaatcagatgggatggctgcacggcgtggtgaaggtactgaacgccacctcactgtaagacggtagattttgtattttaccacaataaacaaaacaaaacaaaaccaaaccaaacccaa

SEQ ID NO: 320360 - DNA, 1422 bp, Artificial Sequence
  derived and/or modified sequence
atgggccctggccccccagctgctggggccgcccccagcccccggcccctgagcctggtggcccggctgtcctatgctgtgggccacttcctgaatgacctgtgtgcctccatgtggttcacctacctgctgctgtacctgcacagcgtgcgggcctacagcagcagaggagctggcctgctgctgctgctgggccaggtggctgatggcctgtgcacccccctggtgggctatgaggccgacagagctgccagctgctgtgcccgctatggccccaggaaggcctggcacctggtgggcaccgtgtgtgtgctgctgtccttccccttcatcttcagcccctgcctgggctgtggggccgccaccccagagtgggccgccctgctgtactacggccccttcatcgtcatcttccagtttggctgggccagcacccagatcagccacctgagcctcatccctgagctggtgaccaatgaccacgagaaggtggagctgacagccctgcgctatgccttcaccgtggtggccaacatcaccgtgtatggagctgcctggctgctgctgcacctgcagggcagcagccgggtggagcccacccaggacatcagcatcagtgaccagctgggcggccaggatgtgcctgtgttcaggaacctgagcctgctggtggtgggcgtgggcgctgtgttcagcctgctcttccacctgggcacccgggagaggagaagacctcatgctgaggagcccggggagcacacccccctgctggccccagccacagcccagcccctgctgctgtggaagcactggctgcgggagcccgccttctaccaggtgggcatcctgtacatgaccaccaggctcatcgtgaacctgagccagacctacatggccatgtacctgacctacagcctgcacctgcccaagaagttcatcgccaccatccccctggtgatgtacctgagcggcttcctgagcagcttcctgatgaagcccatcaacaagtgcatcggcaggaacatgacctacttcagcggcctgctggtgatcctggcctttgctgcctgggtggccctggccgagggcctgggcgtggccgtgtatgctgctgctgtgctgctgggcgccggctgtgccaccatcctggtgaccagcctggccatgacagctgacctgattggcccccacaccaacagcggggcctttgtgtatggctccatgtccttcctggacaaggtggccaacggcctggccgtgatggccatccagagcctgcacccctgccccagcgagctgtgctgccgggcctgtgtgtccttctaccactgggccatggtggccgtgactggaggagtgggcgtggccgccgccctgtgcctgtgcagcctgctgctgtggcccacccggctgcggaggtag

SEQ ID NO: 320361 - DNA, 1422 bp, Artificial Sequence
  derived and/or modified sequence
atgggccccggcccccccgccgccggcgccgcccccagcccccggccactgtctttggtggctcgcctgagttatgctgtggggcatttcctcaatgacctctgcgcatcaatgtggttcacatatctgctgctttatctgcatagcgtgagggcgtactcatccagaggggctggactgctgcttttgctcggtcaggtcgctgatggcctatgcaccccactggtaggatatgaagctgatcgcgccgcatcctgttgtgctcgctatgggcccagaaaagcttggcacctcgtggggaccgtctgcgtgctgctttcctttcctttcatcttttctccatgtcttggatgcggtgccgcaacaccggagtgggccgccttactctattacggccctttcattgttatattccagttcgggtgggctagcacacaaatctcacacctctcattaattccagaactggtgacaaatgaccacgaaaaagtggagctgactgctttacggtacgcgttcaccgtggtggcaaacataactgtgtacggagcggcttggctgcttctgcacttacagggcagcagcagggtggagcctacccaggacatcagcattagcgatcagctgggtggccaggacgttcctgtgtttagaaacctatccttgttggtggtgggcgttggagccgtgtttagcctactgtttcatctgggcacaagggaacgccgacggcctcacgccgaggagccaggggaacatacccctctgctcgcccccgcaaccgcccaaccactgctactatggaaacattggctgcgggaacctgcattttaccaggtaggcatcctatatatgactactcgcctgatcgtgaatttgtctcaaacctacatggctatgtatctcacctattctttgcatttgccaaagaaatttatcgccaccattccactagtgatgtacttgagcggctttctaagcagcttcctgatgaaacctatcaacaagtgcattgggaggaatatgacttacttctccgggttgctggtgatcttagcatttgctgcctgggttgcgctcgccgaaggcctcggcgtggctgtgtacgccgccgccgtcttactcggagccgggtgcgccacaatcctggtgacgtcacttgctatgaccgcagatctgataggcccccacactaactccggtgctttcgtctatggatcaatgtcttttttggacaaagtggctaacggattagcagttatggcaattcagagcctgcatccttgtccaagcgagctgtgctgtcgcgcttgtgtgtcattctatcattgggctatggtggccgtcacaggaggcgtgggcgttgccgcagccttatgcctctgcagccttttgctttggccaactaggcttcgacgctag

SEQ ID NO: 320362 - DNA, 1422 bp, Artificial Sequence
  derived and/or modified sequence
atgggcccaggcccacctgcggcaggagctgctcccagtccgaggcctttgtcacttgtggcacgactgtcctatgctgtggggcatttcctgaatgacctttgtgcgtctatgtggttcacctatctgttgctgtacctgcattccgtccgagcgtactcttctaggggcgctggccttctgcttctcctgggacaggtcgcagatgggctctgtaccccattggtggggtacgaggcagatcgtgccgcaagttgctgcgcccgatacggtcctaggaaagcctggcatctggtcggcactgtctgtgtgctgctctcgtttcccttcattttcagcccgtgcctggggtgtggggcagctacacctgaatgggccgctctgctctactatgggccatttattgtaatctttcagtttggctgggcctctactcaaatatcgcatctcagcctgattcctgagctggttactaatgatcatgagaaggttgagcttacggctctgcgctacgcgtttaccgtggttgccaacattacggtatacggcgctgcttggctgctcttacaccttcagggctctagccgggttgaaccaacccaggatatttcaatctctgatcagctcggtggccaagacgtgcccgtgttccggaatttaagcttactcgtcgtgggtgtgggcgcagtcttcagcctgttgtttcatttggggaccagagagagacgacggccacacgcagaagagcccggagagcacacaccactgctggcgcctgcaacagcccaaccattgttgctgtggaaacattggttgcgagagcccgcattctaccaggtgggcatcttatatatgacaacacgactcatcgttaatctcagtcagacttatatggccatgtatctgacatacagcctgcatctgcccaaaaaattcattgcgacaataccactcgtaatgtatttatccggatttttgagctctttccttatgaaacctattaataagtgcatcgggcgaaatatgacatactttagcggcttgctggtcatccttgcttttgctgcttgggtggcattggcagaagggctgggagtagctgtgtacgccgcagctgtgctgctgggggctgggtgtgcgactatcctggttacatcactggccatgacggccgatctaatcggaccgcacaccaatagtggcgcattcgtctatggctctatgtcttttctggataaagtagccaatggtctcgcagtaatggctatccagtctctccacccatgtccaagcgaactatgctgtcgagcatgtgtcagtttctatcattgggctatggtggctgtgaccggaggggtcggtgtggccgcagcactgtgcttgtgtagtctgctcttatggcccacccgccttagaagatag

SEQ ID NO: 320363 - DNA, 953 bp, Artificial Sequence
  derived and/or modified sequence
tttgacagaggggaacactgaggctcagggtggcttttcccagggtcccatgctggcccagaagtatgaccaccagcgggagcaggagctgagagagtggatcgagggggtgacaggccgtcgcatcggcaacaacttcatggacggcctcaaagatggcatcattctttgcgaattcatcaataagctgcagccaggctccgtgaagaagatcaatgagtcaacccaaaattggcaccagctggagaacatcggcaacttcatcaaggccatcaccaagtatggggtgaagccccacgacatttttgaggccaacgacctgtttgagaacaccaaccatacacaggtgcagtccaccctcctggctttggccagcatggcgaagacgaaaggaaacaaggtgaacgtgggagtgaagtacgcagagaagcaggagcggaaattcgagccggggaagctaagagaagggcggaacatcattgggctgcagatgggcaccaacaagtttgccagccagcagggcatgacggcctatggcacccggcgccacctctacgaccccaagctgggcacagaccagcctctggaccaggcgaccatcagcctgcagatgggcaccaacaaaggagccagccaggctggcatgactgcgccagggaccaagcggcagatcttcgagccggggctgggcatggagcactgcgacacgctcaatgtcagcctgcagatgggcagcaacaagggcgcctcgcagcggggcatgacggtgtatgggctgccacgccaggtctacgaccccaagtactgtctgactcccgagtacccagagctgggtgagcccgcccacaaccaccacgcacacaactactacaattccgcctagggccacaaggccttccctgttttccccccaagggaggctgctgctgctcttggctggacccagccaggcc

SEQ ID NO: 320364 - protein, 247 aa, Artificial Sequence
  derived and/or modified sequence
MDGLKDGIILCEFINKLQPGSVKKINESTQNWHQLENIGNFIKAITKYGVKPHDIFEANDLFENTNHTQVQSTLLALASMAKTKGNKVNVGVKYAEKQERKFEPGKLREGRNIIGLQMGTNKFASQQGMTAYGTRRHLYDPKLGTDQPLDQATISLQMGTNKGASQAGMTAPGTKRQIFEPGLGMEHCDTLNVSLQMGSNKGASQRGMTVYGLPRQVYDPKYCLTPEYPELGEPAHNHHAHNYYNSA

SEQ ID NO: 320365 - protein, 277 aa, Artificial Sequence
  derived and/or modified sequence
MLAQKYDHQREQELREWIEGVTGRRIGNNFMDGLKDGIILCEFINKLQPGSVKKINESTQNWHQLENIGNFIKAITKYGVKPHDIFEANDLFENTNHTQVQSTLLALASMAKTKGNKVNVGVKYAEKQERKFEPGKLREGRNIIGLQMGTNKFASQQGMTAYGTRRHLYDPKLGTDQPLDQATISLQMGTNKGASQAGMTAPGTKRQIFEPGLGMEHCDTLNVSLQMGSNKGASQRGMTVYGLPRQVYDPKYCLTPEYPELGEPAHNHHAHNYYNSA

SEQ ID NO: 320366 - DNA, 1449 bp, Artificial Sequence
  derived and/or modified sequence
agacggaacttcagccgctgcctctgttctcagcgtcagtgccgccactgcccccgccagagcccaccggccagcatgtcctctgctcacttcaaccgaggccctgcctacgggctgtcagccgaggttaagaacaagggggaagacttgttgatttttccatatcccccggcctgacaaagaaattggggagcgcttgagtgctggggtacctgggaagtgacgccgtgaaagtgtgggagatcctgaagacagagggggacggtgaaaggcaggaagcgggcatcagaagtgcggcaggggtctcctgactgtggagctaggaagatacctggacaccaccttcatgctatggttgggtaaactgaggttcggagaggagaggcaaatagctggggtcccaggtaaagcagctggcccagaagtatgaccaccagcgggagcaggagctgagagagtggatcgagggggtgacaggccgtcgcatcggcaacaacttcatggacggcctcaaagatggcatcattctttgcgaattcatcaataagctgcagccaggctccgtgaagaagatcaatgagtcaacccaaaattggcaccagctggagaacatcggcaacttcatcaaggccatcaccaagtatggggtgaagccccacgacatttttgaggccaacgacctgtttgagaacaccaaccatacacaggtgcagtccaccctcctggctttggccagcatggcgaagacgaaaggaaacaaggtgaacgtgggagtgaagtacgcagagaagcaggagcggaaattcgagccggggaagctaagagaagggcggaacatcattgggctgcagatgggcaccaacaagtttgccagccagcagggcatgacggcctatggcacccggcgccacctctacgaccccaagctgggcacagaccagcctctggaccaggcgaccatcagcctgcagatgggcaccaacaaaggagccagccaggctggcatgactgcgccagggaccaagcggcagatcttcgagccggggctgggcatggagcactgcgacacgctcaatgtcagcctgcagatgggcagcaacaagggcgcctcgcagcggggcatgacggtgtatgggctgccacgccaggtctacgaccccaagtactgtctgactcccgagtacccagagctgggtgagcccgcccacaaccaccacgcacacaactactacaattccgcctagggccacaaggccttccctgttttccccccaagggaggctgctgctgctcttggctggacccagccaggcccagccgaccccctctccctgcatggcatcctccagcccctgtagaactcaacctctacagggttagagtttggagagagcagactggcggggggcccattggggggaaggggaccctccgctctgtagtgctaca

SEQ ID NO: 320367 - protein, 198 aa, Artificial Sequence
  derived and/or modified sequence
MPEQSNDYRVVVFGAGGVGKSSLVLRFVKGTFRDTYIPTIEDTYRQVISCDKSVCTLQITDTTGSHQFPAMQRLSISKGHAFILVFSVTSKQSLEELGPIYKLIVQIKGSVEDIPVMLVGNKCDETQREVDTREAQAVAQEWKCAFMETSAKMNYNVKELFQELLTLETRRNMSLNIDGKRSGKQKRTDRVKGKCTLM

SEQ ID NO: 320368 - DNA, 3397 bp, Artificial Sequence
  derived and/or modified sequence
ggctcgggcgggcggggggcggcggcgccagcggacaccggagcgggcaggagcagcggccgcggcgccgcagggaccagcgggcccaggctcggtctggggttcttgcagctggcaccagccctcccggccccggccgcccacccgccgcggggaagatgccggaacagagtaacgattaccgcgtggtggtgttcggggcgggcggcgtgggcaagagctcgctggtgctgcgcttcgtgaagggcacgttccgcgacacctacatccccaccatcgaggacacctaccggcaggtgatcagctgcgacaagagcgtgtgcacgctgcagatcacagacaccaccggcagccaccagttcccggccatgcagcgcctgtccatctccaagggccacgccttcatcctggtgttctccgtcaccagcaagcagtcgctggaggagctggggcccatctacaagctcatcgtgcagatcaagggcagcgtggaggacatccccgtgatgctcgtgggcaacaagtgcgatgagacgcagcgggaggtggacacgcgcgaggcgcaggcggtggcccaggagtggaagtgcgctttcatggagacctcggccaagatgaactacaacgtcaaggagctcttccaggagctgctgacgctggagacgcgccggaacatgagcctcaacatcgacggcaagcgctccgggaagcagaagaggacagaccgcgtcaagggcaaatgcaccctcatgtgagcccggaacgcccgcctgcccgccgcccacccccactgacccccgctgcctcccccaacaccgacaccctcctcggcctcctcctcttctctcatccttcctccgacacctcggctggggaaaccgaggccaccgcccccccctccgctgcccctgcccaccccgaggcagggctggggcttttcttcctcccctgctctctctccaccctcctgttctgtctgtaccctccaaaaccaagagccggaggtggcccccttgtcctgcagatgggaaaacaggatggggagctggcaagaggagctgcttgttcccaccaggaccagaggaggctgcgtttccccgtttccatctctttccctggggtgtccccagccagacctgcgcgtcctgtccctcacatttgatcactgtgaccttctgggggaggggggagttgaaaatgcacatcggcctcagatatttttttcttttttctcctatttggtgttaacatacacccaagcccacccggcccgtcgtgacctctgatctgtgcccactcctccggttccagacgcacctctctcctctgtcttcacagtggggtgtggggcccgtgggatgggcctcaggccaccaggcaataaccacagggcctgcagcagtgcccctgccagccccgaatcccacccccgggaccagccacatccacagcacaactgccccgctggagaggcaccatgggcgtggaggggcttcccggacaccgcccacccgggacccgcctcttccaccaagacagagacgttagcaacgcatggcgggtggggacctggggtgctcaggagggggtacccggggccccggccagagatacatcaattacacccccgtggggggacagccgatgggagccagcaccagcaggatccgagggcgccccggacagaggtctgccccacccacttcctccccaccacctgtgccccagagagcagggcctgcccgggaaggtggcgtcctggagtcgagtgtacctgcagccatgaggttctgggtgttttttgagagagtctgagtgacaccacactcgtgtgaccccacagggttgtgtccaacatacacggaagtggctatggaatggtgtatttgtgcaacctggggtgcgcggatgggtgacttgtatctaagtgcatctgcgtgtatacctgtgtgtgtctgtctgggatgatatgtttttgtggcagtctgtgtgtgtaatagtggtgtagggtatacagagaggtgggtagttgtagatacctgtgtgtggttgtcagcaagactggatatgtgtgaggtgtctgtgtgaatctttgtgcctgtatgagcatgactatattttggggagtgggtgatatggtttatctgagagcatttatctgtaaatatgtttgtcctgattgagggacacgatctgtgttccactctatagcaacatgactctagcaatgtgactttcggttccaaatctgtatcagtcagctactgctgtgtaacaaatgaccacaaatgtagcaaccagaaacaacacatgcttattatctcatagattctgtgggtcaagagcctgggtgcaggttggctgggtcctctacttgggatctcaggaggctgcaatcaaagcattcgccaggcagaggtctcatctgaaggcctgatcggggaaggatttgcttcttagaagctcatgtggttgttgcagcattcagttccttgctgttgcaagactgaaggcctcagttcctcgctggctgttggctggaagctgccctttgttctgtaccatgtgggtctctccacagcggggctcggagcatggcagctaagttagtgagggaaggtgagatggaggttttggtcttattgggtgtgaggaagcaacgtgtgtgtgtgcgcacgcccttttgtgcagtgagagagagagagagattgcacacatgtgtctctgtagtcatgtggccaggtgggactatgtaggtaacagattgctcgtgtctgatttggtacaagcatgtttgttttcctctgtgttcgtgtgagtgtttactcaacaaatgtttattggacacactcagagagagggagtgtgcacacgtgcgtgtgtgttgctatccagcacgtggaccgggctcccagaagagctggcattgtgtctgagcagagctgggtccccccaaaacttgggctggcccagggcccaccagcagctgatgttgcctcctctcctgtcctggcagtagcttctgggttctgaaggtgccggagagagtgaggctgggcaggggtctgcggccctttctcagggacacaccctgatagcacaatctccttggggccctgcccacctccaggcctctcccacctcaggccctgcccgaccctggggagagagggcatctgcaataggaggggacccgagcctgtcctggctgctggcccatcctgcctgggcatccctggtgctggggactgtgccaggccatgcttgctgtgactccgcccctgccccctctccccccgcatgtgggtgcccccactcccccatcgtggggtctgtgtagccttcgctctagacatagtcttcctgcaataaaaaagtggatcctgcattccccacc

SEQ ID NO: 320369 - protein, 673 aa, Artificial Sequence
  derived and/or modified sequence
MMFQDSVAFEDVAVTFTQEEWALLDPSQKNLCRDVMQETFRNLASIGKKWKPQNIYVEYENLRRNLRIVGERLFESKEGHQHGEILTQVPDDMLKKTTTGVKSCESSVYGEVGSAHSSLNRHIRDDTGHKAYEYQEYGQKPYKCKYCKKPFNCLSSVQTHERAHSGRKLYVCEECGKTFISHSNLQRHRIMHRGDGPYKCKFCGKALMFLSLYLIHKRTHTGEKPYQCKQCGKAFSHSSSLRIHERTHTGEKPYKCNECGKAFHSSTCLHAHKRTHTGEKPYECKQCGKAFSSSHSFQIHERTHTGEKPYECKECGKAFKCPSSVRRHERTHSRKKPYECKHCGKVLSYLTSFQNHLGMHTGEISHKCKICGKAFYSPSSLQTHEKTHTGEKPYKCNQCGKAFNSSSSFRYHERTHTGEKPYECKQCGKAFRSASLLQTHGRTHTGEKPYACKECGKPFSNFSFFQIHERMHREEKPYECKGYGKTFSLPSLFHRHERTHTGGKTYECKQCGRSFNCSSSFRYHGRTHTGEKPYECKQCGKAFRSASQLQIHGRTHTGEKPYECKQCGKAFGSASHLQMHGRTHTGEKPYECKQCGKSFGCASRLQMHGRTHTGEKPYKCKQCGKAFGCPSNLRRHGRTHTGEKPYKCNQCGKVFRCSSQLQVHGRAHCIDTP

SEQ ID NO: 320370 - protein, 638 aa, Artificial Sequence
  derived and/or modified sequence
MQETFRNLASIGKKWKPQNIYVEYENLRRNLRIVGERLFESKEGHQHGEILTQVPDDMLKKTTTGVKSCESSVYGEVGSAHSSLNRHIRDDTGHKAYEYQEYGQKPYKCKYCKKPFNCLSSVQTHERAHSGRKLYVCEECGKTFISHSNLQRHRIMHRGDGPYKCKFCGKALMFLSLYLIHKRTHTGEKPYQCKQCGKAFSHSSSLRIHERTHTGEKPYKCNECGKAFHSSTCLHAHKRTHTGEKPYECKQCGKAFSSSHSFQIHERTHTGEKPYECKECGKAFKCPSSVRRHERTHSRKKPYECKHCGKVLSYLTSFQNHLGMHTGEISHKCKICGKAFYSPSSLQTHEKTHTGEKPYKCNQCGKAFNSSSSFRYHERTHTGEKPYECKQCGKAFRSASLLQTHGRTHTGEKPYACKECGKPFSNFSFFQIHERMHREEKPYECKGYGKTFSLPSLFHRHERTHTGGKTYECKQCGRSFNCSSSFRYHGRTHTGEKPYECKQCGKAFRSASQLQIHGRTHTGEKPYECKQCGKAFGSASHLQMHGRTHTGEKPYECKQCGKSFGCASRLQMHGRTHTGEKPYKCKQCGKAFGCPSNLRRHGRTHTGEKPYKCNQCGKVFRCSSQLQVHGRAHCIDTP

SEQ ID NO: 320371 - DNA, 3381 bp, Artificial Sequence
  derived and/or modified sequence
gaaaaagcccgcggcgtcttctctgtcacccgcgctcggctccctgctcggtcgggctggaacctgtactggcagccggaggtgtaggtaggaaccggaatacctcggaagccgggaaatgacggagtttcattcttgttgcccaggctggagtgcaatggcgcgatctcagctcaccacaacctctgcctcccacattcaagcgattctcctgcctcagcctcccgagtagctgggattacagtgtggtgtgttgaatattatagtttcaaaatccttcatgtgtgttaggactcaatgatctttgaggatgtggctgtgaactttacccaggaggagtgggctttgctggatccgtcccagaagaaactctacagagatgtgatgtgggaaatcatcaggaacctgatgtctgtaggaataaaatgggaagaccggaacattgaagatcagtacaaaaattccaggagaaatccaagaaatcatatggcagagagactctgtgaatgtaaagatggtcaatgtggagaaactttcagcctgattccagatggtataatgaacaagaacactcttcctggggtaaaaccatgtgaaagcagtgtgtgtggagaaggcaacgtggatcattcatctctgaattgctacatcagagctgacactggacacaaaccgtatgagtgtcaggaacatggagagaagccacataaatgtaagcagtgtgtaaaaaccttcagctgcctccactccttccaaacacatgaaaagcctcacacaggagagaaaccctatgattgtaaggaatgggaaaaaaccttcgattctccccaaaccgttcgaagatacagggtagtgcacagtggagatggaccttataaatgttgaagaatttgtgaccgtggataagttcgtttcctgttatgtgaacttggcagattaatgctaaatcctgtgggacagcatttagcaacacctaaaaaacatgataaagaaatacctgagactgggtaatttataaagaaaagaggttgaattggcccatgattctgcagactgcacaggaagcatggtactggaaggatggcatctgctcagcttctagggaggcctcaggaaactgacaatcatggtggaaggcaaagggggagcagcagttcacacggccagagaaggagcaagagagagcagggcaaggtgccacagacttttaaatgaccggttctcacaagaacttaccatctcaagaacagcaccacagggatagtgctaaaccattcatgaaggaccaccatccagtcacctcccacaaggccccaccttcaatattgggaattacaattcgacatgagatttgggtggagattcaaatccaaaccatgtccttttgcttttttctgttttgtttgtggagtagatttttctccatccctttactttgagcctaagggtgccattgcatgtgagatgggtctcttgaagacagcataccattggatcttgcttttttatccaagtcaccactgtgccttttaattggggcatttagcctgcttacattcaaggactcagtgacctttgaggatgtggctgtgaacttcacccaggaggagtgggctttgctgggtccttcccagaagaatctctacagagatgtgatgtgggaaaccttcaggaacctgatgtctgtagaagtcatatggtagagagagtctgaaggtaaggaagatggtcaatgtgaagagatcttcagccttgttccaaatggtatagtgaagacgacttttactggagtcaaatcatgtgaaagcagtgtgtgtgaagaaggcaatatggatcattcatctcttaattgctgcatcagagctgacactggacacaaatcagatgagtgtcagcaacatagaagccacatacgcagtgtgtgaaaaccttcagctattgccactcctttcaaacacatgaaaggcctcacactggaaagaaactccatgtaagaaatgtggaaaaaccttcatttctgttcaaaccttttgaagatacatggtaatgcacagtgaagatgaaccttataaatgtaagttttgtgggaaggcctttgataatctacatttatatcttacacatgaaagaactcacactggagagaaaccctatgaatgtaataaatgtgggaaagccttcagttgttccagttccattcgaaaacatgcaagaattcacactggagagaaaccctatatatgtaaacaatgtggcaaagcctttagatattccagttctattcgaaatcatgaaaacactcacactggtgaaaaaccctgtgaatgtaagcaatgtgggaaagcctttagttattccagttactttcgaatacatgaaagaattcacactggagagcaggtgtataaatgtaaggaatgtgggaaaacattcacttatcccagtgcctttcataaacataaaagtacccacacttcacagaaactttatgaatgtaaggaatgtgggaaagcatttgattgttttagttcctttcatagtcatgaaggggttcacactggagagaaaccctatgaatgcagaacgtggaaaagccttcagtagttctaagtacttaaaaatacatggaagaactcacactggagagaagtcctatgcagtaaagaatgagggaaagtattttattgtctcagtccccttcaaagacatgaaaggactcacatcagagaaaagttgtatgaatgtaaaaaatgtgataaagccttccattcgtccagtactgttagaaaccatgaaagaagtcacatttaagaaaaacacagtgatgttaggaatatggggaacctttcctttctcttccagtctttggaaggcacagggtatgacacactggtgaccttataactgtaaggagtgtggataagtatttattagtccttgtgtgttttagatacatgaaagaatttactcaaaaggaaactctatgaatgtaaagaatgtggtaaaacctgtgtagtttcagtttctcttgaataaagtcatttcctggtattctcaggggattggttccagcaccccttgagaatatataattttgctcaagtgctttacagaaaagtgtatttgcctataactaggcaatcctgtatactttaaatcatctctagattacttataatacctaatgcattgtaaatgctatgaagacaactgttttattgtatttagggaagtatgacaagaaaaaacatctgtacatattcagtacagacacaaccaccatacggctacctacctagtacacatcatctacaatataacattttctttttaaaaaacagttatggattggtttcattaaatgacctgcaagcgtgtgtt

SEQ ID NO: 320372 - DNA, 2934 bp, Artificial Sequence
  derived and/or modified sequence
attacatatacacagatgttatggatcttataccactttcttttctcagagttagagaatacattagtgaacatttctgtgttgaaaactattttattgaataatttcagtcattcatataagtcagaaccagctctctctactctctccattttaccttgagtcacattaaaagttctgcccatgaccaattggtaaatatatgtgtttgtgtgtgttttccagggagcattgacatttagggatgtggccatagaattctctctggaggagtggcaatgcctggattctacacagcagaatttatataggaatgtgatgttagagaactacagaaacctggtcttcctgggtattgctgcctttaagccagacctgatcatttttctggagcaaggaaaagagccctggaatatgaagagacatgagatggtggaagaacccccagttatatgttctcatttttcccaagagttttggccagagcaaggcatagaagattctttccaaaaaatgatattgagaagatatgacaaatgtggacatgagaatttacacttaaaaattagttgtaccaatgtggatgagtgtaacgtgcacaaagaaggttataataaacttaaccagagtttaacaactacacagagcaaagtatttcaatgtggcaaatatgcaaacgtctttcataaatgttcaaattcaaacagacataagataaggcatactggagagaaaggtttgaaatgtaaagaatatgtcagatcattttgcatgctttcacacctatctcaacatgaaagaatttatactagagagaattcctacaaatgtgaagaaaatggcaaagcttttaactggtcctcaacccttacttattataagagtattcatactggagagaaaccctacaaatgtgaagaatgtggcaaagcctttagtaagttctcaatccttactaaacataaggtaattcatactggagagaaaccctacaaatgtgaagaatgtggcaaagcttttaatcgatcctcaatccttactaaacataagataattcatactggagagaaaccctacaaatgtgaagaatgtggcaaaggatttagtagcgtctcaacccttaatacacataaggcaattcatgctgaagagaagccctacaaatgtgaagaatgtggcaaagcttccaactcgtcctcaaagctcatggaacataagagaattcatactggagagaaaccctacaagtgtgaagaatgtggcaaagccttcagctggtcctcaagccttactgaacacaagagaattcatgctggagagaaaccctacaaatgtgaagaatgcgggaaagcttttaatcgatcctcaatccttactaaacataagattattcatactggagagaaaccctacaaatgtgaaggatgtggcaaagcctttagtaaggtctcaacccttaatacacataaggcaattcatgctgaagagaagccctacaaatgtgaagaatgtggcaaagcttccaactcatcctcaaagctcatggaacataagagaattcatactggagagaaaccctacaagtgtgaagaatgtggcaaagccttcagctggtcctcaagccttactgaacacaagagaattcatgctggagagaaaccctacaaatgtgaagaatgtggcaaagccttcacctggtcctcaagctttactaaacacaagagaattcatgctgcagagaaaccttacaaatgtgaagaatgtggcaaaggctttagtacgttctcaatccttactaaacataagataattcatactggagagaaacgctacaaatgtgaagaatgtggcaaagccttcagctggtcctcgatccttactgaacataagataattcatactggagagaaaccctacaaatgtgaagaatgtggcaaagccttcagcagatcctcaagccttactagacacaagagaattcatactggagagaaaccctacaaatgtgaagaatgtggcaaagcttttaagtcatcctcaactgttagttatcataagaaaattcatactggagagaatccctaaaaatgtgaagaatgtggtaaatccttcagctgattctcagtctagtaaacataagaaaattcatactggagagaaaatctacaaaggtgaagaatgtggcaaagcttttaaacagtcctcaatctttattacacataagaaaattcatgctggagagaaacactacaaacgtgaagaatgtgacaaaggcttcaaccggtcctcaaaccttgtggaacataagagaattcatactggagagaaaccctacaaatgcgaagaatgtgataaagacttcaactgttcctcacaccttactactcataaaagaattcatactggaggaaaagccctacaaatgtgaaaaacgtggcaaagcttttcattagttctcaacccttactgaacataagggaatttatacaggagggaaaccctacaaatgtgaagaatgtggcaagccttttagctgttcctcaatccttactaaacattcatgtaattcatactggagggaattcctataattgtgtggaatgtggcaaagcctttaaccagtccttaaggcttactacatataagacaactcatactggagagaaaccatgcatgtgtgaagaatgtgggaaagcctctaacagatcctcaattcttaagaaacataggctaattcatacatgagagactctacaaacctgaaagatgtgacaatgcttttggcaacacctcagacttttctgaatataaaagaaatcatatgaatgagaaatcctagaaatgtgaagaatgtgacaaagcctttaaatggctgtcacacttgattgtaggtaagataatatactggagaaaactactagaataaacaatgtg

SEQ ID NO: 320373 - protein, 588 aa, Artificial Sequence
  derived and/or modified sequence
MLENYRNLVFLGIAAFKPDLIIFLEQGKEPWNMKRHEMVEEPPVICSHFSQEFWPEQGIEDSFQKMILRRYDKCGHENLHLKISCTNVDECNVHKEGYNKLNQSLTTTQSKVFQCGKYANVFHKCSNSNRHKIRHTGEKGLKCKEYVRSFCMLSHLSQHERIYTRENSYKCEENGKAFNWSSTLTYYKSIHTGEKPYKCEECGKAFSKFSILTKHKVIHTGEKPYKCEECGKAFNRSSILTKHKIIHTGEKPYKCEECGKGFSSVSTLNTHKAIHAEEKPYKCEECGKASNSSSKLMEHKRIHTGEKPYKCEECGKAFSWSSSLTEHKRIHAGEKPYKCEECGKAFNRSSILTKHKIIHTGEKPYKCEGCGKAFSKVSTLNTHKAIHAEEKPYKCEECGKASNSSSKLMEHKRIHTGEKPYKCEECGKAFSWSSSLTEHKRIHAGEKPYKCEECGKAFTWSSSFTKHKRIHAAEKPYKCEECGKGFSTFSILTKHKIIHTGEKRYKCEECGKAFSWSSILTEHKIIHTGEKPYKCEECGKAFSRSSSLTRHKRIHTGEKPYKCEECGKAFKSSSTVSYHKKIHTGENP

SEQ ID NO: 320374 - DNA, 1767 bp, Artificial Sequence
  derived and/or modified sequence
atgctggagaactacagaaacctggtgttcctgggcatcgccgccttcaagcccgacctgatcatcttcctggagcagggcaaggagccctggaacatgaagagacacgagatggtggaggagccccccgtgatctgcagccacttcagccaggagttctggcccgagcagggcatcgaggacagcttccagaagatgatcctgagaagatacgacaagtgcggccacgagaacctgcacctgaagatcagctgcaccaacgtggacgagtgcaacgtgcacaaggagggctacaacaagctgaaccagagcctgaccaccacccagagcaaggtgttccagtgcggcaagtacgccaacgtgttccacaagtgcagcaacagcaacagacacaagatcagacacaccggcgagaagggcctgaagtgcaaggagtacgtgagaagcttctgcatgctgagccacctgagccagcacgagagaatctacaccagagagaacagctacaagtgcgaggagaacggcaaggccttcaactggagcagcaccctgacctactacaagagcatccacaccggcgagaagccctacaagtgcgaggagtgcggcaaggccttcagcaagttcagcatcctgaccaagcacaaggtgatccacaccggcgagaagccctacaagtgcgaggagtgcggcaaggccttcaacagaagcagcatcctgaccaagcacaagatcatccacaccggcgagaagccctacaagtgcgaggagtgcggcaagggcttcagcagcgtgagcaccctgaacacccacaaggccatccacgccgaggagaagccctacaagtgcgaggagtgcggcaaggccagcaacagcagcagcaagctgatggagcacaagagaatccacaccggcgagaagccctacaagtgcgaggagtgcggcaaggccttcagctggagcagcagcctgaccgagcacaagagaatccacgccggcgagaagccctacaagtgcgaggagtgcggcaaggccttcaacagaagcagcatcctgaccaagcacaagatcatccacaccggcgagaagccctacaagtgcgagggctgcggcaaggccttcagcaaggtgagcaccctgaacacccacaaggccatccacgccgaggagaagccctacaagtgcgaggagtgcggcaaggccagcaacagcagcagcaagctgatggagcacaagagaatccacaccggcgagaagccctacaagtgcgaggagtgcggcaaggccttcagctggagcagcagcctgaccgagcacaagagaatccacgccggcgagaagccctacaagtgcgaggagtgcggcaaggccttcacctggagcagcagcttcaccaagcacaagagaatccacgccgccgagaagccctacaagtgcgaggagtgcggcaagggcttcagcaccttcagcatcctgaccaagcacaagatcatccacaccggcgagaagagatacaagtgcgaggagtgcggcaaggccttcagctggagcagcatcctgaccgagcacaagatcatccacaccggcgagaagccctacaagtgcgaggagtgcggcaaggccttcagcagaagcagcagcctgaccagacacaagagaatccacaccggcgagaagccctacaagtgcgaggagtgcggcaaggccttcaagagcagcagcaccgtgagctaccacaagaagatccacaccggcgagaacccctag

SEQ ID NO: 320375 - DNA, 1767 bp, Artificial Sequence
  derived and/or modified sequence
atgctggagaattatcgcaatttagtgtttctgggaattgccgccttcaaaccagacctgattatctttttggagcagggaaaggagccttggaatatgaagaggcacgagatggtggaggagccacctgtaatctgcagccatttttctcaggaattttggcctgagcaagggattgaggattccttccagaaaatgatcctcagacgttatgacaaatgcggacatgagaacctgcacctcaaaattagctgcactaacgtggacgagtgcaacgtgcacaaggagggctataataaactcaaccagagtctgactaccacccagagcaaagtcttccaatgtggaaaatacgccaacgtattccacaaatgtagcaattctaacaggcataagatcagacacacaggtgagaagggcttgaaatgtaaagagtacgtgcgttcattctgcatgcttagtcacctgtcccaacatgagcgcatctataccagagagaactcctacaagtgtgaagagaatggcaaggctttcaattggtcttctaccctgacctactacaaatcaatccacacgggcgagaaaccttataaatgcgaggagtgtgggaaagccttctcaaagttttcaattctcactaaacataaagttattcacactggagagaaaccctataaatgcgaggaatgtggtaaggccttcaacaggtcctctatcctgacaaagcacaaaatcattcacaccggggagaaaccatacaagtgtgaggaatgcgggaaagggttcagctccgttagcaccctcaacactcacaaggcaattcatgccgaagagaagccttacaaatgcgaggagtgcggaaaagcaagcaactctagttccaaactgatggaacataagcggattcatacgggagagaaaccctataagtgtgaggagtgtggtaaggcattctcttggtcttcatctcttaccgagcataagcgaatccacgccggggagaaaccctacaaatgcgaggagtgtgggaaagcttttaaccgatcttcgattctgaccaagcacaaaattatccacacaggtgagaaaccatacaagtgcgagggctgcgggaaagcttttagtaaggtgtcaaccctgaatacccataaagccattcacgccgaggagaaaccatataagtgtgaagagtgtggaaaggcgagcaacagctcaagcaaattgatggagcacaagcgaattcacacaggcgagaaaccttacaagtgcgaggagtgcgggaaagccttcagctggagcagctcattgactgaacacaagcgaatacatgccggcgaaaagccctataaatgtgaggagtgtgggaaggcattcacttggtctagctcatttacaaagcacaaacggatccacgctgctgaaaaaccttacaaatgtgaggagtgcggcaagggcttctctacctttagcattctgaccaagcataaaatcattcatacaggcgagaagaggtataaatgcgaggaatgcggaaaggccttctcttggtcctccattcttaccgaacataagattatccataccggtgaaaagccttacaagtgcgaagagtgcggtaaggcatttagtaggtcgtctagcctcacccgccacaagcgcatccacacaggagagaagccatataaatgcgaagaatgcgggaaggctttcaagtcttccagcaccgtgtcctaccataagaagattcacacgggagagaacccgtag

SEQ ID NO: 320376 - DNA, 1767 bp, Artificial Sequence
  derived and/or modified sequence
atgctggagaactacagaaacctggtgttcctgggcattgctgccttcaagccagacctgatcatcttcctggagcagggcaaggagccctggaacatgaagagacatgagatggtggaggagccccctgtgatctgcagccacttcagccaggagttctggccagagcagggcatcgaggacagcttccagaagatgatcctgcggcgctatgacaagtgtggccacgagaacctgcacctgaagatcagctgcaccaacgtggatgagtgcaatgtgcacaaggagggctacaacaagctgaaccagagcctgaccaccacccagagcaaggtgttccagtgtgggaagtatgccaacgtgttccacaagtgcagcaacagcaacagacacaagatccgccacactggagagaagggcctgaagtgcaaggagtatgtgcgctccttctgcatgctgagccacctgagccagcacgagcgcatctacacccgggagaacagctacaagtgtgaagaaaatggcaaggccttcaactggagcagcaccctgacctactacaagagcatccacactggagagaagccctacaagtgtgaagaatgtgggaaggccttcagcaagttcagcatcctgaccaagcacaaggtgatccacactggagagaagccctacaagtgtgaagaatgtgggaaggccttcaacagaagcagcatcctgaccaagcacaagatcatccacactggagagaagccctacaagtgtgaagaatgtgggaagggcttcagctctgtgtccaccctgaacacccacaaggccatccacgccgaggagaagccctacaagtgtgaagaatgtgggaaggccagcaacagcagcagcaagctgatggagcacaagaggatccacactggagagaagccctacaagtgtgaagaatgtgggaaggccttctcctggagcagcagcctgacagagcacaagagaattcatgctggggagaagccctacaagtgtgaagaatgtgggaaggccttcaacagaagcagcatcctgaccaagcacaagatcatccacactggagagaagccctacaagtgtgagggctgtgggaaggccttcagcaaggtgtccaccctgaacacccacaaggccatccacgccgaggagaagccctacaagtgtgaagaatgtgggaaggccagcaacagcagcagcaagctgatggagcacaagaggatccacactggagagaagccctacaagtgtgaagaatgtgggaaggccttctcctggagcagcagcctgacagagcacaagagaattcatgctggggagaagccctacaagtgtgaagaatgtgggaaggccttcacctggagcagcagcttcaccaagcacaagagaattcatgctgctgagaagccctacaagtgtgaagaatgtgggaagggcttcagcaccttcagcatcctgaccaagcacaagatcatccacactggagagaagcgctacaagtgtgaagaatgtgggaaggccttctcctggagcagcatcctgacagagcacaagatcatccacactggagagaagccctacaagtgtgaagaatgtgggaaggccttcagccgcagcagcagcctgaccaggcacaagaggatccacactggagagaagccctacaagtgtgaagaatgtgggaaggccttcaagagcagcagcacagtgtcctaccacaagaagatccacactggagagaacccctag

SEQ ID NO: 320377 - DNA, 1767 bp, Artificial Sequence
  derived and/or modified sequence
atgctggagaactaccggaacctggtgttcctgggcatcgccgccttcaaacccgacctcataattttcttggagcagggaaaggagccatggaatatgaaaagacatgagatggtggaggaaccaccagtcatctgtagccattttagccaagagttttggcccgaacaggggatagaagacagctttcaaaagatgatcctcagaaggtatgacaagtgtggccacgaaaacttacacctaaagattagctgcaccaacgtggatgagtgcaacgtacataaggaagggtacaacaagctcaaccagtccctgacgactacacagtccaaggtgttccagtgtggaaagtatgcgaatgtgttccacaaatgttccaacagtaatcggcacaagattagacatactggcgagaagggactgaaatgtaaagagtatgtccgcagtttctgcatgttatcccacctgtctcagcatgaacggatctatacacgggagaattcctataaatgcgaagagaacggcaaggcgtttaattggagctctaccctgacctattacaagtccatccacacaggcgaaaaaccctacaaatgcgaagaatgtggcaaagccttttctaaattctctattctgaccaaacacaaagtgattcatacgggagaaaagccgtataagtgcgaggagtgtggcaaggccttcaacaggagctccatcctgacaaaacacaaaatcatccataccggcgagaagccctacaagtgcgaggagtgcggaaagggctttagcagtgtttcgacacttaatacacacaaagcaattcatgccgaggagaaaccctacaaatgcgaagaatgcggaaaggcctcaaattcctccagtaaactgatggagcacaaaagaatacataccggcgagaagccgtacaaatgcgaagaatgcggaaaggcattttcatggagctcttctctgacagagcacaaacggatccatgctggggaaaagccctataagtgcgaggagtgcgggaaggcgtttaataggtcctctatactgaccaagcacaaaatcattcatactggggagaagccatacaagtgcgaaggctgcgggaaggctttttctaaagtgtctacactgaatacccacaaagcaatacacgcggaagagaaaccctataagtgcgaagagtgcggcaaggcttcaaactcgtcctctaaacttatggaacacaagcggattcatactggcgagaagccatacaagtgtgaagagtgtgggaaggcattcagctggtcatcctcacttacagagcataaacgcatccatgcaggagagaagccttataaatgcgaggagtgcgggaaagcctttacatggtccagctcgttcaccaaacacaagcgaattcatgccgcagaaaagccttacaaatgcgaggaatgcggcaagggcttttctacctttagtatcctgacaaaacataagatcatccacacaggggagaagcgctacaaatgcgaggaatgtggcaaagccttctcctggtctagtattctcacggagcacaagatcatacacaccggggaaaaaccctacaagtgcgaagagtgcggaaaagcgttctcaaggtcaagttccctgacaaggcacaagaggatacacacgggggagaagccatacaagtgtgaagagtgcgggaaagccttcaagtcaagcagtacggttagctatcacaaaaaaattcatacaggagaaaacccttag

SEQ ID NO: 320378 - DNA, 1767 bp, Artificial Sequence
  derived and/or modified sequence
atgctcgaaaattaccgtaaccttgtttttttaggaatagctgccttcaagccggatctgatcatctttcttgaacaggggaaggagccgtggaacatgaagcgacatgagatggtggaggaacctcctgtgatctgtagtcattttagccaagagttttggccagagcaaggaatcgaggacagcttccagaaaatgatccttcgcaggtatgacaaatgtggccacgagaatctgcacctcaagatctcctgtacaaacgttgacgagtgcaatgtacacaaggaggggtacaacaaactcaatcagagcctgacaaccacccagtcaaaggtcttccagtgtgggaaatacgctaacgtgtttcacaaatgctcaaactcaaaccgccataagatccggcacacaggggagaaagggctgaaatgtaaagagtatgtgagatctttctgcatgctttctcacctcagtcagcacgaacgaatctacacccgggagaatagttataaatgtgaggaaaatgggaaagcatttaactggtcatcaactcttacttactacaagtccatccacacaggagaaaagccgtataagtgcgaggaatgtggcaaggctttcagcaaattctccatcttgacaaagcataaggtcatccacacaggggaaaaaccctacaaatgcgaagagtgcggcaaagcctttaaccggtcctctatcttaacaaaacataagatcatacacaccggcgaaaagccatataagtgcgaggagtgcggtaaggggttttcttcagtgtccaccttaaacacccacaaggcaatccacgccgaggagaagccctacaagtgtgaagagtgtgggaaagccagtaatagctcttccaagctcatggagcataagcggattcacactggggagaaaccctacaaatgcgaagagtgtggtaaggcattcagctggagttccagcctaaccgagcataagagaattcacgctggcgagaaaccttacaaatgcgaggagtgtggcaaggccttcaacagaagctccatcctaaccaaacacaagatcatccacacaggcgaaaagccctataaatgtgagggatgcggcaaagcattctccaaggtcagcacactgaatacccataaagccattcatgccgaggagaaaccctataagtgcgaggagtgtggaaaagcatctaatagttcgtccaagcttatggagcacaagcggatccatacaggagaaaagccatacaagtgcgaagaatgcggtaaagcttttagctggagctcaagcctgaccgagcataagagaatccatgctggagaaaagccttacaaatgcgaggagtgtgggaaagccttcacgtggtcaagctcttttacgaaacacaaacgtatacacgctgcagaaaagccttacaaatgcgaagaatgcggcaagggcttcagcacgttttctatactgacaaagcataaaattattcacacaggtgaaaagcgctacaaatgtgaggaatgtggtaaagcattctcctggagttccatcctcaccgagcataaaattattcatacgggcgaaaaaccatacaagtgtgaggagtgtggtaaagcgttctcaaggtcctctagcttaactagacacaagaggattcacactggggagaaaccctataaatgcgaagaatgtgggaaggcgtttaagagtagctcaaccgtgtcctatcacaaaaagatccacaccggtgaaaacccatag

SEQ ID NO: 320379 - protein, 369 aa, Artificial Sequence
  derived and/or modified sequence
MEGSLEREAPAGALAAVLKHSSTLPPESTQVRGYDFNRGVNYRALLEAFGTTGFQATNFGRAVQQVNAMIEKKLEPLSQDEDQHADLTQSRRPLTSCTIFLGYTSNLISSGIRETIRYLVQHNMVDVLVTTAGGVEEDLIKCLAPTYLGEFSLRGKELRENGINRIGNLLVPNENYCKFEDWLMPILDQMVMEQNTEGVKWTPSKMIARLGKEINNPESVYYWAQKNHIPVFSPALTDGSLGDMIFFHSYKNPGLVLDIVEDLRLINTQAIFAKCTGMIILGGGVVKHHIANANLMRNGADYAVYINTAQEFDGSDSGARPDEAVSWGKIRVDAQPVKVYADASLVFPLLVAETFAQKMDAFMHEKNED

SEQ ID NO: 320380 - DNA, 1110 bp, Artificial Sequence
  derived and/or modified sequence
atggaagggtccctggagagggaagcacctgctggagctttggccgctgtactaaagcactcttcaactctgcccccagagtcaacacaggtgcgtggttatgattttaatcgcggagtcaactaccgggcacttttggaagcctttggcaccacggggtttcaagccacgaatttcggtcgggcggtacagcaagtcaacgccatgattgaaaaaaagctagagcccctcagtcaggacgaagatcaacatgcagatctgactcagagcaggcgccctttgacgtcctgtaccatatttctggggtacacatccaacctgatctcatctgggatccgggagacgatccggtacctagtgcagcacaacatggtcgacgtgctcgtgactaccgccggaggggtagaggaagacctcatcaagtgtttggccccgacatatcttggggagtttagcctgcgaggcaaggagctgcgggaaaatggtatcaatcgtattggaaacctgctggtgcctaatgagaattactgtaaattcgaggactggctaatgcccatcctggaccaaatggtcatggagcaaaacacagaaggtgtcaaatggactcctagcaaaatgattgctcgacttgggaaggagattaataatcctgaaagtgtctactactgggctcagaagaatcacatccccgtgttcagccccgctttgactgatggctctttaggtgatatgatcttttttcactcatataaaaatcccggtctcgttctggacatcgttgaagacctccggctgataaatacacaggcaatttttgccaaatgcacaggtatgatcatcctggggggcggggttgtgaaacaccacatagccaatgccaacttgatgagaaatggggcagactatgctgtctacataaataccgcccaggaatttgatggatctgattcaggcgcccggccagacgaagccgtctcttggggcaaaatacgcgtggatgcccagccagttaaggtttatgccgatgcctcactagtctttcccctgctggtggccgaaacattcgctcagaaaatggatgcatttatgcacgagaagaacgaggattag

SEQ ID NO: 320381 - DNA, 1110 bp, Artificial Sequence
  derived and/or modified sequence
atggagggcagcctggagcgggaggccccagctggggccctggccgctgtgctgaagcacagcagcaccctgcccccagagagcacccaggtgcggggctatgacttcaacagaggagtgaactaccgggccctgctggaggccttcggcaccaccggcttccaggccaccaactttggccgggctgtgcagcaggtgaatgccatgattgagaagaagctggagcccctgagccaggatgaggaccagcacgccgacctgacccagagcagaagacccctgaccagctgcaccatcttcctgggctacaccagcaacctgatcagcagcggcatccgggagaccatccgctacctggtgcagcacaacatggtggatgtgctggtgaccacagctgggggcgtggaggaggacctgatcaagtgcctggcccccacctacctgggggagttcagcctgcggggcaaggagctgcgggagaatggcatcaaccgcatcggcaacctgctggtgcccaatgaaaactactgcaagtttgaggactggctgatgcccatcctggaccagatggtgatggagcagaacacagagggcgtgaagtggacccccagcaagatgattgcccggctgggcaaggagatcaacaaccctgagagcgtgtactactgggcccagaagaaccacatccctgtgttcagccctgccctgacagatggcagcctgggggacatgatcttcttccacagctacaagaaccctggcctggtgctggacatcgtggaggacctgcggctcatcaacacccaggccatctttgccaagtgcaccggcatgatcatcctgggcggcggcgtggtgaagcaccacatcgccaatgccaacctgatgagaaatggagctgactatgctgtgtacatcaacacagcccaggagtttgatggcagtgacagcggggcccggccagatgaggccgtgtcctggggcaagatccgggtggatgcccagcctgtgaaggtgtatgcagatgccagcctggtgttccccctgctggtggccgagacctttgcccagaagatggatgccttcatgcatgagaagaatgaagattag

SEQ ID NO: 320382 - DNA, 1110 bp, Artificial Sequence
  derived and/or modified sequence
atggagggcagcctggagcgggaggcccccgccggcgccctggccgccgtgctcaaacacagctccacactgcctccagaaagtacccaagttcggggctatgattttaatagaggggtcaactacagggctctactcgaagcatttggcacaacaggatttcaagccacaaacttcggaagagctgttcagcaggtgaacgcgatgatagagaaaaagctggagccgctgtctcaggacgaagatcaacacgctgacctgacgcagtcaagaagacccttaacctcttgtaccatattccttggatatacgagcaaccttatttccagcggcattagggaaaccatcaggtacctagttcagcacaatatggtggatgtgctggtaaccaccgcagggggagtggaagaggatcttatcaaatgcttggcacccacttatctgggcgagttctcacttagaggcaaagagctgcgggagaatgggatcaaccgaatcggcaatctgctggttcctaacgaaaattattgcaaatttgaagattggcttatgcctatccttgatcagatggttatggagcagaacacagagggggtcaaatggacacctagtaaaatgatcgcacgcctgggaaaggagattaacaacccggaaagcgtatactattgggcacaaaagaaccatatccccgtgttcagtccagcactcacagatggatctctgggggatatgatttttttccatagctacaaaaaccccggcctggtgctggatattgtggaagacttgaggctgataaacactcaggctatcttcgcgaagtgtaccggaatgataatcttaggtggaggagtggtaaaacaccacatcgccaacgctaatctgatgcgaaacggggccgattatgcggtttacattaataccgcacaggaattcgatggaagcgactccggcgcccgacccgacgaggccgtgagctggggcaagattagggtggatgcccagcctgtcaaggtatacgcggatgcctccctggtatttccactgctggtagccgaaaccttcgcccagaagatggacgccttcatgcacgaaaaaaacgaagattag

SEQ ID NO: 320383 - DNA, 1110 bp, Artificial Sequence
  derived and/or modified sequence
atggaaggctcattggagagagaagcccctgccggagctttagcggcagtactcaaacattcttccactttaccaccagagtcgacacaggtgaggggttatgactttaacagaggcgtcaattacagggcgttgctcgaggccttcggcacaaccggtttccaagctacaaattttgggcgtgcagtgcagcaggtgaatgcaatgatcgagaagaagctcgagcctctgtctcaggacgaggaccaacacgcggacctcacacaaagtcgaagaccactcacatcttgtacaatcttcctgggttacacctcaaacttgatcagttctgggataagagaaacaatccgctaccttgtgcagcacaacatggtggatgttctcgtaacaacagccggaggcgtagaggaagatctgattaaatgtcttgcccctacttacctgggcgagttctctttacggggtaaggaactgcgcgaaaacggcattaacaggattgggaacctgttggtccccaatgagaactattgcaaatttgaggattggctcatgcctatcttggatcagatggtgatggaacagaatacagaaggcgtgaagtggacccctagcaagatgattgcaaggcttggcaaggaaatcaacaaccccgagtcagtatactactgggcacagaagaatcacatcccagtcttttctccggctctgactgacggttcgctgggcgatatgattttcttccattcctacaagaacccgggtctcgtactggacatcgtcgaagacctcaggctgatcaacacccaggccatcttcgctaaatgcactggcatgatcatactgggcggaggagtggtcaaacaccacattgcaaacgcgaatttaatgaggaacggtgctgattatgctgtgtacataaacacagcccaagagttcgacgggtcagacagtggcgctcgcccagacgaggctgttagctgggggaagatacgcgtggatgcacagccggtcaaagtttacgcagacgcaagcttggtcttccctcttctcgtcgccgagaccttcgcccagaagatggatgctttcatgcatgaaaagaatgaggactag

SEQ ID NO: 320384 - DNA, 1325 bp, Artificial Sequence
  derived and/or modified sequence
ctcttgcggagacgcgcgcgtcggggtttaacgcgtttctgggccgccgtaagcccggcctaggggcagctttgactcgagagccggctataggcgcatggaaggttccctggaacgggaggcgccagcgggggcgctggccgccgtgctaaagcacagctcgacgttgccgcccgaaagcacccaggtccggggctacgacttcaaccgcggtgtgaattaccgcgcactgctggaggccttcggcaccaccggcttccaagcaaccaacttcgggcgcgctgtacagcaagtcaatgccatgatcgagaagaagctggaaccactgtcacaggatgaagaccagcacgcggacctgacccagagccgccgcccacttaccagctgcaccattttcctgggatatacatccaacctcatcagttcaggcatccgtgagaccattcgctaccttgtgcagcacaacatggtggacgtattggtgaccacagctggcggcgtggaggaagacctcatcaagtgcctggcgcccacatacttgggcgagtttagcctcagggggaaggagctccgggagaacgggatcaataggatcggaaacctgctggtgcccaatgagaattactgcaagtttgaggactggctgatgcccattctggaccagatggtgatggagcagaacacagagggtgtaaagtggacgccttctaagatgatcgcccggctgggcaaggagatcaacaacccagagtccgtgtattactgggcccagaagaaccacatccctgtgtttagtcccgcacttacagacggctcgctgggcgacatgatcttcttccattcctacaagaacccgggcctggtcctggacatcgttgaggacctgaggctcatcaacacacaggccatctttgccaagtgcactgggatgatcattctgggcgggggcgtggtcaagcaccacattgccaatgccaacctcatgcggaacggggccgactacgctgtttacatcaacacagcccaggagtttgatggctctgactcaggtgcccgaccagacgaggctgtctcctggggcaagatccgggtggatgcacagcccgtcaaggtctatgctgacgcctccctggtcttccccctgcttgtggctgaaacctttgcccagaagatggatgccttcatgcatgagaagaacgaggactgagcggctgcggtcccaggaaggtcttaccccctcttctatttattaatttgcagacccagcccctcccctactttttggtcagctacgtctctagaataagatggtatctgaagtcctt

SEQ ID NO: 320385 - DNA, 1110 bp, Artificial Sequence
  derived and/or modified sequence
atggagggcagcctggagagagaggcccccgccggcgccctggccgccgtgctgaagcacagcagcaccctgccccccgagagcacccaggtgagaggctacgacttcaacagaggcgtgaactacagagccctgctggaggccttcggcaccaccggcttccaggccaccaacttcggcagagccgtgcagcaggtgaacgccatgatcgagaagaagctggagcccctgagccaggacgaggaccagcacgccgacctgacccagagcagaagacccctgaccagctgcaccatcttcctgggctacaccagcaacctgatcagcagcggcatcagagagaccatcagatacctggtgcagcacaacatggtggacgtgctggtgaccaccgccggcggcgtggaggaggacctgatcaagtgcctggcccccacctacctgggcgagttcagcctgagaggcaaggagctgagagagaacggcatcaacagaatcggcaacctgctggtgcccaacgagaactactgcaagttcgaggactggctgatgcccatcctggaccagatggtgatggagcagaacaccgagggcgtgaagtggacccccagcaagatgatcgccagactgggcaaggagatcaacaaccccgagagcgtgtactactgggcccagaagaaccacatccccgtgttcagccccgccctgaccgacggcagcctgggcgacatgatcttcttccacagctacaagaaccccggcctggtgctggacatcgtggaggacctgagactgatcaacacccaggccatcttcgccaagtgcaccggcatgatcatcctgggcggcggcgtggtgaagcaccacatcgccaacgccaacctgatgagaaacggcgccgactacgccgtgtacatcaacaccgcccaggagttcgacggcagcgacagcggcgccagacccgacgaggccgtgagctggggcaagatcagagtggacgcccagcccgtgaaggtgtacgccgacgccagcctggtgttccccctgctggtggccgagaccttcgcccagaagatggacgccttcatgcacgagaagaacgaggactag

SEQ ID NO: 320386 - protein, 353 aa, Artificial Sequence
  derived and/or modified sequence
MGSGGRSAQVSTGQRAWLLPCRFLKNTMSNGYEDHMAEDCRGDIGRTNLIVNYLPQNMTQDELRSLFSSIGEVESAKLIRDKVAGHSLGYGFVNYVTAKDAERAINTLNGLRLQSKTIKVSYARPSSEVIKDANLYISGLPRTMTQKDVEDMFSRFGRIINSRVLVDQTTGLSRGVAFIRFDKRSEAEEAITSFNGHKPPGSSEPITVKFAANPNQNKNVALLSQLYHSPARRFGGPVHHQAQRFRFSPMGVDHMSGLSGVNVPGNASSGWCIFIYNLGQDADEGILWQMFGPFGAVTNVKVIRDFNTNKCKGFGFVTMTNYEEAAMAIASLNGYRLGDKILQVSFKTNKSHK

SEQ ID NO: 320387 - DNA, 1062 bp, Artificial Sequence
  derived and/or modified sequence
atgggaagtgggggccgctcagcccaggtgtcgacagggcagcgcgcctggctgttaccctgcaggtttttaaagaatactatgtcaaacgggtacgaggatcatatggcagaggattgtcggggggatatagggcggactaatctgattgtaaactacttgcctcaaaatatgactcaggacgaattgcggtcactgttttcttccataggggaagtcgagtctgctaagctgattagagacaaggtcgccggccactctctaggatatggctttgtcaattatgtcactgcaaaagatgccgagcgcgcaatcaatactctgaatggactcagactccagtcaaagactatcaaagtgagttacgcccgaccgagcagtgaagttatcaaagacgcaaacttgtacatttcaggactccccagaacgatgacacaaaaagacgtggaagacatgtttagccgcttcggcagaatcatcaacagcagggtgctcgtagatcaaacaaccggcctaagcagaggcgtggcctttatacggttcgacaagcgatccgaggctgaagaggcaattacatctttcaacgggcataaaccacctggtagctctgagcctatcacagtaaagttcgccgcaaaccctaaccagaataagaatgtggcattgttgtcacagctttaccactcacctgcgaggaggtttggcggccccgtgcaccatcaagctcagagattccgcttctctcctatgggcgtggatcacatgtctggtctttcgggcgtgaatgtgccgggcaatgcctcctctggatggtgcatcttcatctacaatctcggccaagacgcggacgagggaatattgtggcaaatgttcggaccctttggcgccgtcaccaacgttaaggtgattcgagactttaacactaacaagtgtaaaggatttggattcgtgaccatgacaaactatgaggaggccgccatggccatcgcctctttgaacgggtacaggctcggggacaagatccttcaagtctccttcaaaacgaacaagtctcacaaatag

SEQ ID NO: 320388 - DNA, 1062 bp, Artificial Sequence
  derived and/or modified sequence
atgggcagcggcggccgcagcgcccaggtgtccacaggccagagggcctggctgctgccctgccgcttcctgaagaacaccatgagcaatggctatgaggaccacatggccgaggactgccgcggggacatcggccgcaccaacctgattgtgaactacctgccccagaacatgacccaggatgagctgcggagcctcttcagcagcatcggggaggtggagagcgccaagctgatccgggacaaggtggccggccacagcctgggctacggctttgtgaactacgtgacagccaaggatgctgagcgggccatcaacaccctgaatggcctgcggctgcagagcaagaccatcaaggtgtcctatgcccggcccagcagcgaggtgatcaaggatgccaacctgtacatcagcggcctgcccaggaccatgacccagaaggatgtggaggacatgttcagccgcttcggccgcatcatcaacagccgggtgctggtggaccagaccaccggcctgagcagaggagtggccttcatccgctttgacaagaggtctgaggccgaggaggccatcaccagcttcaacggccacaagcccccaggcagcagcgagcccatcaccgtgaagtttgctgccaaccccaaccagaacaagaatgtggccctgctgagccagctgtaccacagccctgccaggagatttggaggccctgtgcaccaccaggcccagcgcttccgcttcagccccatgggcgtggaccacatgagcggcctgtctggagtgaatgtgcctggaaatgccagcagcggctggtgcatcttcatctacaacctgggccaggatgctgatgagggcatcctgtggcagatgtttggcccctttggagctgtgaccaacgtgaaggtgatccgggacttcaacaccaacaagtgcaagggcttcggctttgtgaccatgaccaactatgaggaggccgccatggccatcgccagcctgaatggctaccgcctgggggacaagatcctgcaggtgtccttcaagaccaacaagagccacaagtag

SEQ ID NO: 320389 - DNA, 1062 bp, Artificial Sequence
  derived and/or modified sequence
atgggcagcggcggccggagcgcccaggtgagcaccggccagcgggcctggctcctgccatgtagattcctcaaaaacaccatgagtaacgggtatgaagatcacatggcagaggactgcaggggagacattggtagaacaaacctgatcgtcaactatctgccacagaacatgacacaagacgaactgcgcagcctcttctctagcattggtgaggtggagtctgccaagctgattagagataaagtcgccggccactctctcggctatggatttgttaactatgtgacagcgaaagatgccgagcgagccatcaacactcttaacggcctgcggctgcagtccaagaccataaaggtatcctacgctaggcccagcagcgaggtcataaaagacgccaatctgtatatttcaggactaccaagaactatgactcagaaagacgtggaggacatgttctcacgcttcggaagaatcattaatagtagggtgcttgttgatcagaccaccgggctcagcagaggggtggcctttatacgctttgacaagagatctgaagccgaggaggctattactagttttaacggacacaaacctcctgggtccagcgagcctataacggttaagttcgcggcgaaccctaaccagaataagaacgtagcattgctatcccagttatatcacagccccgcccgtaggtttgggggacccgttcaccaccaggcccagaggttcagattcagtcccatgggcgtcgatcatatgtctgggctgtccggcgttaacgttcccggtaatgcttcatctggctggtgcatcttcatctataacttaggccaagatgctgatgagggaatcctgtggcagatgttcggccccttcggagccgtgaccaatgtcaaagtcatccgcgattttaacacaaataaatgcaaaggatttgggttcgtgaccatgacaaattatgaggaggcagctatggccatcgcatctctgaacgggtaccgactgggcgataagatcctccaagtatcttttaagactaataagagccataagtag

SEQ ID NO: 320390 - DNA, 1062 bp, Artificial Sequence
  derived and/or modified sequence
atgggttctgggggtaggagcgcccaggtgtctacaggacagcgggcatggctgctgccctgccgcttcctcaagaacacaatgagcaatggatatgaagatcatatggctgaggattgtagaggggacatcgggaggacgaatctgatcgtcaattacctgcctcagaacatgacccaggacgagctgcgatccctcttcagctcaatcggggaagtagagagtgctaagctcatacgggataaggttgcagggcactcacttggttacggctttgtaaattacgtcaccgccaaggatgcagagagggctatcaataccctgaacggcttgaggctgcagtctaaaactattaaagtgagttacgccagacccagctccgaagttatcaaggatgctaatctctatataagcgggctgccccgtacaatgacgcaaaaagacgtggaagatatgttctctcggtttggcagaatcatcaattctagagttctggttgatcagacaacgggactgtcccggggagttgcatttattagattcgataaacggagcgaagcagaggaggccattaccagttttaatggccataaacccccaggttcgtcagaacccatcaccgtcaaattcgccgctaacccaaaccagaataagaacgtcgccctcctgagtcagctgtaccatagcccagcacgcagattcggcggtccagttcatcaccaggcgcagcggttcagattctcccccatgggcgttgatcatatgtccggtctgtccggggtgaatgtgccaggaaatgccagctcgggatggtgtatcttcatttataatctcggacaagacgccgacgagggtatcttgtggcagatgttcggtcccttcggtgccgttaccaatgtgaaggtaattagggactttaacacaaataagtgcaaggggtttgggttcgtcacaatgacgaattatgaggaggctgccatggccatcgcctccctgaacggttacaggctaggagataagatactgcaagttagtttcaagacaaacaagagtcacaagtag

SEQ ID NO: 320391 - DNA, 1062 bp, Artificial Sequence
  derived and/or modified sequence
atgggcagcggcggcagaagcgcccaggtgagcaccggccagagagcctggctgctgccctgcagattcctgaagaacaccatgagcaacggctacgaggaccacatggccgaggactgcagaggcgacatcggcagaaccaacctgatcgtgaactacctgccccagaacatgacccaggacgagctgagaagcctgttcagcagcatcggcgaggtggagagcgccaagctgatcagagacaaggtggccggccacagcctgggctacggcttcgtgaactacgtgaccgccaaggacgccgagagagccatcaacaccctgaacggcctgagactgcagagcaagaccatcaaggtgagctacgccagacccagcagcgaggtgatcaaggacgccaacctgtacatcagcggcctgcccagaaccatgacccagaaggacgtggaggacatgttcagcagattcggcagaatcatcaacagcagagtgctggtggaccagaccaccggcctgagcagaggcgtggccttcatcagattcgacaagagaagcgaggccgaggaggccatcaccagcttcaacggccacaagccccccggcagcagcgagcccatcaccgtgaagttcgccgccaaccccaaccagaacaagaacgtggccctgctgagccagctgtaccacagccccgccagaagattcggcggccccgtgcaccaccaggcccagagattcagattcagccccatgggcgtggaccacatgagcggcctgagcggcgtgaacgtgcccggcaacgccagcagcggctggtgcatcttcatctacaacctgggccaggacgccgacgagggcatcctgtggcagatgttcggccccttcggcgccgtgaccaacgtgaaggtgatcagagacttcaacaccaacaagtgcaagggcttcggcttcgtgaccatgaccaactacgaggaggccgccatggccatcgccagcctgaacggctacagactgggcgacaagatcctgcaggtgagcttcaagaccaacaagagccacaagtag

SEQ ID NO: 320392 - DNA, 1473 bp, Artificial Sequence
  derived and/or modified sequence
aagcccggaggtgggaacatcgcagtgttcagagaacatcgtgtgttcaaagaaccacgtgggttctttagggacaagaaggctgagatgggtagtggtggcaggagtgctcaggtgtccactgggcagagggcttggctgttaccctgcagatttttgaaaaatacaatgtctaatggttatgaagaccacatggccgaagactgcaggggtgacatcgggagaacgaatttgatcgtcaactacctccctcagaacatgacccaggatgagttacgaagcctgttcagcagcattggtgaagttgaatctgcaaaacttattcgggataaagtagcaggacacagcttgggctatggctttgtgaactacgtgaccgcgaaggatgcagagagagcgatcaacacgctgaacggcttgaggctccagtcaaaaaccattaaggtgtcgtatgctcgcccgagctcagaggtgatcaaagacgccaacttgtacatcagcgggctcccgcggaccatgacccagaaggacgtagaagacatgttctctcggtttgggcggatcatcaactcgcgggtcctcgtggatcagactacaggtttgtccagaggggttgcgtttatccggtttgacaaacggtcggaggcagaagaggcaattaccagtttcaatggtcataaacccccaggttcctctgagcccatcacagtgaagtttgcagccaaccccaaccagaacaaaaacgtggcactcctctcgcagctgtaccactcgccagcgcgacggttcggaggccccgttcaccaccaggcgcagagattcaggttctcccccatgggcgtcgatcacatgagcgggctctctggcgtcaacgtgccaggaaacgcctcctccggctggtgcattttcatctacaacctggggcaggatgccgacgaggggatcctctggcagatgtttgggccgtttggtgccgtcaccaatgtgaaagtgatccgcgacttcaacaccaacaagtgcaaagggtttggctttgtgaccatgacaaactatgaagaagccgcgatggccatagccagcctgaacggctaccgcctgggggacaaaatcttacaggtttccttcaaaaccaacaagtcccacaaataactcgctcatgcttttttttgtacggaatagataattaagagtgaaggagttgaaacttttcttgttagtgtacaactcattttgcgccaattttcacaagtgtttgtctttgtctgaatgagaagtgagaaggtttttatactctgggatgcaaccgacatgttcaaatgtttgaaatcccacaatgttagaccaatcttaagtttcgtaagttatttcctttaagatatatattaaacagaaatctaagtagaactgcattgactaaccagtccctctggatggtggtgaacctgaagcatgctttaacctctaagactgtct

SEQ ID NO: 320393 - DNA, 6057 bp, Artificial Sequence
  derived and/or modified sequence
ggtcgtgcgcgctgaggaggagccgctgccgccgtcgccgtcgccgccaccgccgccaccgctaccgaggccgagcggagccgttagcgccgcgccgccgccgcctcccgcccgccccggagcagccccgggcccgcccgcccgcatccagatttttgaaaaatacaatgtctaatggttatgaagaccacatggccgaagactgcaggggtgacatcgggagaacgaatttgatcgtcaactacctccctcagaacatgacccaggatgagttacgaagcctgttcagcagcattggtgaagttgaatctgcaaaacttattcgggataaagtagcaggacacagcttgggctatggctttgtgaactacgtgaccgcgaaggatgcagagagagcgatcaacacgctgaacggcttgaggctccagtcaaaaaccattaaggtgtcgtatgctcgcccgagctcagaggtgatcaaagacgccaacttgtacatcagcgggctcccgcggaccatgacccagaaggacgtagaagacatgttctctcggtttgggcggatcatcaactcgcgggtcctcgtggatcagactacaggtttgtccagaggggttgcgtttatccggtttgacaaacggtcggaggcagaagaggcaattaccagtttcaatggtcataaacccccaggttcctctgagcccatcacagtgaagtttgcagccaaccccaaccagaacaaaaacgtggcactcctctcgcagctgtaccactcgccagcgcgacggttcggaggccccgttcaccaccaggcgcagagattcaggttctcccccatgggcgtcgatcacatgagcgggctctctggcgtcaacgtgccaggaaacgcctcctccggctggtgcattttcatctacaacctggggcaggatgccgacgaggggatcctctggcagatgtttgggccgtttggtgccgtcaccaatgtgaaagtgatccgcgacttcaacaccaacaagtgcaaagggtttggctttgtgaccatgacaaactatgaagaagccgcgatggccatagccagcctgaacggctaccgcctgggggacaaaatcttacaggtttccttcaaaaccaacaagtcccacaaataactcgctcatgcttttttttgtacggaatagataattaagagtgaaggagttgaaacttttcttgttagtgtacaactcattttgcgccaattttcacaagtgtttgtctttgtctgaatgagaagtgagaaggtttttatactctgggatgcaaccgacatgttcaaatgtttgaaatcccacaatgttagaccaatcttaagtttcgtaagttatttcctttaagatatatattaaacagaaatctaagtagaactgcattgactaaccagtccctctggatggtggtgaacctgaagcatgctttaacctctaagactgtctaacacgcgtttcattcaatgtctccacagactgggtagcaaaaaaatcaccttttagttttagtttttaatctaaagatgttagacagatgctgagtgtgcgttttctcaaccgcttcaacattgtaagcgatgtatgctttggttgacaggaagttccttttccaggcaggtcccgttgccacctcctgctcactcagtcccgggctctgccgagtggtcctgggaatggcggcgggcccgtccagcgtgggccaccactggggccgggggccacgggctgcatgctgggcgggccctccagagaaggacacaaacgtgtttcgtaagcccaggcaccaatgggaatggaccaaagagtttcagggaaactccagtatattccagagtcagatctaagctccaggcacgcctgaagatgtgttgctactctgacatcccgagtttctgtccacacattgcatgcacagcgccccacacattggatactgttgttcacgataatttctcccgttttccagagcatttaacatagcttggaggcgtaaaatggctctgtattttaataacacagaaacatttgagcattgtatttctcgcatcccttctcgtgagcgcttagacctttttctattttagtcggattttgttttggaattttgcttttgtatgaacactcagcagaaaagtacttacttcttgccagttatctattaaccaaaacctttgatttgtagttttaaagattaaccctcaaagttctcttcataactgccttgacattttgggttgttctgttctgttaattttcttttgcttttttgtgttttttgtttgtttttacttttgcatttaagaccattaaatttgattttgttttgctcgaattttgttttgttttttattttaccttttctttctttttggctagggaaggtgcaggtggcccagcattcagggaggagtcgtaagatcttaagaaaccaatccttgcctcaagcaaaagcatttctgaatctgtgacgcaagaatgtgcagttacaggctggtggcttttaaaccaggagcccggaggaagggtgaaagagaaagcctgtgaaataggcagggccagatcacccaaaactcctcaggactgggatctggcgtttataaataactagtttacagagagaatcacaaacaggataacttagtaccagcagtttttaaccttgacgtgagactaaaacgtgaccgtaggctgttttttagttattgctctcatgagatgatggctgtatttatctgtttatttatacctatttatgtatttatttattgaagtgtgaaattgagcaataggcaggcaccaccgtccccagagcaggtcagcgtctcgagaggcccctggacaattgaggatgcccatcccctcccctttccctgatcttttactgaggggctgtgtgcgcgatccttgcaaattgatgatgttgccatccgtacccaggctgtgtctcataaaagtcggcctggtgccagagaggacctcctttctcccacagaatcccagatcctcaggaaaagccaaaaccgaggcccattgcccggattcgacacaaaagagggtccctgctctgttgcccgagagcagtctgcatcctgggaccagaatgctttcctggaaaaagaagcctttcaggtttccctgggccagcatcttctgatggaaggtgggagccaacacccttctgatggaaggtgggagccaacacccttctgatggaaggtgggagccaacacccttctgatggaaggtgggagccaacacccttctgatggaaggtgggagccaacacccttctgatggaaggcgggattcccgcttctgaaactccccctggagtctcactcccacacatgcccatagctagcattcaacagagaactctgtcttaagcttcaactgtgaaaatgatgacgggcttgtagcacctcagcttctttcctcgcccccttttatctgaatcctatcaattattctgatgctgggacaggtgagaagaaactgtgaagtatatgagcctttgaaagttccctgaagtttctcagttcaggaacattctcattgtatgtggtctccgctgtttgaacagccttctagctaaaaaattccaaagcctttatttgggagtcttagcttgcaagcttgtggaaggatttagcttaacaactgtcactcctgaaaagcaatctctgttccatcaaggttctagttgctggccctgtgtcctcaaagttcattacatcttatcaaggcctgtttgcaaaggggagatcccttttcttaaaaaaggctcaacccaaaagaaaccatttcttaaaaaattttacatagatcagttgtatttctatttagcaaaaatgagtgctctgcttttatttgggaatttcgatgaaaaagcgttcagagtagataatgttcatttatcaaaaatctggtttgggaaataccaaagaggctttgattgaattcccttttgacccgtgtgtaacttcctctggtagttagaccccaggcagctccgaatttgtgaacctgcttcctgatgaattctcccttgttcccccttggctctgccattatttcgttttcagtgtaatttgccaagccgcagttttctgtgctggctgtgcctctagtcgcagctctgtgactgattccctcccgggtgctgagtcccctccccggccaccatcctgcgtgaatatcctgaaattcatgggcttcctcgggggcccgcccgcaggtggtgctgggtgggttccgccaccttctcctggaaggtgagccttttcctggccaagggcagctgccttaacctctgagagtctgcgcttggccttagtcctggagacccagcctccagggactgaaccgtgctgctgttgggagccaagaccggccctttggagccggcagcccaggggtccctgctggatcagagaaatagaagcacccgaagacggttagtggcaattccttgacccggtttgcttccaaatgaaggccatttgtccaccaggcattgaaaagacatgacttacccagtccggcatcggacttgaaaaatcgaaattgacatcactcagctgttacatttcacatccgattcagcccccttttatttccatgtgcttttcgcagccttcctgtgttggatgaaagagaataagaattcagctgacaggaggcctctatcctgtccctccaccccaccctccacctcaatcccctcccatcttccccagacctacctcacctactaggacctgaggcagctccttagcagagacccctggggtttagctgactctgggggtcaggggttcctgtccccaaacttcgcaagacagccctgaagtcacaagtgctttcttttaagtggcattggcaattggcgtgtaatgatggcagtagaatctgaatctcggatcccaggcagggttcacatttccaaacctttttgatttcccctgacctctaatggctggatcctatttttctacaacctttcagtgacatcgttcaggtttctttcttggccatttaaaaaaacaaattttttttttctcacttgtaagtcaccgccagtacctaagttaggctaacggagactttgacaggactggatttttcttccaccagaagagaagccttttccgttggtttggggccacctctttgaccatgaccatgtgatgttccgtttacagtgacttgctttgggggaggggaggctctcttaaccgattcccatgttgtacagtagatggttagaccttttgtatattagtgtgttttaagttattgatttgttttatataaaataatttatttttcaggtgccatttttcattttaactttgtttttacatgggtttgttttcaataaagtctgacactggtgtccaaaagtcaacaataaaatgaatcccattgtgttcttttgaagatgcctatgtaacttttaagctttttaaattattttcagaaaaaaaaaaagaaaagcccttatcagttttccatcagcccattgcctttttattttttttttttaatccttgtgaataaatgttctttagtgttttaggaggaaaaagcaaacctagattttgataacccagaagacttcagattaataaagaagctttgaaagaagaccatttttcaaaattttagtgaagtgtgaatattttttgtcaatggctttctcaaagagaatgaaacttttgcaccattttcagagtttttatagagatgccaaattgatatatttacatgtaatggaaacatgaaaaagttttattaaacaattgttcatagctgtgtagacattttaattcagtttccaaagctctcaaaaaatcgtatttttgaagtacggagtgatgcggtttggggcgtggcttacagttccaacgactcaattgtcccgatactcagttctttctacaggtatcaggttcgtgttaaacgctgtatgttaactatgactggaattctgtgatattttggtaataaatgaagtgggatcattgcg

SEQ ID NO: 320394 - DNA, 3058 bp, Artificial Sequence
  derived and/or modified sequence
ctaccaacttcgccaccctgcggtggattgactacggcaaagtggccactcagtgcacgtgccggaaggacatggtcaagatctccatggacgtgttcgtgcgcatcctgcagcccgagcgctacgagctgtggaagcagggcaaggacctcacggtgctggaccacacgcggcccacggcgctcaccagccccgagctgagctcctggagtgcgtcccgggcctcgctgaaggccaagctcctccgcagacaaattagtctgaaagaaaacagacactggagaaagactgaggaggagaggaaaccaagtctagaaaggaagaaagagcagaccaaaaggccggggctgtcgtctcaccggaaacggagccagcccaagaagccgaagcccgaagaccccaagttccctggggagggtacggctggggcagcgctcctagaggaggctgggggcagcgtgaaggaggaggctgggccggaggttgaccccgaggaggaggaggaggagccgcagccactgccacacggccgggaggccgagggcgcagaagaggacgggaggggcaagctgcggccaaccaaggccaagagcgagcggaagaagaagagcttcggcctgctgcccccacagctgccgcccccgcctgctcacttcccctcagaggaggcgctgtggctgccatccccactggagcccccggtgctgggcccaggccctgcagccatggaggagagccccctgccggcaccccttaatgtcgtgccccctgaggtgcccagtgaggagctagaggccaagcctcggcccatcatccccatgctgtacgtggtgccgcggccgggcaaggcagccttcaaccaggagcacgtgtcctgccagcaggcctttgagcactttgcccagaagggtccgacctggaaggaaccagtttcccccatggagctgacggggccagaggacggtgcagccagcagtggggcaggtcgcatggagaccaaagcccgggccggagaggggcaggcaccgtccacattttccaaattgaagatggagatcaagaagagccggcgccatcccctgggccggccgcccacccggtccccactgtcggtggtgaagcaggaggcctcaagtgacgaggaggcatcccctttctccggggaggaagatgtgagtgacccggacgccttgaggccgctgctgtctctgcagtggaagaacagggcggccagcttccaggccgagaggaagttcaacgcagcggctgcgcgcacggagccctactgcgccatctgcacgctcttctacccctactgccaggccctacagactgagaaggaggcacccatagcctccctcggagagggctgcccggccacattaccctccaaaagccgtcagaagacccgaccgctcatccctgagatgtgcttcacctctggcggtgagaacacggagccgctgcctgccaactcctacatcggcgacgacgggaccagccccctgatcgcctgcggcaagtgctgcctgcaggtccatgccagttgctatggcatccgtcccgagctagtcaatgaaggctggacgtgttcccggtgcgcggcccacgcctggactgcggagtgctgcctgtgcaacctgcgaggaggtgcgctgcagatgaccaccgataggaggtggatccacgtgatctgtgccatcgcagtccccgaggcgcgcttcctgaacgtgattgagcgccaccctgtggacatcagcgccatccccgagcagcggtggaagctggtgaggagcctggggcctggaggggcttggccgatcatggcctgggctgcagccctgcagggctgtctgctgcacaccctgtagcccacctgcgcacaaggcacttggggctgtccacgcctgctggaaaatgacactcagctggccctttaaatcagcttcctgcagagccttgggacctggcccagaaagaagatgaggaggccaggcctggtggctcatgcctgtaatcccagcactttgggaggccgaggcgggtcgatctcctgaggtcaggagttcgagaccagcctggccaacatatgaaaccccgtctctactgaaaatgcaaaacttagctctgcatggcgggacgtgcctgtgatcccagctactcgggagactaaggcgggagaattgcttgaacctgggcggcggaggttgcagtgagctgagattgcgccactgcactccagcctgggcgacagagtaagactctgtctcaaaaaaaaaaaagatgaggagagcaaaatgcagatgttgctggggccgcgtccccactaagggctgtgcatgtggcagcgctgatggggaggacgcatttgtccctgtgcactccggcctctgcacacgtgtctcgtgggcccctggaggctgggcccgcagccagtagcacccagcagcgtcctgcctgcttttcctgcctggtttatcttcccagccgcggacacagtgcctggtgttgacattcaggcttgcgtggaggtggggctggaagcagacagatcagtctggcagggtgggtctgctggggagaccacaagggtgggactgatgccggccacaaagcccgggctcccatgcactggtgcgaggtgcccacgagcccggcgggcttggatgccatgcttggagcccacaggtgctgggccacctgggcagggctgtgcaggcagtcacagaggctcatctggaaggggagccctctttccttgttcgtggagtggagtgtgcagtgggtcacgccggcctggccgggcacggccaggcgattaggaagccggcagcccgcgggtgatgcttccgaggcaccagtgactcagtccacaaacgtgggcgtaaaaggcctcatgattcaggtggagtgatggtgcgatgcgtggtgcagtgataagtcctcctgcccgacgccttatggatcatctgacatttccagaacgcagcctcttcattaccggtgcttgtaacgatgaattaaaaatccttttacacgaaaaaaaaaaaaaaaaaaa

SEQ ID NO: 320395 - DNA, 1573 bp, Artificial Sequence
  derived and/or modified sequence
agggctcggtcgccagcaaccgagcggggcccggcccgagcggggcctgggggtgcgacgccgagggcgggggagagcgcgccgctgctcccggaccgggccgcgcacgccgcctcaggaaccatcactgttgctggaggcacctgacaaatcctagcgaatttttggagcatctccacccaggaacctcgccatccagaagtgtgcttcccgcacagctgcagccatggggtctgaggaccacggcgcccagaaccccagctgtaaaatcatgacgtttcgcccaaccatggaagaatttaaagacttcaacaaatacgtggcctacatagagtcgcagggagcccaccgggcgggcctggccaagatcatccccccgaaggagtggaagccgcggcagacgtatgatgacatcgacgacgtggtgatcccggcgcccatccagcaggtggtgacgggccagtcgggcctcttcacgcagtacaatatccagaagaaggccatgacagtgggcgagtaccgccgcctggccaacagcgagaagtactgtaccccgcggcaccaggactttgatgaccttgaacgcaaatactggaagaacctcacctttgtctccccgatctacggggctgacatcagcggctctttgtatgatgacgacgtggcccagtggaacatcgggagcctccggaccatcctggacatggtggagcgcgagtgcggcaccatcatcgagggcgtgaacacgccctacctgtacttcggcatgtggaagaccaccttcgcctggcacaccgaggacatggacctgtacagcatcaactacctgcactttggggagcctaagtcctggtacgccatcccaccagagcacggcaagcgcctggagcggctggccatcggcttcttccccgggagctcgcagggctgcgacgccttcctgcggcataagatgaccctcatctcgcccatcatcctgaagaagtacgggatccccttcagccggatcacgcaggaggccggggaattcatgatcacatttccctacggctaccacgccggcttcaatcacgggttcaactgcgcagaatctaccaacttcgccaccctgcggtggattgactacggcaaagtggccactcagtgcacgtgccggaaggacatggtcaagatctccatggacgtgttcgtgcgcatcctgcagcccgagcgctacgagctgtggaagcagggcaaggacctcacggtgctggaccacacgcggcccacggcgctcaccagccccgagctgagctcctggagtgcatcccgggcctcgctgaaggccaagctcctccgcagaacccctccctgcgtatcgccgcacagaccctcccagccaggtatctggtgtccgcctggaggagaggccaaagcatctgcagcctcttggcttctgaccacaagaggccatggggacacggaggcaggtcccggcctaggaggagatccacttcatgcccagagtgaaggccaggcctcctgtgtctcgacgtctcgactccgcatggcaactcaagacccttgcagatga

SEQ ID NO: 320396 - DNA, 1347 bp, Artificial Sequence
  derived and/or modified sequence
atggggtcagaagatcacggagcccagaacccttcatgcaagattatgacatttaggccgacaatggaagaattcaaagacttcaataaatatgtggcctatatcgagtcccagggagcgcacagagcgggactggccaaaatcatccccccaaaagagtggaaacctcggcagacatacgacgatattgacgacgtagttattcccgcacccatccagcaagtcgtcactgggcaaagtggcctgttcacccagtataatatccagaagaaagcaatgacggtaggggagtatagaagactggcaaattcagagaagtattgtacacccagacaccaggactttgacgaccttgaaagaaagtactggaagaatctgaccttcgtgagtcctatctatggcgccgatatttccgggtcgctatatgatgatgatgtggcccagtggaatattgggagtcttagaacaattctcgacatggtggaacgggagtgcggaactataattgaaggcgttaacactccttacttgtactttggcatgtggaagacaaccttcgcatggcacacagaggatatggacctctactccatcaactatctgcatttcggtgaaccaaagagctggtatgccatcccaccagaacacggcaaaagattggagcgcttagcgattggattcttccccggatccagccagggctgcgacgcttttcttaggcacaaaatgactcttatatcaccaattatcctgaaaaagtatggaattcctttttctagaattacacaggaggcaggagagttcatgatcaccttcccctacggatatcatgccggtttcaaccacggctttaactgtgcggaaagcactaacttcgctacactccgctggattgattacgggaaagtggcgacccagtgtacctgtagaaaggacatggttaagatcagtatggacgtgttcgtgaggatcttgcagccagaaagatacgagctatggaagcaaggaaaagacctgacggtcctggaccacacccggccaacagcactgacctccccggagctctccagctggtcggcttcacgcgcttcactgaaagccaaactcctaaggcggacaccaccatgtgtctccccgcatcggccttcgcaaccaggaatttggtgcccgcctgggggagaagctaaagcgtccgctgcaagttggttgcttaccactcggggacatggcgacacggaagctggacccggcttggggggagatcccctgcatgcacagagcgaagggcaggcttcctgcgttagcaccagtcggctgaggatggcgacccaggacccttgcaggtag

SEQ ID NO: 320397 - DNA, 1347 bp, Artificial Sequence
  derived and/or modified sequence
atgggcagcgaggaccacggggcccagaaccccagctgcaagatcatgaccttccggcccaccatggaggagttcaaggacttcaacaagtatgtggcctacatcgagagccagggcgcccacagagctggcctggccaagatcatcccccccaaggagtggaagccccggcagacctatgatgacattgatgatgtggtgatcccagcccccatccagcaggtggtgacaggccagagcggcctcttcacccagtacaacatccagaagaaggccatgacagtgggggagtacagaaggctggccaacagcgagaagtactgcacccccaggcaccaggactttgatgacctggagaggaagtactggaagaacctgacctttgtgagccccatctatggagctgacatcagcggcagcctgtatgatgatgatgtggcccagtggaacatcggcagcctgcggaccatcctggacatggtggagcgggagtgtggcaccatcattgaaggagtgaacaccccctacctgtacttcggcatgtggaagaccacctttgcctggcacacagaggacatggacctgtacagcatcaactacctgcactttggagagcccaagtcctggtacgccatccccccagagcacggcaagaggctggagcggctggccatcggcttcttccctggcagcagccagggctgtgatgccttcctgcggcacaagatgaccctcatcagccccatcatcctgaagaagtatggcatccccttcagccgcatcacccaggaggccggggagttcatgatcaccttcccctacggctaccacgccggcttcaaccacggcttcaactgtgccgagagcaccaactttgccaccctgcgctggattgattatggcaaggtggccacccagtgcacctgcaggaaggacatggtgaagatctccatggatgtgtttgtgcgcatcctgcagcctgagagatatgagctgtggaagcagggcaaggacctgactgtgctggaccacacccggcccacagccctgaccagccctgagctgagctcctggagcgccagccgggccagcctgaaggccaagctgctgcggaggaccccaccctgtgtgagcccccaccggcccagccagcccggcatctggtgccccccaggaggagaggccaaggccagcgctgcctcctggctgctgaccacccggggccatggagacacagaggccggccctggcctgggcggggaccccctgcacgcccagagcgagggccaggccagctgtgtgtccaccagccggctgaggatggccacccaggacccctgcaggtag

SEQ ID NO: 320398 - DNA, 1347 bp, Artificial Sequence
  derived and/or modified sequence
atgggcagcgaggaccacggcgcccagaaccccagctgcaagatcatgacctttcgccctacaatggaggagttcaaggattttaataagtacgtcgcttatattgaatcccagggcgctcacagagcaggtctggccaagatcattcctccaaaggagtggaagcccaggcagacctacgatgacattgatgacgtggtcatcccggccccgattcaacaagtggtcacagggcagtccggcttgttcactcagtataatatccagaagaaagccatgacggtgggcgaatatagacggctcgccaacagcgagaagtattgtacaccgaggcaccaggacttcgatgatctcgaaagaaaatattggaaaaatctgaccttcgtgagccccatttatggggctgacatctctggatccctgtacgacgacgatgtggctcagtggaatattgggagccttaggaccatactcgatatggtcgagagggagtgcggtaccattattgagggcgtgaacacaccatatctctacttcggaatgtggaaaactacatttgcttggcacactgaagacatggacttgtactcgattaactatctgcacttcggggagcctaaatcttggtacgctattccccctgagcatggcaagagactcgaacggctggcgattggttttttccccggttcaagccaggggtgcgacgccttcctgcgccacaagatgactcttatctcaccaatcatcctgaaaaagtacggaataccctttagtcggattactcaggaagccggagaattcatgatcactttcccctatggataccacgctggatttaaccatggctttaactgtgcagaaagcaccaattttgctacactgcgttggatcgattacggaaaggtcgccacgcagtgtacctgccgtaaagacatggtcaagatctctatggatgtgtttgttcgcatactacagccggaaaggtatgagctgtggaaacagggcaaggacttaaccgtcttagaccatacacgcccaaccgcacttacttcccctgaactgtcaagttggtctgcctcacgcgcctcactgaaggctaaactccttcgccgcacaccaccatgcgtctcgccacatcgaccatctcagcctgggatctggtgtccccccggcggggaagcgaaggcatccgccgcctcatggctgctgactacccgcggccacggcgataccgaagcaggtcctggtctgggtggggatccattgcatgcacagagtgaagggcaggcgtcctgtgtctcaacgtcaaggttgaggatggccacgcaggatccttgtagatag

SEQ ID NO: 320399 - DNA, 1347 bp, Artificial Sequence
  derived and/or modified sequence
atgggctctgaggaccacggcgcacagaacccgtcctgcaaaatcatgaccttcaggcccactatggaagaattcaaagactttaacaaatacgtggcatacattgagagtcagggggcacacagggccggattggctaaaattatccccccaaaggaatggaaaccacggcaaacgtatgatgatattgacgacgtggttatacccgctcccatccagcaggtggtaaccgggcagtccggtctctttacacagtacaacattcagaaaaaagcaatgaccgtgggcgaataccggcgactggctaattccgagaaatattgcacccccaggcatcaggactttgacgatctggagaggaaatattggaaaaatctgacgttcgtaagtcccatctatggtgcagacatctcggggtctctctacgatgatgatgtggcacagtggaatatcggctctttgagaacaatcctcgatatggtggaacgggaatgcggcaccataatcgagggggtaaatacaccatacctgtacttcggcatgtggaagaccacttttgcctggcatacagaggacatggacctgtatagcatcaattacctccatttcggggagccaaaatcatggtatgcaatccctcccgagcacggaaagcgcctcgaacggctcgccataggattcttcccaggctcctcccaggggtgcgacgcattcttgaggcataagatgaccctcatttctcctatcatcctaaaaaagtatggcatccccttttcgcgcattacccaggaggccggtgaatttatgatcaccttcccatacggttaccatgccggtttcaatcacggattcaactgtgcagaaagcactaattttgccacactgcgttggatcgattatggcaaagttgcaacacagtgtacctgtcgcaaggatatggtgaaaatttcaatggacgtcttcgtgcgcattctgcaacccgagcgctacgaactgtggaaacaaggtaaagatctgaccgtcctagatcacacgagacccacagcactgacaagccctgagttgtcttcatggtctgcctcacgggcttctctgaaggcaaagctgttgaggcgcacacccccttgcgtaagccctcaccgacctagtcagcccggtatctggtgccccccagggggagaggctaaagcttcagctgcaagctggttgctgactactaggggacacggtgacacggaggctggccctgggctcggaggggatccactccacgctcagtctgagggccaggccagttgtgtttctacatcaagattgaggatggccactcaagatccatgtcggtag

SEQ ID NO: 320400 - DNA, 1347 bp, Artificial Sequence
  derived and/or modified sequence
atgggcagcgaggaccacggcgcccagaaccccagctgcaagatcatgaccttcagacccaccatggaggagttcaaggacttcaacaagtacgtggcctacatcgagagccagggcgcccacagagccggcctggccaagatcatcccccccaaggagtggaagcccagacagacctacgacgacatcgacgacgtggtgatccccgcccccatccagcaggtggtgaccggccagagcggcctgttcacccagtacaacatccagaagaaggccatgaccgtgggcgagtacagaagactggccaacagcgagaagtactgcacccccagacaccaggacttcgacgacctggagagaaagtactggaagaacctgaccttcgtgagccccatctacggcgccgacatcagcggcagcctgtacgacgacgacgtggcccagtggaacatcggcagcctgagaaccatcctggacatggtggagagagagtgcggcaccatcatcgagggcgtgaacaccccctacctgtacttcggcatgtggaagaccaccttcgcctggcacaccgaggacatggacctgtacagcatcaactacctgcacttcggcgagcccaagagctggtacgccatcccccccgagcacggcaagagactggagagactggccatcggcttcttccccggcagcagccagggctgcgacgccttcctgagacacaagatgaccctgatcagccccatcatcctgaagaagtacggcatccccttcagcagaatcacccaggaggccggcgagttcatgatcaccttcccctacggctaccacgccggcttcaaccacggcttcaactgcgccgagagcaccaacttcgccaccctgagatggatcgactacggcaaggtggccacccagtgcacctgcagaaaggacatggtgaagatcagcatggacgtgttcgtgagaatcctgcagcccgagagatacgagctgtggaagcagggcaaggacctgaccgtgctggaccacaccagacccaccgccctgaccagccccgagctgagcagctggagcgccagcagagccagcctgaaggccaagctgctgagaagaacccccccctgcgtgagcccccacagacccagccagcccggcatctggtgcccccccggcggcgaggccaaggccagcgccgccagctggctgctgaccaccagaggccacggcgacaccgaggccggccccggcctgggcggcgaccccctgcacgcccagagcgagggccaggccagctgcgtgagcaccagcagactgagaatggccacccaggacccctgcagatag

SEQ ID NO: 320401 - DNA, 1377 bp, Artificial Sequence
  derived and/or modified sequence
aagacgccaagatggcgacgagtcagtatttcgacttcgcgcagggcggcggcccgcagtacagcgcccagcctccgacccttcccctgcccactgtgggggccagctatactgcacaacccactcctgggatggaccctgccgtgaacccggcctttcccccagctgccccggcagggtacggtggataccagccccactccggccaggacttcgcctacggcagccgaccccaggagcccgtccccacggccaccaccatggctacctaccaggacagttacagctacggacagtcagcagctgccaggagctatgaggacaggccgtacttccagtctgctgccctccagtctgggcgcatgacagccgcagactccggccagccagggacccaagaagcctgcgggcagcccagcccccatggcagtcacagccacgctcagcccccacagcaggcgcccatagtggagtccggacagccagcgagcaccttgtcctcgggatacacctaccccacggcgacaggcgtccagcccgagtcgtcagcttccatcgtgacctcctaccccccgccctcctacaaccccacctgcaccgcctacacggcaccaagctacccgaactatgacgcgtcggtgtactccgctgccagccctttctatcctccagcgcagcccccgcctcccccgggacccccgcagcagctgcccccgccgcccgcgcctgcaggctcaggaagcagccccagggccgactcgaagccaccgcttcccagcaagctgccgagacccaaggcggggcccaggcagctccagcttcactactgcgacatctgcaagatcagctgcgctggcccccagacctaccgggaacatctgggagggcagaagcacagaaagaaggaggcggcccagaagacaggcgtgcagcccaacgggagcccgcgcggggtgcaggcgcagctgcattgcgacctgtgcgccgtgtcctgcaccggggcggacgcctacgcggcccacatccggggatccaagcaccagaagggcctcctgagccacaggcagcaggctgcagaccccagtgggggaaaccagcccaacctaaattagagggtcccggagcacctacccaaggaggctcaaaggaagctcccgcgggctgctctgatgcgcagccggtgggcccggaatatgtggaggaggtgttcagcgacgaagggcgagtgcttcgcttccactgcaagctgtgcgagtgcagtttcaacgaccttaacgcgaaggacctgcacgtgagggggcggcggcaccggctgcagtaccggaagaaagtgaacccggaccttcccattgccacggagcccagcagccgggctcg

SEQ ID NO: 320402 - DNA, 1101 bp, Artificial Sequence
  derived and/or modified sequence
atggccaccagccagtacttcgacttcgcccagggcggcggcccccagtacagcgcccagccccccaccctgcccctgcccaccgtgggcgccagctacaccgcccagcccacccccggcatggaccccgccgtgaaccccgccttcccccccgccgcccccgccggctacggcggctaccagccccacagcggccaggacttcgcctacggcagcagaccccaggagcccgtgcccaccgccaccaccatggccacctaccaggacagctacagctacggccagagcgccgccgccagaagctacgaggacagaccctacttccagagcgccgccctgcagagcggcagaatgaccgccgccgacagcggccagcccggcacccaggaggcctgcggccagcccagcccccacggcagccacagccacgcccagcccccccagcaggcccccatcgtggagagcggccagcccgccagcaccctgagcagcggctacacctaccccaccgccaccggcgtgcagcccgagagcagcgccagcatcgtgaccagctaccccccccccagctacaaccccacctgcaccgcctacaccgcccccagctaccccaactacgacgccagcgtgtacagcgccgccagccccttctacccccccgcccagcccccccccccccccggccccccccagcagctgccccccccccccgcccccgccggcagcggcagcagccccagagccgacagcaagccccccctgcccagcaagctgcccagacccaaggccggccccagacagctgcagctgcactactgcgacatctgcaagatcagctgcgccggcccccagacctacagagagcacctgggcggccagaagcacagaaagaaggaggccgcccagaagaccggcgtgcagcccaacggcagccccagaggcgtgcaggcccagctgcactgcgacctgtgcgccgtgagctgcaccggcgccgacgcctacgccgcccacatcagaggcagcaagcaccagaagggcctgctgagccacagacagcaggccgccgaccccagcggcggcaaccagcccaacctgaactag

SEQ ID NO: 320403 - DNA, 1101 bp, Artificial Sequence
  derived and/or modified sequence
atggccacatcacagtattttgattttgctcagggcggcggcccccagtatagcgcccagccccctactctgcccctcccaactgtgggcgcatcctacacagctcaacctactccagggatggaccccgcagtgaatccagcattcccccccgcagctccagctgggtacggaggctatcagccccatagtgggcaagattttgcctacgggtcacgccctcaggaacctgtcccaacagccacaacgatggccacttatcaggacagttatagctatgggcaatctgccgccgccagatcctacgaggaccggccctactttcagtcagcagcactccagagtggaagaatgactgctgctgacagcgggcaacccgggacacaagaggcatgtggccagccctccccccatggatcacatagccacgcacagccaccccagcaggccccaattgttgaaagtggccagcccgcaagcaccctctcaagtgggtatacatatcccaccgctactggcgtacagccggagtctagcgccagtatcgttacttcctacccccccccttcctataatccgacatgtacagcttacaccgctccctcctatccaaactacgacgcatccgtttactcagcggcctctccattttaccctcccgcacagcccccacccccccccggacccccacagcagctcccaccacctccagcccccgctggctcaggtagcagcccaagggccgatagcaagccgcctctgccgtctaaactgccgagacccaaagcggggccgaggcagctgcagcttcactattgtgacatctgcaagattagttgcgcaggaccacagacatatagagagcacttaggtgggcagaaacatagaaagaaagaggccgcccaaaagactggcgtgcagccaaatggcagccctcgtggagtgcaggcgcaactgcattgcgatctgtgtgcggtgagctgtaccggagccgatgcctatgctgcacacatccgcgggagtaaacatcagaagggactactctcccacagacagcaggccgctgacccgtccggtggaaaccagcctaacttgaattag

SEQ ID NO: 320404 - DNA, 1101 bp, Artificial Sequence
  derived and/or modified sequence
atggccaccagccagtactttgattttgcccagggcggcggcccccagtacagcgcccagccccccaccctgcccctgcccaccgtgggcgccagctacacagcccagcccaccccaggcatggaccctgctgtgaacccagccttccccccagctgccccagctggctatggaggctaccagccccacagcggccaggactttgcctacggcagccggccccaggagcctgtgcccacagccaccaccatggccacctaccaggacagctacagctatggccagagcgctgctgcccggagctatgaagatcggccctacttccagagcgctgccctgcagagcggccgcatgacagctgctgacagcggccagcccggcacccaggaggcctgtggccagcccagcccccacggcagccacagccacgcccagcccccccagcaggcccccatcgtggagagcggccagcctgccagcaccctgagcagcggctacacctaccccacagccaccggggtgcagcctgagagcagcgccagcatcgtgaccagctaccccccacccagctacaaccccacctgcacagcctacacagcccccagctaccccaactatgatgcctctgtgtacagcgctgccagccccttctaccccccagcccagcccccacctcctcctggccccccccagcagctgcccccacctccagccccagctggcagcggcagcagccccagggctgacagcaagccacccctgcccagcaagctgccccggcccaaggccggcccccggcagctgcagctgcactactgtgacatctgcaagatcagctgtgccggcccccagacctaccgggagcacctgggcggccagaagcacaggaagaaggaggccgcccagaagacaggagtgcagcccaacggcagcccccggggcgtgcaggcccagctgcactgtgacctgtgtgctgtgtcctgcacaggagcagatgcctatgctgcccacatccggggcagcaagcaccagaagggcctgctgagccaccggcagcaggccgctgaccccagcggcggcaaccagcccaacctgaactag

SEQ ID NO: 320405 - DNA, 1101 bp, Artificial Sequence
  derived and/or modified sequence
atggccaccagccagtacttcgacttcgcccagggcggcggcccccagtattctgctcagcctcctacgctgccattgcctactgtcggagcttcctacactgctcaacccacccccgggatggacccagccgtgaatcccgcctttccacccgctgcccctgccggttatggcggctaccagcctcatagcgggcaggattttgcctacggctccagaccacaagagcccgtgccaacagcaaccacaatggctacatatcaggattcctacagctacgggcagtctgccgctgcacggtcctacgaggacagaccctactttcagtccgctgccctgcaaagtgggaggatgaccgcagcggattcaggccagcccggcacgcaagaggcatgtggtcagccatcccctcacggtagccattcccatgctcagcccccacagcaggcacctatcgtcgaatcgggacaacctgccagcacattgagctctggttatacatatcccacagccaccggcgtgcagcctgaatcctccgccagtattgtgacatcctatcccccaccgtcatacaacccaacctgcaccgcctacacagcacccagctaccctaactatgatgcgagcgtgtacagcgcagcgtctccgttttatccgccggcacagccccctccccccccgggccctcctcagcagctacctcctcctcccgcccctgccggaagcggaagctctccccgggcagacagtaagcccccactgcccagtaagttacctaggcctaaggccgggccacggcagctccagctccattattgcgacatctgcaagatttcctgcgccggaccccagacttatcgcgagcatcttggtggccaaaagcaccggaaaaaggaggcggcccagaagactggagtccagccaaatgggtctccccgcggggttcaggcacagctgcattgcgacctatgcgcggtgtcttgtactggggcagacgcgtatgccgcccacatcaggggaagcaagcaccagaaggggttgctctcgcaccggcaacaggccgcagacccctccggggggaatcaacccaatctgaattag

SEQ ID NO: 320406 - DNA, 1101 bp, Artificial Sequence
  derived and/or modified sequence
atggctacctcacagtactttgacttcgcccagggtggcggaccacagtacagtgcgcaaccgcctactcttccacttccgaccgtcggagcatcatacactgcccagccaacacccggaatggatcctgccgtgaacccagcctttccgccagccgcaccagctggctacgggggataccagcctcattccgggcaggatttcgcctacgggagtcgccctcaggagcctgtacccactgccactactatggcgacttaccaggattcgtacagctacgggcagagtgcagccgcaaggtcatatgaggaccgcccatacttccaaagcgccgctctacagtcaggtagaatgactgcggctgatagtggacaaccgggtacacaggaggcttgtggacagccctccccacacggctctcactcccatgctcagcccccacagcaggctccaatagtggagagcggtcaacccgcaagcacactgagtagtggctacacataccccaccgccacaggcgtgcagcccgagagtagcgccagcattgtgacttcataccccccaccctcctataatcctacatgtactgcctatacagccccaagctaccctaactacgacgcttcggtgtattctgctgccagcccattttaccccccagctcagcctcctcccccaccgggaccccctcagcaattgcctccaccaccagcccctgccggaagcgggtcaagcccaagagcagactccaagcctccattaccatccaagctgccccgacctaaggccggtccgagacagctgcagctgcactactgcgacatttgtaagatctcttgcgccggaccgcaaacctatcgcgaacatttagggggtcagaaacatcgcaagaaggaggctgctcagaaaacaggcgttcaaccgaacggatcgcctagaggtgttcaagcgcaacttcactgcgatctgtgcgcagtgtcctgcactggggctgacgcatatgcggcacatattagggggtccaagcatcaaaaaggccttttgtctcacaggcaacaagctgcggacccatccgggggaaatcaaccaaacctcaattag

SEQ ID NO: 320407 - DNA, 3839 bp, Artificial Sequence
  derived and/or modified sequence
aaatataaaaattagccaggtgtggtggcagacacctgtaatcccagttacttgagaggctgaggcaggagaatagcctgaacccaggaggcagaggttgcagtgagccgagatcgcactactgcactccaacctgggcaacagagtgagactccatctcaaaaaaaaaaacccaaaaaactaatgggccatggcccaaaagcttgcacaccaaggggatagcgcacatggtctctggggatttggggggtcctttgacagtgattgttataccccaccctgccattaggaacactctacccccagtacccaccctcctgagagggcatgggggccctcagtaggctggaggtcctttacaacccagacacctgttggacagagtggaagagacgagtaacagacaagggtccctgtccacgatgggatctgggctgccctttgccctcatggtggacgtgtctgctggggctttgtaccccagtttggtcagacaggacatgggctcacccaccagctatggggtctctccattgctgctcagacgccaggtcccaggttgcagtcctgtgatggcagtacactctctcccggcagatctcccaggtctgccagctgtgccagcagtccccccggctcttctccaaccatgcagcacagctgcacacattgctggtgagtaaccctgtgacaacaccccgggagaatccagaatgttctcagtaagtaagtacctaaccagatccagaacattcccagtgaaggaccccctgacagcaccctaatcagaatccggaatgttcccataggtaatcatataaccttcccaggcacgatccggaatgctcccagtgagcatcttgtcccaccccacattggcttgggtctgaaaggtggggacagtgagcatattacctgccttgcagctggctcggtagagccattgtcatactcctccagggcagccgtgcaggccccgggcacaccacgtgtctctgatctgagccccctccccaggggccggccctgatgacaacaccaccttcttccagggcctgtactgtgtctctgtcaactgcatggacaacgcggaagcccagttcaccacggccctgcggctcaccaaccaccaggagctgtgggccttcatcgtcaccaacctggcgagtgtgtatatacgggaaggaaatagacaccaagaggtactctacagtctgctggagaggatcaacccggaccacagcttccctgtcagctcgcactgcctccgagcagccgccttctatgtgcgtgggctcttctccttcttccagggacgctacaacgaggccaagcgatttctgcgggaaactctgaagatgtccaatgctgaggacctgaaccggctcacagcctgctccctcgtgcttctgggccacatcttctatgtgctgggaaaccacagggacagataaagcaagatgtgtgtcttggcctgtaaagtttcacgtgatctgagggctccctcagcatggatgctgttaacaaacgtggtgcccgcccaccgcaacacacagacacataactgtgtggagagtaacaacatggtggtgcctgccatgcagctcgccagcaagatcccggacatgtcggtacagctgtggtcgtcagcactgctgagagacctgaataaagcctgtgggaacgccatggatgcccatgaagccgcccagatgcaccagaacttctcgcagcagctgctccaggaccacattgaggcctgcagcctccccgaacacaacctcatcacgtggacagacggtccaccccccgtgcagttccaagctcagaatggacccaacaccagcctggccagcctcctgtgaggccttgatggggccatccagctccgcagggcctgcgcgtctccggcttccacccagacggcactcaagcctgcccccgaggcgtgcttccttcctgattgtctctagagcttccaagtcctgggaatgtgcggggccagtccctgccctcccaggaggggtggtagccgttcccacctcgcagcaggacccccagtgcagaggctcacaggtggcacacaggcgctgtctctccagagccatccttcagagtggacctcagtgccagtcctgcctcagcatctgggtcacgtcggccaggagtagggtgcaggcctccagcaggtcctaatcctgtgtgccagggcaggcagtgccccaggggcaccacgcctgactctccatcacccaggccttgatgccgagcgggagtagagtgtttcctctgctcaaggcaatttccagagcccggatgccagtttctggcctgaatttggagggaagaagtaatggcgctagtgtgggacgaagcacagatcccagcacttttcccagctttctctccagcatcagtccctgcagcagctggggcctctggtcaggaaccctcagggacccaggaactcagcttccaaacatctgcaccttgaccggactcgccatcccgccgtgggggtgcaggtgattgtaaacacgggtgtgcatgtggatgcacacgggtgtgcggtgaagatctgtggagatggagctgggagctgaggctcctgttgcaccagccaccttcccccatcttgtggctgctgaggggcaggaagcgggggagtgggctcgtctcctaaatttaagatcacctcctcagctagcttagagtgcgtggcacgggccccccgcccccgagatctggagcccagggactttcttcctggcagatctgtggccttccctgctcagcctcttggtccccccactccctccaccgcctcaccttccctgctgggtctctggggcacagtgtgaaacccgcaccctagccaggccccagggagcctccgctgggcccagacagcagcgtttggttttatccacttttcttggataatcaggaggtgccccagtggtcacagtgtggcattccgagttggggcgggtggtcgggtcaagatagcagcagcaggtgtcagggctcaagacaccaccccctccagcttctggggcccaggagcctctccctgctacagggggtgggggtcctgctcagcagggtaggtggtggttttaggtcttgtcaccctcactcagtggaactgcctctgggagctttggcgtctgtgactaaagggacgctggattgctcaggtcagctgcttggggctcccaggctgggtgtgccttagccacaggcagggctgtcaataacccccttcctcactggccaccacctgacatcagcaccagtgacaggctggtcagagggcggggctggtgagggtttgtcctaagaggaccaccgccatctctgggtctccagggggagagcctggccctgtcctttgctacccagggctgcccccaggcccatgaagccaataggagagcgtgtggcactggcccacaaactgtccctgtcctgtcttcctcccgagccatggcctctgctagctccaccttgaaggagccccccacatcctcccctacatcccagagatgccaccacttgtgtctccacaatgtgctcctgcccacccgggttccgcactgtccgacccctgcacaccactcatgtcaccacggcgtgcatcatgttcatccccatctatttatttaagcctttctttgcttgtagggcattttgtatgtagagcagttgaaaacagaacctcagaacttaacatctgtcctgatgttaaagtgcttttcatgaccaccctgttatctatgtatatgtaaagttaaggatgagatcttaagtttacaattaaaaactcagtactcaat

SEQ ID NO: 320408 - DNA, 4071 bp, Artificial Sequence
  derived and/or modified sequence
aagcctttgcagaggccagcgaatgggccctgcagctcaggccctggtgggccttggcctcagcactggggatgccactaccccgtcaaaacctgtagctggctccttctagaatgtgctatcaccctgccctcagcctctgagcacagtgagggctgtatgtccccactggacagtgcaagtggcctgggggtgtgtcagatggggaggttaaagtcacacagccccagaccgcagaatcaggactggaacccagacctcactggctctgatttgtgtagaaacccctggaagctgcctggagcagggcaaggagggttgagcagctggttcactgctgctcctggcccatgttttaggtgttgtgggggcatcttacagagctcttttgggaatccccctctgctccctgtgtccctgggcccttgtcgggtgacaagcggcgcccaagaactctcagaccaaggtcctggccttaagtgactccagatctcggggagacacagccagacacagccaagccagtcctgtgaggtcaggctggggacatccagaaaggtggcagccttgggggccgggatagtgttggtgcaggcagggcaaggttggctaggcaggggctgccacagagatgggcaccacagcagtcagagcacaagtgccggagcagacggctgaatggccacaatgggctcaggtgagggtccaggggcccagaagagcttgggatgccctgtcctgagcctgttaggctagagtgtccacaagagcgggacaccccccaggatcactcaagtcttcaaaaccagattctgtggggtaccccaagctggcattgggggaacctacccaggagcgctgaaggaggactctccttccccaggctgctttcagacagaggtccttggctttctacagggagcccagccaggctcacaataagccaggcctagcggaagagagcagtttttcttgctctgaggtttcaaaagggcttggtgaattttaaaaagctccaagacccacctggagctcactttcaaggtgcagctacagggcagtgtagagttgttgggctttgtgtctcaggaggagcatctctgcactctggagaagtatctggtggcgtcaaagccaggtctcaggagttggttttggggatgtgtccatcttggcttcccaagtgctccctgggctgccaggagccatcatctagggaattttccaggtcttacctgaaccccacatccaggcttacagggctttgagtcctcggtccagacagggtcagtccagcactgctggtcgcctgtgtagcacaggctcctgtctgccgtctccaggcccttgccatagcaacagggatgggcatttatgggccctgatggctcttactgagctcttcctgccacatcctgaggatgctagggctgcaactggggtggccctgtgcagtcacaaagcagggagtccggattggaggattcttacatgctggtgcccccagagcccctgcgtgtctgcgggggcctcccatgagagccaactcaattgtggaagacaaaccggaggggctgctgcccttctcagaacctgaaacctggaaccctatatgaatctgcatttctgatcagcccccattgtgggtctagggctaacggccatcagtgctttttctctgcttgaacaggtagaagcccccaaagttgtccattggccatgcccctgtgagggcatgagccagaagtgagggcagtttgtttttcagtgatacttcagagagggccatttgagatgggctctgaggagagtaacaacatggtggtgcctgccatgcagctcgccagcaagatcccggacatgtcggtacagctgtggtcgtcagcactgctgagagacctgaataaagcctgtgggaacgccatggatgcccatgaagccgcccagatgcaccagaacttctcgcagcagctgctccaggaccacattgaggcctgcagcctccccgaacacaacctcatcacgtggacagacggtccaccccccgtgcagttccaagctcagaatggacccaacaccagcctggccagcctcctgtgaggccttgatggggccatccagctccgcagggcctgcgcgtctccggcttccacccagacggcactcaagcctgcccccgaggcgtgcttccttcctgattgtctctagagcttccaagtcctgggaatgtgcggggccagtccctgccctcccaggaggggtggtagccgttcccacctcgcagcaggacccccagtgcagaggctcacaggtggcacacaggcgctgtctctccagagccatccttcagagtggacctcagtgccagtcctgcctcagcatctgggtcacgtcggccaggagtagggtgcaggcctccagcaggtcctaatcctgtgtgccagggcaggcagtgccccaggggcaccacgcctgactctccatcacccaggccttgatgccgagcgggagtagagtgtttcctctgctcaaggcaatttccagagcccggatgccagtttctggcctgaatttggagggaagaagtaatggcgctagtgtgggacgaagcacagatcccagcacttttcccagctttctctccagcatcagtccctgcagcagctggggcctctggtcaggaaccctcagggacccaggaactcagcttccaaacatctgcaccttgaccggactcgccatcccgccgtgggggtgcaggtgattgtaaacacgggtgtgcatgtggatgcacacgggtgtgcggtgaagatctgtggagatggagctgggagctgaggctcctgttgcaccagccaccttcccccatcttgtggctgctgaggggcaggaagcgggggagtgggctcgtctcctaaatttaagatcacctcctcagctagcttagagtgcgtggcacgggccccccgcccccgagatctggagcccagggactttcttcctggcagatctgtggccttccctgctcagcctcttggtccccccactccctccaccgcctcaccttccctgctgggtctctggggcacagtgtgaaacccgcaccctagccaggccccagggagcctccgctgggcccagacagcagcgtttggttttatccacttttcttggataatcaggaggtgccccagtggtcacagtgtggcattccgagttggggcgggtggtcgggtcaagatagcagcagcaggtgtcagggctcaagacaccaccccctccagcttctggggcccaggagcctctccctgctacagggggtgggggtcctgctcagcagggtaggtggtggttttaggtcttgtcaccctcactcagtggaactgcctctgggagctttggcgtctgtgactaaagggacgctggattgctcaggtcagctgcttggggctcccaggctgggtgtgccttagccacaggcagggctgtcaataacccccttcctcactggccaccacctgacatcagcaccagtgacaggctggtcagagggcggggctggtgagggtttgtcctaagaggaccaccgccatctctgggtctccagggggagagcctggccctgtcctttgctacccagggctgcccccaggcccatgaagccaataggagagcgtgtggcactggcccacaaactgtccctgtcctgtcttcctcccgagccatggcctctgctagctccaccttgaaggagccccccacatcctcccctacatcccagagatgccaccacttgtgtctccacaatgtgctcctgcccacccgggttccgcactgtccgacccctgcacaccactcatgtcaccacggcgtgcatcatgttcatccccatctatttatttaagcctttctttgcttgtagggcattttgtatgtagagcagttgaaaacagaacctcagaacttaacatctgtcctgatgttaaagtgcttttcatgaccaccctgttatctatgtatatgtaaagttaaggatgagatcttaagtttacaattaaaaactcagtactc

SEQ ID NO: 320409 - DNA, 504 bp, Artificial Sequence
  derived and/or modified sequence
atgccaatgaaaccgcctcggtgcacccggacctcccgctccagttgttcccggacaacgttacggccagcggcctcccccaatacgacgtcttcccgggggcagaccgttcatcctccatgttcttcgaagttacgaatggaccccactccggcatggcccgcgtcttgtgaggcactcatgggacccagcagtagtgcaggccctgctaggttgagactgccgcccaggagacactctagcctaccacccagacgggcaagtttcctgatcgttagccgtgctagcaaaagctgggagtgcgccgggcccgtacctgcactgccaggcggtgtggtcgccgtccctacgagtcagcaggatccgcagtgtaggggatctcaggtggcccacaggcggtgcttatcacgcgccattctgcaatcaggccctcagtgtcaaagctgcttgagcatttgggtaacctccgcccgatccagagtccaagcttcctcccgttcgtag

SEQ ID NO: 320410 - DNA, 504 bp, Artificial Sequence
  derived and/or modified sequence
atgcccatgaagcccccccggtgcacccggaccagccggagcagctgctccaggacgacactacgaccagctgcctcccctaacacaacatctagtcggggccagacagtgcaccctccgtgctcatccaagttgagaatggaccctaccccagcctggcccgcctcttgcgaagcacttatgggtccaagctctagcgctggtccggctcgactcagacttcctccccgacgccattcctccctgccacccaggcgggcctcctttcttattgtgagcagagcctccaagagttgggagtgtgctggtcctgtgccagcactaccaggcggcgttgtcgccgtgcctacaagtcaacaggatcctcagtgtaggggcagccaggttgcccatcgccgctgtctttctcgggcgatcctgcagtccggaccgcagtgccagtcatgcctgtcaatctgggtaacctctgcccgctcgcgcgtgcaggcctcctctcgttcatag

SEQ ID NO: 320411 - DNA, 504 bp, Artificial Sequence
  derived and/or modified sequence
atgcccatgaagcccccccggtgcacccggaccagccggagcagctgctccagaacgaccctccgcccagctgcttccccgaacactaccagctctaggggacagaccgtgcaccctccctgctcctcaaagcttcgcatggaccccactccagcctggcctgctagttgcgaggctctgatggggccatccagttccgccggccctgcccgccttaggctccctccaagaagacatagctcacttcctcctagaagggcaagctttctcatcgtgtctcgcgccagtaagagctgggagtgcgcaggccccgtgccagctctcccaggtggagttgtcgcagttcctacctcacaacaggatccccagtgccggggctcacaggttgctcaccggcgatgtttatcaagggctattcttcagagtgggcctcaatgtcaatcctgtctgtctatttgggtgacttcagcccgttcacgggtgcaggcctcctcccgttcatag

SEQ ID NO: 320412 - DNA, 504 bp, Artificial Sequence
  derived and/or modified sequence
atgcccatgaagccgcctaggtgcactcggacatcccgatcgagttgtagtcgcaccactctgagacctgccgcatcaccaaacacgacctccagcagaggacagactgttcatccgccatgttccagcaaactccgtatggacccgaccccagcttggccagctagttgtgaagcacttatgggaccgagtagtagcgccggtccagcccgactccgcctaccccctaggcggcacagtagcctgccgcctcggcgagcctcctttctgatagtttcccgagcgagcaaatcttgggagtgtgctggaccggtgccggctctccctggcggagtcgtggcagtacctacatcccaacaggacccgcagtgtcggggatcacaagtggcacaccggaggtgcctgtctagggcaatcctacagagtgggcctcagtgtcaatcatgcctaagcatctgggtcactagcgcgcgaagccgcgtgcaggcatcctccagatcatag

SEQ ID NO: 320413 - protein, 700 aa, Artificial Sequence
  derived and/or modified sequence
MELEVPDEAESAEAGAVPSEAAWAAESGAAAGLAQKKAAPTEVLSMTAQPGPGHGKKLGHRGVDASGETTYKKTTSSTLKGAIQLGIGYTVGHLSSKPERDVLMQDFYVVESIFFPSEGSNLTPAHHFQDFRFKTYAPVAFRYFRELFGIRPDDYLYSLCNEPLIELSNPGASGSLFYVTSDDEFIIKTVMHKEAEFLQKLLPGYYMNLNQNPRTLLPKFYGLYCVQSGGKNIRVVVMNNILPRVVKMHLKFDLKGSTYKRRASKKEKEKSFPTYKDLDFMQDMPEGLLLDADTFSALVKTLQRDCLVLESFKIMDYSLLLGVHNIDQHERERQAQGAQSTSDEKRPVGQKALYSTAMESIQGGAARGEAIESDDTMGGIPAVNGRGERLLLHIGIIDILQSYRFIKKLEHTWKALVHDGDTVSVHRPSFYAERFFKFMSNTVFRKNSSLKSSPSKKGRGGALLAVKPLGPTAAFSASQIPSEREEAQYDLRGARSYPTLEDEGRPDLLPCTPPSFEEATTASIATTLSSTSLSIPERSPSETSEQPRYRRRTQSSGQDGRPQEEPPAEEDLQQITVQVEPACSVEIVVPKEEDAGVEASPAGASAAVEVETASQASDEEGAPASQASDEEDAPATDIYFWRLWGPHAPTWPWRREGRAACLCPYPPHVVTPFPGTGLCASWSPDGTGGLGAMSCCVSVS

SEQ ID NO: 320414 - DNA, 2103 bp, Artificial Sequence
  derived and/or modified sequence
atggaactcgaagttcctgacgaagccgagagtgctgaagcaggtgcagtgccctcagaagcggcttgggccgcagagtctggcgcagctgccggactggctcaaaagaaagccgctcccaccgaagtgctgtctatgacagctcagcccgggcccgggcacggtaaaaaattgggacatcggggagtggatgcctccggtgaaacaacttacaagaagaccacctcctcaacgctaaagggggcaattcagctggggatcggctatacggtggggcatctgtcaagcaagcccgaacgcgacgtcctgatgcaagatttttatgtcgtggaatcaattttcttcccgtcggagggaagcaatctgactcctgcccaccacttccaagatttccgttttaagacatacgccccggtggcttttcgctattttagggagctgttcgggatccgacccgatgattatctctactcactgtgtaacgagccgctcatcgaactatcgaatccaggcgcctctggatctcttttttacgttacatctgacgatgagtttattatcaagaccgttatgcataaggaagctgaattcctgcaaaaactcttgccaggctattacatgaatctcaaccaaaatccgcggacccttcttcctaagttttacgggctgtactgtgttcagtccggcggcaaaaacatccgggttgtcgtcatgaataatatcttgccccgcgttgtcaaaatgcacctgaaatttgacctgaagggttcaacatacaagaggcgggctagtaaaaaagagaaagaaaagtcctttccaacgtataaagaccttgattttatgcaagatatgccagaaggactactcctagatgcggacactttctccgccctcgtcaaaaccctacagagggactgccttgtgctcgaaagcttcaaaatcatggactactcccttctcctcggggtccacaatatcgatcagcacgagcgggagcgacaggcccagggagcgcagagcacttctgatgaaaaacgacctgtcgggcagaaggctctgtatagtacagctatggaaagtatccagggtggggccgcccgtggcgaggccatcgaaagcgatgatacaatgggcggaatccctgcagtgaacggccgcggagaacggctcctgcttcatattggaataattgacatccttcagagttatcgatttattaagaaactcgaacacacgtggaaagcattggttcatgacggagacaccgtgtctgtccaccgccctagcttttatgccgagagatttttcaaattcatgtcaaacaccgtgtttagaaagaattcttccctgaaatcgagcccctccaagaaaggcagagggggggccctgttggccgtcaaaccactgggacctactgccgcctttagtgcctcacagataccgagcgaacgagaagaggcccagtatgacttaagaggagctcggtcttacccaaccctggaagacgagggcaggccagacctgttgccatgcaccccaccgtcatttgaggaggccacgaccgcgtcaatcgctactacactctcgtcaacgtcactgagcattcccgagagatcccccagtgagacttctgagcagccgcgataccgacggagaactcagagctcaggccaggatggacgcccacaggaagagcccccagcggaggaagacctgcagcagattacggtgcaagtggagcctgcctgctctgtcgagatcgtggtgcctaaggaagaagacgcgggcgttgaggcctcccctgcaggggccagcgccgcggtggaagtggagaccgcctcccaggcatctgatgaggaaggagcacctgcaagccaagcatcagatgaggaagacgcccctgcaacagatatatatttctggcgcctgtgggggcctcacgcacctacctggccttggcggcgggaaggccgggcggcatgtttatgcccatatcccccccatgtggtcacaccgtttccggggacgggcttatgcgcctcttggagcccagacgggacgggcggattaggggcaatgagctgttgtgtctccgtatcctag

SEQ ID NO: 320415 - DNA, 2103 bp, Artificial Sequence
  derived and/or modified sequence
atggagctggaggtgcctgatgaagctgagagcgctgaggccggggctgtgcccagcgaggccgcctgggccgctgagagcggggctgctgctggcctggcccagaagaaggccgcccccacagaggtgctgtccatgacagcccagcccggccctggccacggcaagaagctgggccaccggggcgtggatgccagcggggagaccacctacaagaagaccaccagcagcaccctgaagggggccatccagctgggcatcggctacacagtgggccacctgagcagcaagccagagagagatgtgctgatgcaggacttctacgtggtggagagcatcttcttccccagcgagggcagcaacctgaccccagcccaccacttccaggacttccgcttcaagacctacgcccctgtggccttccgctacttccgggagctgtttggcatccggccagatgactacctgtacagcctgtgcaatgagcccctgattgagctgagcaaccctggggccagcggcagcctcttctacgtgaccagtgatgatgagttcatcatcaagacagtgatgcacaaggaggccgagttcctgcagaagctgctgcccggctactacatgaacctgaaccagaaccccaggaccctgctgcccaagttctacggcctgtactgtgtgcagagcggcggcaagaacatccgggtggtggtgatgaacaacatcctgccccgggtggtgaagatgcacctgaagtttgacctgaagggcagcacctacaagagaagagccagcaagaaggagaaggagaagagcttccccacctacaaggacctggacttcatgcaggacatgcctgagggcctgctgctggatgctgacaccttcagcgccctggtgaagaccctgcagagggactgcctggtgctggagagcttcaagatcatggactacagcctgctgctgggcgtgcacaacatcgaccagcacgagcgggagcggcaggcccagggcgcccagagcaccagtgatgagaagaggcctgtgggccagaaggccctgtacagcacagccatggagagcatccagggcggggccgcccggggggaggccattgaaagtgatgacaccatgggcggcatcccagctgtgaatggccgcggggagcggctgctgctgcacatcggcatcatcgacatcctgcagagctaccgcttcatcaagaagctggagcacacctggaaggccctggtgcatgatggagacacagtgtctgtgcaccggcccagcttctacgccgagcgcttcttcaagttcatgagcaacacagtgttcaggaagaacagcagcctgaagagcagccccagcaagaagggccggggcggggccctgctggccgtgaagcccctgggccccacagctgccttcagcgccagccagatccccagcgagcgggaggaggcccagtatgacctgcggggggcccggagctaccccaccctggaggatgagggccgcccagacctgctgccctgcaccccacccagctttgaggaggccaccacagccagcatcgccaccaccctgagcagcaccagcctgagcatccctgagaggagccccagcgagaccagcgagcagccccgctacagaagaaggacccagagcagcggccaggacggccggccccaggaggagcccccagctgaggaggacctgcagcagatcaccgtgcaggtggagcccgcctgcagcgtggagatcgtggtgcccaaggaggaggatgctggggtggaggccagccctgctggggccagcgctgctgtggaggtggagacagccagccaggccagtgatgaggagggcgccccagccagccaggccagtgatgaagaagatgccccagccacagacatctacttctggaggctgtggggcccccacgcccccacctggccctggaggcgggagggccgggccgcctgcctgtgcccctacccaccccacgtggtgacccccttccctggcaccggcctgtgtgcctcctggagcccagatggcactggaggcctgggcgccatgagctgctgcgtgtctgtgtcctag

SEQ ID NO: 320416 - DNA, 2103 bp, Artificial Sequence
  derived and/or modified sequence
atggagctggaggtgcccgacgaggccgagagcgccgaggccggcgccgtgccttccgaggccgcttgggcagcggagagtggcgccgcggctgggttggcacagaaaaaagctgctccaacagaggtgttgagcatgacagcgcagcctggccctggccatggtaagaagctgggccaccgaggagttgacgcatccggcgagacaacctacaagaagacaacctcatcaaccttgaaaggtgcaatccagctgggtatcggctacactgtgggacatctctcgtccaagcctgagagggatgtcttgatgcaggacttctacgtggtggagtcaatcttcttccccagcgaagggagcaatttaacccctgcccaccacttccaggatttcaggtttaaaacctacgcacctgtggcatttcggtacttcagagagctgttcggaattcggccagatgattacctgtacagcctgtgcaatgaaccgcttatagagctgtcaaaccctggcgctagcgggagcttgttttatgtgacctctgatgacgaattcatcatcaagacagtgatgcacaaggaagccgagttccttcagaaactgttaccaggctattacatgaacttgaatcaaaatccacgcacccttttgcccaaattctatggactttactgtgtacaatctggggggaagaatataagggtggtggtaatgaataatatactgcctcgggtcgtgaagatgcatctaaagttcgatcttaagggcagcacatataagcgccgggccagcaagaaagagaaagagaagtctttccctacttacaaagatcttgactttatgcaggatatgcccgaagggctcctgcttgatgctgatacgttctctgcgctagtgaaaacccttcagagagattgtcttgtactggagtctttcaaaattatggactacagcttattgctgggcgtacataatatagatcagcacgagagggagaggcaggcacagggcgcacaatccactagcgatgagaagcggcctgtgggtcaaaaggccctatactctacagcgatggagtctatacaggggggcgcggccagaggcgaagcaatcgaaagcgacgatactatggggggaatccccgccgttaatggcagaggcgaacgccttcttttgcacattggcataatcgatatcttgcaaagctaccggttcatcaaaaagctggagcacacctggaaggccctggtgcacgatggggacacagtgtctgtacaccgtccgagcttttatgccgaacgcttcttcaaattcatgtctaataccgtgttccgcaaaaacagttcccttaagtcatctcccagtaagaaaggtcggggcggggcactcctggctgttaagcccttaggtcccactgccgccttttccgcctcccaaatcccgtccgaaagagaggaggcccagtatgacttaaggggggctagatcctatcctacattggaggacgaaggccgacctgaccttctgccctgcacgcctccgtctttcgaagaagctactacggctagtatcgcgacaacccttagttccacaagcctctccataccggagcgctctccttctgaaacgtctgaacagcctagatacaggcgacggacccaatcttccgggcaggacggcagacctcaggaggaacccccggccgaggaagacctgcagcagattacggtacaggtcgaaccagcttgctctgtcgaaattgtcgtccccaaggaggaagacgcaggcgtggaagcctctcctgccggggcctcagcggccgtcgaagttgaaacagcttctcaagcctcagatgaggaaggagccccggcaagccaagctagtgatgaagaggacgcccctgctacagacatttacttttggcggctgtggggaccacacgctcccacgtggccctggcgccgggagggccgtgccgcctgtctgtgtccttatccacctcacgtcgtcacaccgttcccgggaacaggactgtgtgcctcatggagcccagacggtaccggcggcctcggagcaatgtcgtgctgcgtcagtgtaagctag

SEQ ID NO: 320417 - DNA, 3326 bp, Artificial Sequence
  derived and/or modified sequence
atggagctggaggtaccggacgaggcggagagcgctgaggcgggggccgtgccctcggaggcggcgtgggcggcagagagcggggcggcggcaggtttggctcagaagaaggcggccccaacagaggttctgtccatgacggcacagccgggccctggccatgggaagaagttgggccatcgaggtgtggacgcatccggcgaaaccacctacaagaagaccacctcctccaccctgaagggtgccatccagctgggcatcggctacaccgtgggccacctgagctccaagcccgaacgcgacgtgctcatgcaggacttctacgtggtggagagcatcttcttccccagcgaaggcagcaacctcacccccgcccaccacttccaggacttccgcttcaagacctatgcacctgtcgccttccgctacttccgggagctctttgggatccggccagatgattacttgtactccctgtgcaatgagccgctgatcgagctgtccaacccgggcgccagtggctccctcttctacgtcaccagcgacgacgagttcatcatcaagaccgtcatgcacaaggaggccgagttcctgcagaagctgctccctggctactacatgaacctcaaccagaacccgcggacgctgctgcccaagttctatgggctgtactgcgtgcagtcggggggcaagaacatccgcgtcgtggtcatgaacaacatcctgccccgcgtggtcaagatgcacctcaagttcgacctcaagggctccacctacaagcggcgcgccagcaagaaggagaaggagaagagcttccccacctacaaggacctggacttcatgcaggacatgcccgaggggctcctgctggacgccgacaccttcagcgccctggtcaagacgctgcagcgggactgcctggtcctggaaagtttcaagatcatggactacagcctgctgctgggcgtgcacaacatcgaccagcacgagcgcgagcggcaggcgcagggcgcccagagcacctcagatgagaagcggcctgtgggccagaaggcgctctactccacggccatggagtccatccagggtggcgccgcgcgcggggaggccatcgaatcggatgacacgatgggcgggatccccgctgtgaacggccgcggggagcggctgctgctgcacattggcatcatcgacatcctgcagtcctacaggttcatcaagaaactggagcacacctggaaggccctcgtccacgatggggacacggtgtccgtccaccgccccagcttctatgccgagcgctttttcaagttcatgagcaacacggtctttcggaagaactcctccctgaagtcctcgccctccaagaaggggcgcggcggagccttgctagctgtgaaaccgctggggcccaccgctgccttctcggccagccagatccctagcgagcgggaggaggcccagtacgacctgcggggggcccgcagctaccccacgctggaggacgaaggccggcccgacctcctgccctgcacgccaccttctttcgaagaagccactacagcctccattgccacgactctgtcatccacatccctctccattcctgagcggtccccctcggagacgtcggagcagccgcggtacaggcggcgcacacagtcgtctggacaggatggcaggccgcaggaggagccacccgcggaagaggatctgcagcagattacagtgcaggtggagcctgcgtgcagcgtggagattgtggtccccaaagaggaggacgcaggggtggaggcttccccggccggtgcctctgctgctgttgaagtagaaactgccagccaggcctcagacgaggagggcgcacctgccagccaggcctcggacgaggaggacgcgcccgccaccgacatctacttttggcgcctctggggtccccatgcacccacctggccctggagaagggagggacgggccgcgtgcctgtgcccctacccaccgcacgtcgtcaccccttttcctgggactggtttgtgcgcgtcctggtctccggatggtacggggggcctgggggccatgtcgtgctgtgtgtctgtgtcctgatgccctgccaggtgggcagcagagaagggagaagggtcctcggtcctgcccctgccccggcaccccccaccttctgcttggcagtcagctgtccccacctgctccccgccacctccctccgcctctcccacccgaccacgggggtggccgcctcatccgctgtcctctgttttccttcctcctccggcccacccggcccgccccgtccagttcacggatgggaggtactggatttactctccccgccatcgccgactgcgggccgtgacgctgagcgcctcggggactgtaagtgaccgcagccggccaccctggggagaaggggcagtgcccctcgggcagcagggagccgcaggtccccggccggaagctcagtgtctgacgtcagttgttttccagaagggctttgggtaaatcacggctgcaattgaggtcagccacgctggccccggaccaggcgctgggctgcatgcgtcactgggaatgtcattcggtcccacgtcgaaccgggcgctccatagggcagcaccatcaccaggtgcacagctgaggcccagggtctgcttcggaccccggccagaccccagcgagcccctctctgcccctggacccagccctctcgtgtcagggtgtcttgggtggacgcttctcactcgtgcagacctggctgcccgtggccccgctggctgcacaggggaggttgcacaggtcagcagagtggctgcagggccgggctctgaaccgcagggccatggagacggggaggagatggtctctccacacccacctcacagatggaggcgctgaggcctcggctcccctgggagcctgggagaccacacggtttagtcaaaatccagatccccaagctctcaaggaggtccccctgggacgccacatgggccccacgtagctgtgagatcctcagggcctgctgttgtcattatgaccaataagcaaggggcccagagagcctaagagacctgcccagcaccgcacagccagaacggggcgcagacccaaagcaggagtgtcccctcgagacaaagcctccgccgaggccgccgtgactccccgcccatcagcaaacctctccgagcacctctgtgtgccaggcactgtggagtgaccccaagaggtggagaccacttccccggctgctctaggcagctccgtcccacggagccagcgggaagccagccaccgcgaagccgtgccccgga

SEQ ID NO: 320418 - DNA, 2289 bp, Artificial Sequence
  derived and/or modified sequence
ggcgcttgttgttcggcggcggcggtcgcagctcgggtccccctcgggcgcccccgccgccgtccgcgcgcggccatggagctggaggtaccggacgaggcggagagcgctgaggcgggggccgtgccctcggaggcggcgtgggcggcagagagcggggcggcggcaggtttggctcagaagaaggcggccccaacagaggttctgtccatgacggcacagccgggccctggccatgggaagaagttgggccatcgaggtgtggacgcatccggcgaaaccacctacaagaagaccacctcctccaccctgaagggtgccatccagctgggcatcggctacaccgtgggccacctgagctccaagcccgaacgcgacgtgctcatgcaggacttctacgtggtggagagcatcttcttccccagcgaaggcagcaacctcacccccgcccaccacttccaggacttccgcttcaagacctatgcacctgtcgccttccgctacttccgggagctctttgggatccggccagatgattacttgtactccctgtgcaatgagccgctgatcgagctgtccaacccgggcgccagtggctccctcttctacgtcaccagcgacgacgagttcatcatcaagaccgtcatgcacaaggaggccgagttcctgcagaagctgctccctggctactacatgaacctcaaccagaacccgcggacgctgctgcccaagttctatgggctgtactgcgtgcagtcggggggcaagaacatccgcgtcgtggtcatgaacaacatcctgccccgcgtggtcaagatgcacctcaagttcgacctcaagggctccacctacaagcggcgcgccagcaagaaggagaaggagaagagcttccccacctacaaggacctggacttcatgcaggacatgcccgaggggctcctgctggacgccgacaccttcagcgccctggtcaagacgctgcagcgggactgcctggtcctggaaagtttcaagatcatggactacagcctgctgctgggcgtgcacaacatcgaccagcacgagcgcgagcggcaggcgcagggcgcccagagcacctcagatgagaagcggcctgtgggccagaaggcgctctactccacggccatggagtccatccagggtggcgccgcgcgcggggaggccatcgaatcggatgacacgatgggcgggatccccgctgtgaacggccgcggggagcggctgctgctgcacattggcatcatcgacatcctgcagtcctacaggttcatcaagaaactggagcacacctggaaggccctcgtccacgatggggacacggtgtccgtccaccgccccagcttctatgccgagcgctttttcaagttcatgagcaacacggtctttcggaagaactcctccctgaagtcctcgccctccaagaaggggcgcggcggagccttgctagctgtgaaaccgctggggcccaccgctgccttctcggccagccagatccctagcgagcgggaggaggcccagtacgacctgcggggggcccgcagctaccccacgctggaggacgaaggccggcccgacctcctgccctgcacgccaccttctttcgaagaagccactacagcctccattgccacgactctgtcatccacatccctctccattcctgagcggtccccctcggagacgtcggagcagccgcggtacaggcggcgcacacagtcgtctggacaggatggcaggccgcaggaggagccacccgcggaagaggatctgcagcagattacagtgcaggtggagcctgcgtgcagcgtggagattgtggtccccaaagaggaggacgcaggggtggaggcttccccggccggtgcctctgctgctgttgaagtagaaactgccagccaggcctcagacgaggagggcgcacctgccagccaggcctcggacgaggaggacgcgcccgccaccgacatctacttttaatttctatgcagcccccgacccagagccgagctccacttctgctccggctgcccccgaaggcgctgcccaccccgctgaggcccagagctcgggagatgcccgcctcgccgccccaccggacctcgtcctccccctgcacggatgccgacggccgggcccctccccgacaagcctcccagggccccggcaccccggtcggcagcctgcccctgtgagacccaccctcccgagcggccaatcgcatttgagtccttatttggcacagagacggaagcacgtgtgtgccgtttt

SEQ ID NO: 320419 - DNA, 2103 bp, Artificial Sequence
  derived and/or modified sequence
atggagttggaagtacctgatgaagcagaatcagccgaggccggagcagtcccctcagaggcggcttgggctgctgaaagtggggcagcggcaggcctggcccagaagaaggccgctcctaccgaggtgttgtctatgactgcccagcctgggccagggcacggtaagaaacttggccatcgcggagtcgatgccagcggggaaaccacatataagaagaccacatccagtactctgaagggggctattcaactgggaattggctatactgtgggccatctctcctctaagccggagagagacgtgctgatgcaagacttctatgtggtggagtctatttttttcccgagtgagggaagcaatcttacccccgctcaccacttccaagattttcgattcaagacatacgcccctgtagccttccgctacttccgagagttgtttgggattaggcctgatgactacctctattctctgtgcaatgagccattaatcgaactgtcgaaccccggagctagtggcagtctgttttacgtcacatccgacgatgagtttataattaagacagtgatgcataaggaggctgagtttcttcagaagctcttgcccggatattatatgaatctgaatcagaaccccagaacactgctacctaagttttacggtctctactgcgtacaatctggaggcaaaaacatacgggtggtcgttatgaataacatcttgccacgggtagtcaaaatgcatctgaagttcgatcttaaaggtagcacttataagcggagagctagtaagaaagaaaaagaaaagtcatttccaacctataaggacctcgacttcatgcaggatatgcccgaagggctgctactggacgctgataccttcagcgcacttgtgaagaccttacagcgggattgcttggtgctggagagttttaagatcatggactactccctccttctgggtgtgcataacattgaccagcatgaacgggaacggcaggcacagggggcacagtccacatccgacgaaaaaaggccggtggggcaaaaggccctgtactccacagccatggaatccattcagggtggcgcagccaggggagaagcaatcgagagcgatgatacaatgggtgggatccctgcagtgaacgggaggggagaacgcctgttgctgcacatcggaattatagacattctacagtcgtaccgttttattaagaagctggaacatacctggaaggcactcgtccatgacggcgatactgtgagtgtgcacagaccaagcttttacgccgagcgattttttaaatttatgagtaacaccgtgtttagaaaaaactcttccctcaaatcatctccgtctaagaaggggcgaggaggtgcccttctggccgttaaacctttgggcccaaccgccgcttttagtgcttcccagattccttctgaacgcgaggaagctcagtatgaccttaggggagcacgatcataccccaccctcgaagacgaaggcaggcccgatttattgccgtgcacgccaccaagcttcgaggaggctacaacagcatcaattgccactactttgtctagcacttcactttcaatcccggagaggtctccctctgaaactagcgagcagccccgttaccggagaaggacccagtcatcgggtcaggatggcaggcctcaagaagaaccacctgctgaggaagacctgcagcagataacagtgcaggtggagcccgcttgtagcgtcgaaattgttgtacctaaggaggaggatgccggagtcgaggcctccccagcaggcgcatccgcagctgtggaggtggagactgcttcacaggccagtgacgaagagggggcaccggctagccaggcgtccgatgaggaagacgccccagcaacagacatttacttctggcgcctctggggaccgcatgcaccgacttggccatggagaagggaggggagggcagcttgtctgtgcccatatccgcctcatgtggtgactcccttccctggaaccggtctctgtgcctcttggtcaccagacggaacaggtggactgggggctatgtcctgctgtgtgagcgtgagctag

SEQ ID NO: 320420 - DNA, 2103 bp, Artificial Sequence
  derived and/or modified sequence
atggagctggaggtgcccgacgaggccgagagcgccgaggccggcgccgtgcccagcgaggccgcctgggccgccgagagcggcgccgccgccggcctggcccagaagaaggccgcccccaccgaggtgctgagcatgaccgcccagcccggccccggccacggcaagaagctgggccacagaggcgtggacgccagcggcgagaccacctacaagaagaccaccagcagcaccctgaagggcgccatccagctgggcatcggctacaccgtgggccacctgagcagcaagcccgagagagacgtgctgatgcaggacttctacgtggtggagagcatcttcttccccagcgagggcagcaacctgacccccgcccaccacttccaggacttcagattcaagacctacgcccccgtggccttcagatacttcagagagctgttcggcatcagacccgacgactacctgtacagcctgtgcaacgagcccctgatcgagctgagcaaccccggcgccagcggcagcctgttctacgtgaccagcgacgacgagttcatcatcaagaccgtgatgcacaaggaggccgagttcctgcagaagctgctgcccggctactacatgaacctgaaccagaaccccagaaccctgctgcccaagttctacggcctgtactgcgtgcagagcggcggcaagaacatcagagtggtggtgatgaacaacatcctgcccagagtggtgaagatgcacctgaagttcgacctgaagggcagcacctacaagagaagagccagcaagaaggagaaggagaagagcttccccacctacaaggacctggacttcatgcaggacatgcccgagggcctgctgctggacgccgacaccttcagcgccctggtgaagaccctgcagagagactgcctggtgctggagagcttcaagatcatggactacagcctgctgctgggcgtgcacaacatcgaccagcacgagagagagagacaggcccagggcgcccagagcaccagcgacgagaagagacccgtgggccagaaggccctgtacagcaccgccatggagagcatccagggcggcgccgccagaggcgaggccatcgagagcgacgacaccatgggcggcatccccgccgtgaacggcagaggcgagagactgctgctgcacatcggcatcatcgacatcctgcagagctacagattcatcaagaagctggagcacacctggaaggccctggtgcacgacggcgacaccgtgagcgtgcacagacccagcttctacgccgagagattcttcaagttcatgagcaacaccgtgttcagaaagaacagcagcctgaagagcagccccagcaagaagggcagaggcggcgccctgctggccgtgaagcccctgggccccaccgccgccttcagcgccagccagatccccagcgagagagaggaggcccagtacgacctgagaggcgccagaagctaccccaccctggaggacgagggcagacccgacctgctgccctgcaccccccccagcttcgaggaggccaccaccgccagcatcgccaccaccctgagcagcaccagcctgagcatccccgagagaagccccagcgagaccagcgagcagcccagatacagaagaagaacccagagcagcggccaggacggcagaccccaggaggagccccccgccgaggaggacctgcagcagatcaccgtgcaggtggagcccgcctgcagcgtggagatcgtggtgcccaaggaggaggacgccggcgtggaggccagccccgccggcgccagcgccgccgtggaggtggagaccgccagccaggccagcgacgaggagggcgcccccgccagccaggccagcgacgaggaggacgcccccgccaccgacatctacttctggagactgtggggcccccacgcccccacctggccctggagaagagagggcagagccgcctgcctgtgcccctaccccccccacgtggtgacccccttccccggcaccggcctgtgcgccagctggagccccgacggcaccggcggcctgggcgccatgagctgctgcgtgagcgtgagctag

SEQ ID NO: 320421 - protein, 1362 aa, Artificial Sequence
  derived and/or modified sequence
MSAESGPGTRLRNLPVMGDGLETSQMSTTQAQAQPQPANAASTNPPPPETSNPNKPKRQTNQLQYLLRVVLKTLWKHQFAWPFQQPVDAVKLNLPDYYKIIKTPMDMGTIKKRLENNYYWNAQECIQDFNTMFTNCYIYNKPGDDIVLMAEALEKLFLQKINELPTEETEIMIVQAKGRGRGRKETGTAKPGVSTVPNTTQASTPPQTQTPQPNPPPVQATPHPFPAVTPDLIVQTPVMTVVPPQPLQTPPPVPPQPQPPPAPAPQPVQSHPPIIAATPQPVKTKKGVKRKADTTTPTTIDPIHEPPSLPPEPKTTKLGQRRESSRPVKPPKKDVPDSQQHPAPEKSSKVSEQLKCCSGILKEMFAKKHAAYAWPFYKPVDVEALGLHDYCDIIKHPMDMSTIKSKLEAREYRDAQEFGADVRLMFSNCYKYNPPDHEVVAMARKLQDVFEMRFAKMPDEPEEPVVAVSSPAVPPPTKVVAPPSSSDSSSDSSSDSDSSTDDSEEERAQRLAELQEQLKAVHEQLAALSQPQQNKPKKKEKDKKEKKKEKHKRKEEVEENKKSKAKEPPPKKTKKNNSSNSNVSKKEPAPMKSKPPPTYESEEEDKCKPMSYEEKRQLSLDINKLPGEKLGRVVHIIQSREPSLKNSNPDEIEIDFETLKPSTLRELERYVTSCLRKKRKPQAEKVDVIAGSSKMKGFSSSESESSSESSSSDSEDSETEMAPKSKKKGHPGREQKKHHHHHHQQMQQAPAPVPQQPPPPPQQPPPPPPPQQQQQPPPPPPPPSMPQQAAPAMKSSPPPFIATQVPVLEPQLPGSVFDPIGHFTQPILHLPQPELPPHLPQPPEHSTPPHLNQHAVVSPPALHNALPQQPSRPSNRAAALPPKPARPPAVSPALTQTPLLPQPPMAQPPQVLLEDEEPPAPPLTSMQMQLYLQQLQKVQPPTPLLPSVKVQSQPPPPLPPPPHPSVQQQLQQQPPPPPPPQPQPPPQQQHQPPPRPVHLQPMQFSTHIQQPPPPQGQQPPHPPPGQQPPPPQPAKPQQVIQHHHSPRHHKSDPYSTGHLREAPSPLMIHSPQMSQFQSLTHQSPPQQNVQPKKQELRAASVVQPQPLVVVKEEKIHSPIIRSEPFSPSLRPEPPKHPESIKAPVHLPQRPEMKPVDVGRPVIRPPEQNAPPPGAPDKDKQKQEPKTPVAPKKDLKIKNMGSWASLVQKHPTTPSSTAKSSSDSFEQFRRAAREKEEREKALKAQAEHAEKEKERLRQERMRSREDEDALEQARRAHEEARRRQEQQQQQRQEQQQQQQQQAAAVAAAATPQAQSSQPQSMLDQQRELARKREQERRRREAMAATIDMNFQSDLLSIFEENLF

SEQ ID NO: 320422 - DNA, 504 bp, Artificial Sequence
  derived and/or modified sequence
atggagctgagcagcatgaagatctgcgccgccatccccaccagcagagccctgcccgaggtggtgagaagaatgcccagaaagagaatcagcggcctggagtggctgctgcagcaggaccccggcttcagcctggtgaacaccgtgaaggccggcatgatcatcagcttccccagcaacaacatctacagcagcgtgtgctgctgccagagcgagatcttcaagtacgagttcagcaacagcaagaagagcagctggatccaggaggagagacacctgggcaagaacaacgtgctgtacagcgcccacgacgtgagccccgagaaggtgaccagcgccctgaagaagaccaacaagcagaccaccaccatcaacaacttccccctgcagtacctgcccggcagcaagctgctggacagattcctgagcctgagcagaagcctgctgtgcctgaacagctggagcagcagcctgcccctggccccccaggtgaagaagaagtag

SEQ ID NO: 320423 - DNA, 423 bp, Artificial Sequence
  derived and/or modified sequence
atggactgcaagagccccaagcgggccaacatctgcccccacctgcctgggggaggtctgttctctactccaccctcccaggccgcatggcgaaccctcttaaccgcactctgttttcctggccctacgtgcacaggccccatgagggagggcccgagagccgtctacaacccgccccgcgcccaccgaaatagctctgacaattgtgtcatgaagcacctattgtgtgctggcgacaagaatggaacccggaggcatgccctgccttccccactagagggaagctttcagccaggtaggcagatcccccccccacaaactccctcgaccgacccccaaacattgcccctttcattccgttctctgctgagatgccatcagctctgcgctgccagcctccctccttccttgaagctgccgtag

SEQ ID NO: 320424 - DNA, 4089 bp, Artificial Sequence
  derived and/or modified sequence
atgtctgctgaaagcggacctgggaccagactacggaacctgcctgtgatgggggacggtcttgagacttcccaaatgagcaccacgcaggcgcaagcacagccacagcctgccaacgcagccagcaccaacccccctccgcccgaaacctctaacccaaataaacctaaaagacagacgaaccaactacaatacctccttcgtgttgtgctgaaaactctgtggaaacaccagttcgcctggccattccagcagcccgtggatgctgttaagctcaacctgcctgactactataagattatcaagaccccaatggacatggggaccatcaagaagaggctggagaataactactattggaatgcacaggagtgtatccaggatttcaatacgatgttcacgaattgctacatttataacaaacctggagatgatattgtactaatggccgaagccctagagaagttattcctccagaagatcaacgagctcccaaccgaggagaccgagattatgattgtacaggcaaagggacgaggaagaggcaggaaagagacaggtaccgcgaagcccggagtctcaacagtcccaaacacaacccaagcatcgacaccgcctcagacacaaactccccagcccaatcccccccccgtccaggctacaccacatccgtttcctgctgtgacacctgacctcattgtccagacccccgtcatgactgtcgtgccgccccaaccacttcagactccgcctcccgtacctccccagccccagcccccacccgctccggctcctcagccagttcaatcccatccccccattattgctgctacacctcagcctgttaaaaccaaaaaaggagtaaagcggaaagctgacaccaccacgccgaccacaatcgatcctatccatgagcctccttccttacctccagagcctaagaccaccaaacttgggcaacgtcgagaatcgtcccggcctgtcaagccgccgaagaaagacgtgcccgatagccagcagcatccggccccagaaaaatcttccaaggtgtccgagcagctgaagtgttgttcggggatcctgaaagaaatgttcgcaaaaaaacacgctgcctatgcatggcccttctacaagcctgttgatgttgaagctctgggcctgcatgactattgtgatatcatcaagcacccgatggatatgtctactattaagtcaaaactcgaagcgcgggagtatcgggacgcccaggagtttggggccgatgtgcgcttgatgttcagcaactgctacaaatacaacccccccgaccatgaagttgtggccatggcgaggaaactgcaagatgtgtttgagatgcgctttgccaagatgcccgacgaaccagaggagccagtagtcgcagttagctcacccgccgttccaccaccaaccaaggttgtggctcccccaagcagcagtgattcatcgtcagattccagttcggacagcgacagtagcactgacgactccgaggaggaaagagcacagaggctggcagagctccaggaacaacttaaggctgtccacgagcaattggccgctctgagccagccacaacagaacaagcctaagaagaaggaaaaggacaaaaaggagaaaaaaaaggagaagcataagagaaaggaagaagtggaggaaaacaagaagtcaaaagccaaggaaccgcctccaaagaagaccaagaaaaataattctagcaattcaaacgtgtcgaagaaggagccagcaccgatgaaaagcaaacctccacctacgtatgagagcgaagaagaggataaatgcaagcctatgtcctacgaagaaaagagacagctctcgctggatatcaataaactgccaggtgagaagcttggccgtgtggtgcacatcatccagagcagggaaccctccctgaaaaactccaaccctgacgagatcgaaatcgactttgaaactctgaagccctctactttgcgcgagctggaacgttatgtgaccagctgcctgagaaagaagagaaaacctcaggccgagaaggtggatgttattgctggaagctctaagatgaagggcttttcatccagtgagtctgagtcctccagcgaatcttccagctcggactcagaagacagcgagactgagatggcgcccaaatctaagaaaaagggacaccccggacgggagcaaaaaaaacaccaccaccaccaccatcagcaaatgcagcaggcccctgccccggttccacagcaacctccccctccaccacagcaacccccgcccccgccccctccacagcaacagcaacagcccccgcctccacctccgccaccttcaatgccacagcaggccgcccctgctatgaaatcctcccccccgcccttcattgccacgcaggtccctgtgttggagccccagctgcccgggtccgtgttcgatcccatcggccacttcacccagcccatactgcatctccctcaacccgaactccccccccatcttccccagccccccgagcacagcacccctccccacctgaatcagcacgcagtggtgtccccccctgcgctgcataatgcgctcccacaacagcccagccggcctagcaacagagctgcagctctccctcccaaacctgctcgtccccccgcagtgagcccagccctaacccaaacacctctgttaccccagcctcccatggcacagccgccacaagtactgctggaggacgaggagcctcccgcccctccgctcacatcgatgcagatgcagctgtacctacaacaactgcagaaggtgcaacccccaacgcccctcttgccttccgttaaggtgcagagtcaaccccctcctccacttccaccacccccacatcccagtgttcaacagcagctgcagcaacagccgcctccgcctccacctcctcagccacagccacccccccagcagcagcatcagccccctcctcgccctgtgcacctccaacctatgcagttttccacccatatccagcagccccctccaccccaaggtcagcaaccaccccacccgccacccggacagcagccaccccctccacaacccgcaaaaccccagcaggtcattcagcaccaccactcacctcgtcaccacaaaagcgacccttattccactggacacctcagagaagcacccagccccctgatgattcacagtccccagatgtctcaattccaaagtttaacccatcagtccccaccccagcagaatgtccagcccaaaaaacaggaacttcgcgccgctagtgttgtgcagccccagccgcttgtggtagtaaaggaagagaaaatccacagtcccatcattagaagcgagccattctccccctctctccgcccggaacctcctaagcaccctgaatcaatcaaggctcctgttcatctcccccagcggcctgaaatgaagccggtcgatgtggggcggccagtcattaggcctcctgagcaaaatgcgccacctcccggcgcgcctgataaggacaaacaaaaacaggagcccaagacacccgtcgctccgaagaaggatctcaagatcaagaatatgggctcgtgggcttctctggtgcagaagcaccctacaacaccctcgagcacagccaaaagcagttcggactcttttgagcagtttagaagagctgcccgcgagaaggaagagcgcgagaaggcgctgaaggcccaagctgagcacgccgagaaagagaaagagcgtctgagacaggagcgcatgagaagccgagaagatgaggacgccctggaacaggctagacgcgcacatgaggaggcaaggcggcggcaggaacagcaacagcaacaacgtcaggagcaacagcagcagcagcagcagcaggctgctgccgtcgcagctgccgcgacaccccaggcccagtcttcgcaaccacagagcatgctggatcagcaaagggaactcgctagaaaaagagagcaagagcgacgtagaagggaggccatggccgctaccatagacatgaatttccagagtgaccttctcagcattttcgaagaaaatctgttctag

SEQ ID NO: 320425 - DNA, 4089 bp, Artificial Sequence
  derived and/or modified sequence
atgtctgctgagagcggccctggcacccggctgaggaacctgcctgtgatgggagatggcctggagaccagccagatgagcaccacccaggcccaggcccagccccagcctgccaatgctgccagcaccaaccccccacctcctgagaccagcaaccccaacaagcccaagaggcagaccaaccagctgcagtacctgctgcgggtggtgctgaagaccctgtggaagcaccagtttgcctggcccttccagcagcctgtggatgctgtgaagctgaacctgcctgactactacaagatcatcaagacccccatggacatgggcaccatcaagaagaggctggagaacaactactactggaatgcccaggagtgcatccaggacttcaacaccatgttcaccaactgctacatctacaacaagccaggagatgacatcgtgctgatggccgaggccctggagaagctgttcctgcagaagatcaatgagctgcccacagaggagacagagatcatgattgtgcaggccaagggccggggccggggcaggaaggagaccggcacagccaagccaggagtgtccacagtgcccaacaccacccaggccagcaccccaccccagacccagaccccccagcccaaccccccacctgtgcaggccaccccccaccccttccctgctgtgaccccagacctgattgtgcagacccctgtgatgacagtggtgcccccccagcccctgcagaccccacctcctgtgcccccccagccccagcccccaccagccccagccccccagcctgtgcagagccacccccccatcatcgccgccaccccccagcctgtgaagaccaagaagggcgtgaagaggaaggctgacaccaccacccccaccaccatcgaccccatccacgagccccccagcctgcccccagagcccaagaccaccaagctgggccagaggcgggagagcagcaggcctgtgaagccacccaagaaggatgtgcctgacagccagcagcacccagcccctgagaagagcagcaaggtgtctgagcagctgaagtgctgcagcggcatcctgaaggagatgtttgccaagaagcacgccgcctatgcctggcccttctacaagcctgtggatgtggaggccctgggcctgcatgactactgtgacatcatcaagcaccccatggacatgagcaccatcaagagcaagctggaggcccgggagtacagagatgcccaggagtttggagcagatgtgcggctgatgttcagcaactgctacaagtacaaccccccagaccacgaggtggtggccatggccaggaagctgcaggatgtgtttgagatgagatttgccaagatgccagatgagcctgaggagcctgtggtggccgtgagcagccctgctgtgcccccacccaccaaggtggtggccccacccagcagcagtgacagcagcagtgacagcagcagtgacagcgacagcagcacagatgattctgaggaggagcgggcccagaggctggccgagctgcaggagcagctgaaggctgtgcatgagcagctggccgccctgagccagccccagcagaacaagcccaagaagaaggagaaggacaagaaggagaagaagaaggagaagcacaagaggaaggaggaggtggaggagaacaagaagagcaaggccaaggagcccccacccaagaagaccaagaagaacaacagcagcaacagcaatgtgtccaagaaggagcccgcccccatgaagagcaagcccccacccacctatgaaagtgaggaggaggacaagtgcaagcccatgtcctatgaggagaagaggcagctgagcctggacatcaacaagctgcccggggagaagctgggccgggtggtgcacatcatccagagccgggagcccagcctgaagaacagcaacccagatgaaattgaaattgactttgagaccctgaagcccagcaccctgcgggagctggagcgctacgtgaccagctgcctgaggaagaagaggaagccccaggccgagaaggtggatgtgattgctggcagcagcaagatgaagggcttcagcagcagcgagagcgagagcagcagcgagagcagcagcagtgacagtgaagattctgaaacagagatggcccccaagagcaagaagaagggccaccctggccgggagcagaagaagcaccaccaccaccaccaccagcagatgcagcaggccccagcccctgtgccccagcagcccccacctccaccccagcagcccccacctcctcctccaccccagcagcagcagcagcccccacctcctcctcctccacccagcatgccccagcaggccgccccagccatgaagagcagccccccacccttcatcgccacccaggtgcctgtgctggagccccagctgcccggctctgtgtttgaccccatcggccacttcacccagcccatcctgcacctgccccagcctgagctgcccccccacctgccccagcccccagagcacagcaccccaccccacctgaaccagcacgctgtggtgtccccaccagccctgcacaatgccctgccccagcagcccagccggcccagcaacagagctgctgccctgccccccaagccagcccggcccccagctgtgtccccagccctgacccagacccccctgctgccccagccccccatggcccagcccccccaggtgctgctggaggatgaggagcccccagccccacccctgacctccatgcagatgcagctgtacctgcagcagctgcagaaggtgcagccccccacccccctgctgcccagcgtgaaggtgcagagccagcccccaccacccctgcccccaccaccccaccccagcgtgcagcagcagctgcagcagcagcccccacctcctcctccaccccagccccagcccccaccccagcagcagcaccagcccccacccaggcctgtgcacctgcagcccatgcagttcagcacccacatccagcagcccccaccaccccagggccagcagcccccccaccccccacctggccagcagcccccaccaccccagcctgccaagccccagcaggtgatccagcaccaccacagccccaggcaccacaagagtgacccctacagcacaggccacctgcgggaggcccccagccccctgatgatccacagcccccagatgagccagttccagagcctgacccaccagagccccccccagcagaatgtgcagcccaagaagcaggagctgcgggccgcctctgtggtgcagccccagcccctggtggtggtgaaggaggagaagatccacagccccatcatccgctctgagcccttcagccccagcctgcggcctgagccccccaagcaccctgagagcatcaaggcccctgtgcacctgccccagaggcctgagatgaagcctgtggatgtgggccggcctgtgatccggcccccagagcagaatgcccctcctcctggggccccagacaaggacaagcagaagcaggagcccaagacccctgtggcccccaagaaggacctgaagatcaagaacatgggctcctgggccagcctggtgcagaagcaccccaccacccccagcagcacagccaagagcagcagtgacagctttgagcagttccggcgggccgcccgggagaaggaggagcgggagaaggccctgaaggcccaggccgagcacgccgagaaggagaaggagcggctgcggcaggagaggatgaggagccgggaggatgaagatgccctggagcaggcccggcgggcccacgaggaggcccggcggcggcaggagcagcagcagcagcagaggcaggagcagcagcagcagcagcagcagcaggccgctgctgtggccgctgctgccaccccccaggcccagagcagccagccccagagcatgctggaccagcagcgggagctggccaggaagcgggagcaggagaggagaagaagagaggccatggccgccaccatcgacatgaacttccagagcgacctgctgagcatctttgaagaaaatctcttctag

SEQ ID NO: 320426 - DNA, 4089 bp, Artificial Sequence
  derived and/or modified sequence
atgagcgccgagagcggccccggcacccggctgcggaacctgcccgtgatgggtgacgggctagaaacctcccaaatgtctacgactcaggcgcaggctcagccgcaacccgctaacgccgcttccactaatcccccgccacccgaaaccagtaacccgaacaaacccaaacggcaaactaaccagctgcaatatttactccgcgtggtgctgaagacgctttggaaacaccagttcgcctggccgttccaacagccggtggacgcagtgaaactcaatctgccggactattacaaaatcattaagacccctatggacatggggactatcaagaagagactagagaacaactactattggaacgcccaagagtgtatccaggatttcaacacaatgtttactaactgctatatctacaacaagccaggtgatgacatcgtactgatggctgaggcgctggagaaactttttcttcagaaaattaacgaactcccaacggaggaaactgaaatcatgatcgttcaggccaaggggcgcggacgtggccggaaggagaccggtaccgcgaagccaggagtatccacagtccctaacacgacccaggcatccacccccccacagacccagaccccgcagcccaatccaccaccggtgcaggccacgcctcatccttttcccgctgtcacccccgacttaatcgtccaaacacctgtaatgaccgttgtgcctccccagcccctgcagaccccaccacccgtgccccctcagcctcagcctcccccagcaccggccccccagcctgtccagagccacccgccaatcatcgcggcgaccccccagccagtgaaaacaaagaagggggttaaacgcaaggccgacaccaccacacccacaactatcgatcctattcacgagcccccatcccttccacccgagcctaagacgaccaagctgggacaacggcgcgaatcatcaagacctgttaagccgccgaaaaaggacgtgccggatagtcagcagcaccccgcccccgagaagtcatctaaagtctcagaacagctgaagtgttgttccgggatcttaaaggagatgttcgcaaagaagcacgcggcttacgcctggcccttctacaagcccgtggatgtggaagcactcgggctgcacgactactgcgacattatcaagcatcctatggacatgagcacgatcaagagcaagcttgaagctcgggagtatagggacgcgcaggaatttggcgcagatgttcgactgatgttcagtaattgttataaatacaatcctccagaccacgaggtcgtggctatggcacgtaaacttcaagatgtctttgagatgagattcgcaaagatgcctgatgaacctgaggagccagtcgtcgccgtcagctctcccgccgtgccaccccccacaaaagtcgtcgctccaccttccagcagtgactccagctccgactctagttcagactctgactctagcaccgacgattccgaggaggaaagggcccagaggctggccgagctccaggagcagctgaaggccgttcacgagcagctggcagccctttcccagcctcagcagaacaagcccaagaaaaaagagaaagataagaaggagaagaaaaaagagaaacacaaaagaaaagaagaagtcgaggaaaacaagaagtctaaggcaaaggaaccaccaccaaagaaaactaaaaagaacaactcatcaaactccaacgtctccaaaaaggagcccgctccaatgaagtctaaacccccccccacttacgagagcgaggaagaggataagtgcaaacccatgagctacgaggaaaaaaggcagctgtctcttgatatcaataagcttcccggcgagaaattgggccgagtggtacacatcatccagtctcgtgaacccagcctcaaaaatagcaatccggacgagatcgaaattgactttgagaccctgaagcctagcactctgcgcgagctagagcgctacgtcacctcttgcctgcggaagaagagaaagcctcaggccgagaaggtggacgtgatcgctggctcttcaaaaatgaagggcttctcatcgtccgagtccgagagctctagcgagtcatcaagctctgatagcgaggactccgaaacggaaatggcaccgaaaagcaagaagaaggggcatccggggagggagcagaaaaaacaccatcaccaccaccatcagcagatgcagcaggcacctgcgccagtgccccaacaacctcccccccccccccagcagcccccgcctcctcctccccctcagcagcagcagcagccaccccctcctccccctcctcctagcatgcctcagcaggctgcgcctgcaatgaagtcttctccaccgcccttcattgccacccaggtgcctgttctggagcctcagttacccggctcagttttcgaccccattggccacttcacccagcccatactccatttgccgcagcctgaattgccacctcacttgccacagcctcctgagcactcgacacctccacacttgaatcagcacgctgttgtatctccccctgccttacataacgctttgccccaacagccgagtcgcccaagcaatagagccgctgcgctgcctccaaaaccggcaaggcctcccgcggtatccccagccctgacccagactcccctgctgcctcagccgcccatggctcaaccgcctcaggtcctgctggaagacgaggaaccccccgcgccacctctaacgtccatgcagatgcagctgtaccttcagcagctgcagaaagtgcaaccaccaaccccactcctgccctcagtgaaggttcagtcccagcccccacctccacttccacccccgccacatccatccgtgcagcagcagctgcagcagcaacctcccccccccccaccaccacagccccagcctccccctcagcaacagcatcagcctccgcccagaccggtgcacctacaacccatgcagttttccacgcatatacagcaaccccctcccccccagggacaacagcccccacacccacctcctggccagcagcccccgcctcctcagcccgctaaaccacagcaggttattcagcaccaccattcccctagacatcacaagtccgacccttactctacagggcacctacgggaagcaccgagccccttgatgatccactcaccccaaatgtcccagtttcagagtctaacccaccagtctccccctcagcaaaatgtgcagccaaaaaagcaggagttgcgtgcagcctccgtagtgcagccgcaacccctggtggtcgtgaaggaggagaaaatccacagccccattatcagaagcgagcccttttctccaagcctcaggccagagccccccaagcaccctgaatctattaaggccccagttcacctcccgcagcgtcccgaaatgaaaccagtggacgtgggacggccagtgatccgcccacctgagcaaaatgctcccccacccggtgctccagacaaggataagcaaaaacaggagccaaagacgccagtggctccaaagaaggatctaaagatcaagaatatgggatcctgggcctctttggttcaaaagcacccgactactccgtccagtacagcaaaaagctcatctgactctttcgagcagtttcgtcgtgctgcacgagaaaaagaggagagagagaaggcgctgaaggcacaagccgagcacgctgaaaaagagaaagagcggttgagacaagaaaggatgaggtctcgggaggacgaggacgcccttgagcaagcaaggcgagcccatgaggaggcccgaaggcgtcaagagcagcaacaacagcagagacaggagcagcaacagcaacagcagcaacaggccgctgccgtggcagctgctgcaacaccccaggctcagtcctcacagccacagtcgatgctggatcagcagcgagagttggctagaaagcgggaacaggagcgtcggcggcgggaggccatggctgcgacgatcgatatgaatttccaatcggaccttctgagtatttttgaggaaaaccttttctag

SEQ ID NO: 320427 - DNA, 4089 bp, Artificial Sequence
  derived and/or modified sequence
atgtccgccgagtcggggcctgggacccgtctacgaaatctccccgttatgggggatgggctggagacaagccaaatgagtactacccaggcccaggcacagccacagccagctaatgcggcatccactaaccctcctccaccagaaacatctaacccgaataaacctaaacgccagactaatcagcttcagtacctcctgagggtggtgctgaagactctgtggaaacaccaatttgcgtggccatttcaacagcccgtggacgccgtgaaactgaacctacccgactactacaaaattataaaaactcctatggacatgggaaccataaagaagcgattggaaaacaattattactggaatgcgcaggaatgtatccaagacttcaacaccatgtttacaaattgttatatctataacaaaccaggagacgacattgtgctgatggccgaggctttggagaaactattcttgcagaagattaatgagttaccaacagaggagaccgagattatgatcgtccaggcgaaagggaggggaaggggaaggaaggagacagggacggcaaagccgggtgtgtccactgtgccgaatacaacacaagcgtcaaccccacctcagacacagacaccccagcctaatccacctccggtgcaggccacgcctcatccctttccagccgtcaccccagacctgattgtacagaccccggtgatgacagttgtgcccccacagcctctccaaactcctcctcctgtgcctccacagccacagccgccacctgcccctgcacctcaaccagtgcagtctcatccacccattattgcagccactcctcagcctgtgaagaccaaaaaaggcgtcaaaagaaaagccgacaccacaacccctaccaccattgatcctatccatgagcctccatcgttacccccagagccaaagaccaccaagttgggacagcgccgagaatcttcacgacccgtaaaacctccgaaaaaggacgtgcccgacagtcagcagcaccctgcgcctgagaagagctcgaaagtgtcagagcagctcaaatgctgctctggcatcctgaaggaaatgttcgcgaaaaagcacgcggcttacgcctggcccttttataaacccgtggacgtggaagcattggggttgcatgattactgcgatatcatcaaacaccccatggatatgagtacaataaagtctaagctcgaggcaagggaataccgcgatgcccaggagttcggcgctgatgtaaggttgatgttttcaaattgctataaatataacccccctgatcacgaggtcgtggcaatggccaggaagcttcaggatgtgttcgaaatgagatttgcaaagatgccagatgagcccgaagagccagtggttgcggtctcatcccctgcagtgcctcccccaaccaaggtcgttgcacccccttccagtagcgacagctcttctgactcctcctccgatagcgattcatcgacggatgacagtgaagaagaaagagctcagcggctggccgagctacaagagcagctgaaggctgtgcacgagcagctcgcagctctgtcccagccccagcagaataaaccaaagaaaaaggagaaagataagaaggaaaagaaaaaggaaaaacacaagcgaaaagaggaagtggaggagaacaaaaagtccaaagccaaggagccacctcccaagaaaacaaaaaagaacaattcatcaaattccaacgtttccaagaaggaacccgctcccatgaagtctaaacccccacccacctatgaaagtgaggaagaggacaaatgtaaaccgatgtcctacgaagagaagaggcagctatccctggacattaacaagctacccggtgaaaagcttggccgtgtggtacatatcatacagtccagggaaccttctcttaaaaattctaatcctgacgagattgaaatcgacttcgagactctcaaaccgagcacactcagggagctggagcgctatgtgacaagctgtctgaggaagaagcggaaaccccaggctgaaaaggtagacgtgatcgccggttcaagtaagatgaagggtttttcatcatcagaatccgaatcttcctccgaaagctcatcctcagactcagaggattccgagacggagatggcgcctaaatctaaaaaaaaagggcacccaggccgtgagcagaagaagcatcaccaccatcaccatcagcaaatgcagcaggcaccagcccctgtgccccagcagcctccgcctccccctcagcagccgccacctcctcctccccctcagcagcaacagcagccaccccctccacctccccctccatccatgcctcagcaagcagcccctgcaatgaagtcaagcccccctccgtttatcgccacccaggtacctgttctcgagcctcagctgccaggctctgtgtttgatccaatcggtcactttacccagcccattttacacctcccgcagcccgagttgcctccacatctgcctcagcctccagagcactcaactccgccacatctcaatcagcacgctgtcgtatctcccccagccctccataacgcattacctcagcaacctagcaggccgagcaaccgcgctgctgcactacctcccaaacctgcccgaccgcctgcagtcagcccagctctaacgcaaacgccccttctcccgcagccccctatggcacagccgccacaagtattattagaggacgaagagccacccgctcccccactcacctcaatgcagatgcagttgtacctgcagcagttgcaaaaagtccagcccccaactccccttctgccctctgtcaaagtccagtcacagccccctccgcctctcccaccccctccacaccccagtgtacaacagcagctccagcagcaacctcccccaccaccgccaccccagcctcagccgcctcctcagcaacaacatcagccacctccgagacccgttcacctacagcccatgcagttcagtactcacattcaacagcctcccccacctcaagggcagcagccacctcacccacccccaggccagcaaccaccacctccacagcccgctaaaccccagcaagtgatacaacatcatcacagccccagacatcacaagtccgatccatacagtacgggccatttacgtgaagccccttctcctctgatgatccactctccccagatgtcacaatttcaatcactcacccatcagtccccacctcagcagaatgtgcagccgaaaaagcaggaactacgggctgccagcgttgtccagccacagccactggttgtcgtgaaagaggagaaaatccactctcccattattagatcagaaccctttagccctagtctcaggccggagcctcctaagcacccagaatctataaaagcaccagtgcatcttccccagcgccctgagatgaaacctgttgatgtggggagacccgtgattaggccacccgagcaaaacgccccaccacctggagcccctgacaaggacaaacagaaacaggaaccaaagacaccggttgccccaaagaaagaccttaagatcaaaaatatggggagttgggcatctctcgtgcagaagcacccgacaactccatcttctaccgccaagtcatcgagtgactcatttgaacagtttcggagggccgcacgggaaaaggaagagagggagaaggcattgaaggcacaggccgaacacgctgaaaaagagaaggagcgcctgaggcaggagcggatgaggtctagggaagatgaagatgccctcgagcaggccaggcgtgctcacgaagaggctagacgaagacaggagcagcaacagcagcagcggcaggagcagcagcagcagcagcaacagcaggctgctgccgtggccgcagccgcaaccccccaggcgcaaagcagccagccgcagagtatgctggatcaacaacgcgagcttgcgaggaagcgagaacaagaaaggcgtcgacgggaggctatggctgccacaattgacatgaattttcaatctgatctgctcagcattttcgaagagaatttgttctag

SEQ ID NO: 320428 - DNA, 5198 bp, Artificial Sequence
  derived and/or modified sequence
attctttggaatactactgctagaagtctgacttaagacccagcttatgggccacatggcacccagctgcttctgcagagaaggcaggccactgatgggtacagcaaagtgtggtgctgctggccaagccaaagacccgtgtaggatgactgggcctctgccccttgtgggtgttgccactgtgcttgagtgcctggtgaagaatgtgatgggatcactagcatgtctgcggagagcggccctgggacgagattgagaaatctgccagtaatgggggatggactagaaacttcccaaatgtctacaacacaggcccaggcccaaccccagccagccaacgcagccagcaccaaccccccgcccccagagacctccaaccctaacaagcccaagaggcagaccaaccaactgcaatacctgctcagagtggtgctcaagacactatggaaacaccagtttgcatggcctttccagcagcctgtggatgccgtcaagctgaacctccctgattactataagatcattaaaacgcctatggatatgggaacaataaagaagcgcttggaaaacaactattactggaatgctcaggaatgtatccaggacttcaacactatgtttacaaattgttacatctacaacaagcctggagatgacatagtcttaatggcagaagctctggaaaagctcttcttgcaaaaaataaatgagctacccacagaagaaaccgagatcatgatagtccaggcaaaaggaagaggacgtgggaggaaagaaacagggacagcaaaacctggcgtttccacggtaccaaacacaactcaagcatcgactcctccgcagacccagacccctcagccgaatcctcctcctgtgcaggccacgcctcaccccttccctgccgtcaccccggacctcatcgtccagacccctgtcatgacagtggtgcctccccagccactgcagacgcccccgccagtgcccccccagccacaacccccacccgctccagctccccagcccgtacagagccacccacccatcatcgcggccaccccacagcctgtgaagacaaagaagggagtgaagaggaaagcagacaccaccacccccaccaccattgaccccattcacgagccaccctcgctgcccccggagcccaagaccaccaagctgggccagcggcgggagagcagccggcctgtgaaacctccaaagaaggacgtgcccgactctcagcagcacccagcaccagagaagagcagcaaggtctcggagcagctcaagtgctgcagcggcatcctcaaggagatgtttgccaagaagcacgccgcctacgcctggcccttctacaagcctgtggacgtggaggcactgggcctacacgactactgtgacatcatcaagcaccccatggacatgagcacaatcaagtctaaactggaggcccgtgagtaccgtgatgctcaggagtttggtgctgacgtccgattgatgttctccaactgctataagtacaaccctcctgaccatgaggtggtggccatggcccgcaagctccaggatgtgttcgaaatgcgctttgccaagatgccggacgagcctgaggagccagtggtggccgtgtcctccccggcagtgccccctcccaccaaggttgtggccccgccctcatccagcgacagcagcagcgatagctcctcggacagtgacagttcgactgatgactctgaggaggagcgagcccagcggctggctgagctccaggagcagctcaaagccgtgcacgagcagcttgcagccctctctcagccccagcagaacaaaccaaagaaaaaggagaaagacaagaaggaaaagaaaaaagaaaagcacaaaaggaaagaggaagtggaagagaataaaaaaagcaaagccaaggaacctcctcctaaaaagacgaagaaaaataatagcagcaacagcaatgtgagcaagaaggagccagcgcccatgaagagcaagccccctcccacgtatgagtcggaggaagaggacaagtgcaagcctatgtcctatgaggagaagcggcagctcagcttggacatcaacaagctccccggcgagaagctgggccgcgtggtgcacatcatccagtcacgggagccctccctgaagaattccaaccccgacgagattgaaatcgactttgagaccctgaagccgtccacactgcgtgagctggagcgctatgtcacctcctgtttgcggaagaaaaggaaacctcaagctgagaaagttgatgtgattgccggctcctccaagatgaagggcttctcgtcctcagagtcggagagctccagtgagtccagctcctctgacagcgaagactccgaaacagagatggctccgaagtcaaaaaagaaggggcaccccgggagggagcagaagaagcaccatcatcaccaccatcagcagatgcagcaggccccggctcctgtgccccagcagccgcccccgcctccccagcagcccccaccgcctccacctccgcagcagcaacagcagccgccacccccgcctcccccaccctccatgccgcagcaggcagccccggcgatgaagtcctcgcccccacccttcattgccacccaggtgcccgtcctggagccccagctcccaggcagcgtctttgaccccatcggccacttcacccagcccatcctgcacctgccgcagcctgagctgccccctcacctgccccagccgcctgagcacagcactccaccccatctcaaccagcacgcagtggtctctcctccagctttgcacaacgcactaccccagcagccatcacggcccagcaaccgagccgctgccctgcctcccaagcccgcccggcccccagccgtgtcaccagccttgacccaaacacccctgctcccacagccccccatggcccaacccccccaagtgctgctggaggatgaagagccacctgccccacccctcacctccatgcagatgcagctgtacctgcagcagctgcagaaggtgcagccccctacgccgctactcccttccgtgaaggtgcagtcccagcccccaccccccctgccgcccccaccccacccctctgtgcagcagcagctgcagcagcagccgccaccacccccaccaccccagccccagcctccaccccagcagcagcatcagccccctccacggcccgtgcacttgcagcccatgcagttttccacccacatccaacagcccccgccaccccagggccagcagcccccccatccgcccccaggccagcagccacccccgccgcagcctgccaagcctcagcaagtcatccagcaccaccattcaccccggcaccacaagtcggacccctactcaaccggtcacctccgcgaagccccctccccgcttatgatacattccccccagatgtcacagttccagagcctgacccaccagtctccaccccagcaaaacgtccagcctaagaaacaggagctgcgtgctgcctccgtggtccagccccagcccctcgtggtggtgaaggaggagaagatccactcacccatcatccgcagcgagcccttcagcccctcgctgcggccggagccccccaagcacccggagagcatcaaggcccccgtccacctgccccagcggccggaaatgaagcctgtggatgtcgggaggcctgtgatccggcccccagagcagaacgcaccgccaccaggggcccctgacaaggacaaacagaaacaggagccgaagactccagttgcgcccaaaaaggacctgaaaatcaagaacatgggctcctgggccagcctagtgcagaagcatccgaccaccccctcctccacagccaagtcatccagcgacagcttcgagcagttccgccgcgccgctcgggagaaagaggagcgtgagaaggccctgaaggctcaggccgagcacgctgagaaggagaaggagcggctgcggcaggagcgcatgaggagccgagaggacgaggatgcgctggagcaggcccggcgggcccatgaggaggcacgtcggcgccaggagcagcagcagcagcagcgccaggagcaacagcagcagcagcaacagcaagcagctgcggtggctgccgccgccaccccacaggcccagagctcccagccccagtccatgctggaccagcagagggagttggcccggaagcgggagcaggagcgaagacgccgggaagccatggcagctaccattgacatgaatttccagagtgatctattgtcaatatttgaagaaaatcttttctgagcgcacctaggtggcttctgactttgattttctggcaaaacattgactttccatagtgttaggggcggtggtggaggtgggatcagcggccaggggatgcctcagggcctggccctcctgcatgctatgcccggggcaggcctgacgggcagctgaggattgcagagcctgtctgccttacggccagtcggacagacgtcccgccacccaccacccctcacaggacgtccgctcagcacacgccttgttacgagcaagtgccggctggacccaagccctgcatccccacatgcggggcagaggcccttctctccgccaaatgtctacacagtatacacaggacatcgttgctgccgccgtgactggttttctgtccccaagaacgtgacgttcgtgatgtcctgcccgccgggagtctttccccacaccccagccatcgccgcccgctcccaggaggccagggcaggcctgcgtgggctggaggcgggcgaggccggcccaccccctcgctggcactgactttgccttgaacagaccccccgaccctcccccacaagcctttaattgagagccgctctctgtaagtgtttgcttgtgcaaaagggaatagtgccgtggaggtgtgtgtgtccatggcatccggagcgaggcgactgtcctgcgtgggtagccctcggccggggagtgaggccaccaaccaaagtcagttccttcccacctgtgtttctgtttcgtttttttttttcttttttttctatatatattttttgttgaattctattttatttttaattctctcttctcctccagacacaatggcactgcttatctccgaaatggtgtgatcgtctcctcattgagcagcggctgccaccgcgctgtgggta

SEQ ID NO: 320429 - DNA, 4089 bp, Artificial Sequence
  derived and/or modified sequence
atgagcgccgagagcggccccggcaccagactgagaaacctgcccgtgatgggcgacggcctggagaccagccagatgagcaccacccaggcccaggcccagccccagcccgccaacgccgccagcaccaacccccccccccccgagaccagcaaccccaacaagcccaagagacagaccaaccagctgcagtacctgctgagagtggtgctgaagaccctgtggaagcaccagttcgcctggcccttccagcagcccgtggacgccgtgaagctgaacctgcccgactactacaagatcatcaagacccccatggacatgggcaccatcaagaagagactggagaacaactactactggaacgcccaggagtgcatccaggacttcaacaccatgttcaccaactgctacatctacaacaagcccggcgacgacatcgtgctgatggccgaggccctggagaagctgttcctgcagaagatcaacgagctgcccaccgaggagaccgagatcatgatcgtgcaggccaagggcagaggcagaggcagaaaggagaccggcaccgccaagcccggcgtgagcaccgtgcccaacaccacccaggccagcacccccccccagacccagaccccccagcccaaccccccccccgtgcaggccaccccccaccccttccccgccgtgacccccgacctgatcgtgcagacccccgtgatgaccgtggtgcccccccagcccctgcagacccccccccccgtgcccccccagccccagcccccccccgcccccgccccccagcccgtgcagagccacccccccatcatcgccgccaccccccagcccgtgaagaccaagaagggcgtgaagagaaaggccgacaccaccacccccaccaccatcgaccccatccacgagccccccagcctgccccccgagcccaagaccaccaagctgggccagagaagagagagcagcagacccgtgaagccccccaagaaggacgtgcccgacagccagcagcaccccgcccccgagaagagcagcaaggtgagcgagcagctgaagtgctgcagcggcatcctgaaggagatgttcgccaagaagcacgccgcctacgcctggcccttctacaagcccgtggacgtggaggccctgggcctgcacgactactgcgacatcatcaagcaccccatggacatgagcaccatcaagagcaagctggaggccagagagtacagagacgcccaggagttcggcgccgacgtgagactgatgttcagcaactgctacaagtacaacccccccgaccacgaggtggtggccatggccagaaagctgcaggacgtgttcgagatgagattcgccaagatgcccgacgagcccgaggagcccgtggtggccgtgagcagccccgccgtgcccccccccaccaaggtggtggccccccccagcagcagcgacagcagcagcgacagcagcagcgacagcgacagcagcaccgacgacagcgaggaggagagagcccagagactggccgagctgcaggagcagctgaaggccgtgcacgagcagctggccgccctgagccagccccagcagaacaagcccaagaagaaggagaaggacaagaaggagaagaagaaggagaagcacaagagaaaggaggaggtggaggagaacaagaagagcaaggccaaggagcccccccccaagaagaccaagaagaacaacagcagcaacagcaacgtgagcaagaaggagcccgcccccatgaagagcaagcccccccccacctacgagagcgaggaggaggacaagtgcaagcccatgagctacgaggagaagagacagctgagcctggacatcaacaagctgcccggcgagaagctgggcagagtggtgcacatcatccagagcagagagcccagcctgaagaacagcaaccccgacgagatcgagatcgacttcgagaccctgaagcccagcaccctgagagagctggagagatacgtgaccagctgcctgagaaagaagagaaagccccaggccgagaaggtggacgtgatcgccggcagcagcaagatgaagggcttcagcagcagcgagagcgagagcagcagcgagagcagcagcagcgacagcgaggacagcgagaccgagatggcccccaagagcaagaagaagggccaccccggcagagagcagaagaagcaccaccaccaccaccaccagcagatgcagcaggcccccgcccccgtgccccagcagccccccccccccccccagcagccccccccccccccccccccccagcagcagcagcagccccccccccccccccccccccccagcatgccccagcaggccgcccccgccatgaagagcagccccccccccttcatcgccacccaggtgcccgtgctggagccccagctgcccggcagcgtgttcgaccccatcggccacttcacccagcccatcctgcacctgccccagcccgagctgcccccccacctgccccagccccccgagcacagcacccccccccacctgaaccagcacgccgtggtgagcccccccgccctgcacaacgccctgccccagcagcccagcagacccagcaacagagccgccgccctgccccccaagcccgccagaccccccgccgtgagccccgccctgacccagacccccctgctgccccagccccccatggcccagcccccccaggtgctgctggaggacgaggagccccccgccccccccctgaccagcatgcagatgcagctgtacctgcagcagctgcagaaggtgcagccccccacccccctgctgcccagcgtgaaggtgcagagccagccccccccccccctgcccccccccccccaccccagcgtgcagcagcagctgcagcagcagccccccccccccccccccccccagccccagccccccccccagcagcagcaccagcccccccccagacccgtgcacctgcagcccatgcagttcagcacccacatccagcagcccccccccccccagggccagcagcccccccaccccccccccggccagcagcccccccccccccagcccgccaagccccagcaggtgatccagcaccaccacagccccagacaccacaagagcgacccctacagcaccggccacctgagagaggcccccagccccctgatgatccacagcccccagatgagccagttccagagcctgacccaccagagccccccccagcagaacgtgcagcccaagaagcaggagctgagagccgccagcgtggtgcagccccagcccctggtggtggtgaaggaggagaagatccacagccccatcatcagaagcgagcccttcagccccagcctgagacccgagccccccaagcaccccgagagcatcaaggcccccgtgcacctgccccagagacccgagatgaagcccgtggacgtgggcagacccgtgatcagaccccccgagcagaacgcccccccccccggcgcccccgacaaggacaagcagaagcaggagcccaagacccccgtggcccccaagaaggacctgaagatcaagaacatgggcagctgggccagcctggtgcagaagcaccccaccacccccagcagcaccgccaagagcagcagcgacagcttcgagcagttcagaagagccgccagagagaaggaggagagagagaaggccctgaaggcccaggccgagcacgccgagaaggagaaggagagactgagacaggagagaatgagaagcagagaggacgaggacgccctggagcaggccagaagagcccacgaggaggccagaagaagacaggagcagcagcagcagcagagacaggagcagcagcagcagcagcagcagcaggccgccgccgtggccgccgccgccaccccccaggcccagagcagccagccccagagcatgctggaccagcagagagagctggccagaaagagagagcaggagagaagaagaagagaggccatggccgccaccatcgacatgaacttccagagcgacctgctgagcatcttcgaggagaacctgttctag

SEQ ID NO: 320430 - protein, 794 aa, Artificial Sequence
  derived and/or modified sequence
MSAESGPGTRLRNLPVMGDGLETSQMSTTQAQAQPQPANAASTNPPPPETSNPNKPKRQTNQLQYLLRVVLKTLWKHQFAWPFQQPVDAVKLNLPDYYKIIKTPMDMGTIKKRLENNYYWNAQECIQDFNTMFTNCYIYNKPGDDIVLMAEALEKLFLQKINELPTEETEIMIVQAKGRGRGRKETGTAKPGVSTVPNTTQASTPPQTQTPQPNPPPVQATPHPFPAVTPDLIVQTPVMTVVPPQPLQTPPPVPPQPQPPPAPAPQPVQSHPPIIAATPQPVKTKKGVKRKADTTTPTTIDPIHEPPSLPPEPKTTKLGQRRESSRPVKPPKKDVPDSQQHPAPEKSSKVSEQLKCCSGILKEMFAKKHAAYAWPFYKPVDVEALGLHDYCDIIKHPMDMSTIKSKLEAREYRDAQEFGADVRLMFSNCYKYNPPDHEVVAMARKLQDVFEMRFAKMPDEPEEPVVAVSSPAVPPPTKVVAPPSSSDSSSDSSSDSDSSTDDSEEERAQRLAELQEQLKAVHEQLAALSQPQQNKPKKKEKDKKEKKKEKHKRKEEVEENKKSKAKEPPPKKTKKNNSSNSNVSKKEPAPMKSKPPPTYESEEEDKCKPMSYEEKRQLSLDINKLPGEKLGRVVHIIQSREPSLKNSNPDEIEIDFETLKPSTLRELERYVTSCLRKKRKPQAEKVDVIAGSSKMKGFSSSESESSSESSSSDSEDSETAFCTSGDFVSPGPSPYHSHVQCGRFREMLRWFLVDVEQTAAGQPHRQSAAGPAITWAPAIAYPSPECARCCVGCS

SEQ ID NO: 320431 - DNA, 2385 bp, Artificial Sequence
  derived and/or modified sequence
atgtctgccgaatctgggcccggaacccgactcaggaacctccctgtaatgggtgacggcttggagacctctcaaatgtccacgactcaagctcaggctcagccccaaccagcgaatgcggcctctactaatccacccccccccgagactagcaatccaaataagcccaagcgtcagacaaaccagcttcagtacctcctaagagtggtgctgaaaaccttgtggaagcaccagttcgcttggcccttccagcaaccggtggacgcagtcaaacttaaccttcctgactactacaagatcatcaagacccccatggacatggggaccatcaagaaacgcctggagaacaattattactggaatgcccaggagtgtatccaggatttcaatactatgtttacgaattgctacatctataataagccgggagacgacatcgtcctgatggcagaggctctggagaagctgtttctgcagaaaataaatgagctcccaactgaagagaccgagataatgatcgtgcaggcaaaggggcgcggccgggggcggaaagaaactggcacagccaagcctggagtgtccaccgtccccaatactactcaggcctctacccctcctcagacccagacaccccagcctaatcctccacccgtgcaggccacaccccaccccttccccgcagtcacacccgacctgatagtccaaacaccagtgatgaccgttgtgccgcctcagcccttacaaacaccaccccctgtgcccccgcagccgcaaccaccaccggcccccgcgccccagcctgtacagagccatccccctataattgctgcaacgccccagccagtgaagaccaagaaaggagttaagcggaaggccgataccaccactccgaccacgatcgaccctattcatgagccaccgtctctccctcctgaaccaaaaactaccaaactgggccaacgacgggagtcctcacggcctgtgaaaccacctaaaaaggacgttcctgactctcagcagcatccagcacccgaaaagtcaagcaaggtgtccgaacagttgaagtgctgctcaggaattctgaaagaaatgttcgcaaaaaagcacgctgcctacgcttggcccttttacaaaccagtagatgtggaggccctcggtcttcacgattattgtgacatcatcaaacaccccatggatatgtctaccatcaagtctaagctggaggccagagaataccgtgacgctcaggagttcggcgccgatgtgcgactgatgttctcaaattgctacaaatataatccccctgaccatgaagtagtcgcaatggctcgcaaattgcaggatgtattcgaaatgcgattcgctaaaatgccggatgagcctgaggagccagtggttgcagtgtcatctcccgccgtgcctccacccaccaaggtggtggcccccccatcgagcagcgactcctcctctgactcaagtagcgatagtgattccagtaccgacgactccgaagaggaacgagctcagaggctggccgagcttcaggagcagctgaaagcagttcatgagcaactcgcagcccttagccagccccagcagaataagccaaaaaagaaggagaaggataagaaagaaaaaaaaaaggagaaacataagagaaaggaagaagtagaggaaaacaagaagagtaaagcaaaggagcccccgcccaagaagactaaaaagaataactcatcaaactccaacgtgagcaagaaggaacctgcacctatgaaaagtaaaccaccgcccacatacgagtctgaggaagaggacaagtgcaaacccatgtcttacgaggagaagagacagctgagtttggatatcaacaagctcccgggagagaaactaggccgagtggtgcatatcatccaaagcagagaaccatctctcaagaactctaatcccgatgaaatagaaatcgattttgaaacactcaagccaagcacccttcgggaactggagcggtatgtgactagttgccttagaaagaagcggaaaccgcaggcagagaaagtggacgtgatcgccggaagcagcaagatgaaagggttctcttcgagtgaatccgagtcgtcatcggaaagctcatcttctgacagcgaggatagtgagacggctttttgtacttctggcgattttgttagtcccggtccaagcccgtatcattctcatgtacaatgtggtcgcttcagggaaatgctgcgatggttcctcgtagacgtggagcaaacggccgcgggacagccccatcggcaatctgccgctggcccggccatcacttgggcccccgccatcgcctaccccagccctgaatgtgcaaggtgctgcgtgggatgttcctag

SEQ ID NO: 320432 - DNA, 2385 bp, Artificial Sequence
  derived and/or modified sequence
atgtctgctgagagcggccctggcacccggctgaggaacctgcctgtgatgggagatggcctggagaccagccagatgagcaccacccaggcccaggcccagccccagcctgccaatgctgccagcaccaaccccccacctcctgagaccagcaaccccaacaagcccaagaggcagaccaaccagctgcagtacctgctgcgggtggtgctgaagaccctgtggaagcaccagtttgcctggcccttccagcagcctgtggatgctgtgaagctgaacctgcctgactactacaagatcatcaagacccccatggacatgggcaccatcaagaagaggctggagaacaactactactggaatgcccaggagtgcatccaggacttcaacaccatgttcaccaactgctacatctacaacaagccaggagatgacatcgtgctgatggccgaggccctggagaagctgttcctgcagaagatcaatgagctgcccacagaggagacagagatcatgattgtgcaggccaagggccggggccggggcaggaaggagaccggcacagccaagccaggagtgtccacagtgcccaacaccacccaggccagcaccccaccccagacccagaccccccagcccaaccccccacctgtgcaggccaccccccaccccttccctgctgtgaccccagacctgattgtgcagacccctgtgatgacagtggtgcccccccagcccctgcagaccccacctcctgtgcccccccagccccagcccccaccagccccagccccccagcctgtgcagagccacccccccatcatcgccgccaccccccagcctgtgaagaccaagaagggcgtgaagaggaaggctgacaccaccacccccaccaccatcgaccccatccacgagccccccagcctgcccccagagcccaagaccaccaagctgggccagaggcgggagagcagcaggcctgtgaagccacccaagaaggatgtgcctgacagccagcagcacccagcccctgagaagagcagcaaggtgtctgagcagctgaagtgctgcagcggcatcctgaaggagatgtttgccaagaagcacgccgcctatgcctggcccttctacaagcctgtggatgtggaggccctgggcctgcatgactactgtgacatcatcaagcaccccatggacatgagcaccatcaagagcaagctggaggcccgggagtacagagatgcccaggagtttggagcagatgtgcggctgatgttcagcaactgctacaagtacaaccccccagaccacgaggtggtggccatggccaggaagctgcaggatgtgtttgagatgagatttgccaagatgccagatgagcctgaggagcctgtggtggccgtgagcagccctgctgtgcccccacccaccaaggtggtggccccacccagcagcagtgacagcagcagtgacagcagcagtgacagcgacagcagcacagatgattctgaggaggagcgggcccagaggctggccgagctgcaggagcagctgaaggctgtgcatgagcagctggccgccctgagccagccccagcagaacaagcccaagaagaaggagaaggacaagaaggagaagaagaaggagaagcacaagaggaaggaggaggtggaggagaacaagaagagcaaggccaaggagcccccacccaagaagaccaagaagaacaacagcagcaacagcaatgtgtccaagaaggagcccgcccccatgaagagcaagcccccacccacctatgaaagtgaggaggaggacaagtgcaagcccatgtcctatgaggagaagaggcagctgagcctggacatcaacaagctgcccggggagaagctgggccgggtggtgcacatcatccagagccgggagcccagcctgaagaacagcaacccagatgaaattgaaattgactttgagaccctgaagcccagcaccctgcgggagctggagcgctacgtgaccagctgcctgaggaagaagaggaagccccaggccgagaaggtggatgtgattgctggcagcagcaagatgaagggcttcagcagcagcgagagcgagagcagcagcgagagcagcagcagtgacagtgaagattctgaaacagccttctgcaccagcggggactttgtgtccccaggccccagcccctaccacagccacgtgcagtgtggccgcttccgggagatgctgcgctggttcctggtggatgtggagcagacagctgctggccagccccaccggcagagcgctgctggccctgccatcacctgggccccagccatcgcctaccccagcccagaatgtgcccgctgctgcgtgggctgcagctag

SEQ ID NO: 320433 - DNA, 2385 bp, Artificial Sequence
  derived and/or modified sequence
atgagcgccgagagcggccccggcacccggctgcggaacctgcccgtaatgggtgatggactcgaaacctctcaaatgagtacaacacaagctcaagcccagccacagccagcaaatgctgccagcactaacccaccaccccccgagacaagcaaccctaataagccaaaacggcagactaatcagcttcagtatttacttagagtggtcttgaagacactgtggaagcatcaatttgcctggccattccaacagcctgtcgacgcagtcaaattgaatctgccagattactacaagattatcaagactcctatggatatgggcactatcaagaagagactagagaacaattactattggaatgcccaggaatgtattcaggattttaataccatgtttaccaattgctacatatacaacaagccgggggacgacatagtgctaatggccgaagcgcttgaaaaactatttcttcagaagatcaatgaacttccgacagaagagacagagatcatgatcgtacaggccaaaggcagagggcgcgggcgcaaagagactggaacagctaagccaggcgtctcaacagtccctaatacaacccaggcatcaacacccccgcaaacccagacgcctcagcctaatccacctccagtgcaggctacaccacacccgtttcccgccgttaccccggatctgattgttcaaacacccgtcatgactgtcgtccctccccagcccctccaaaccccgcctcctgtgccaccccaacctcagcctccgcctgctccggctcctcagccggtacagagtcacccgcccattatcgctgcgactccacagcccgttaaaacaaaaaagggagtcaagcgaaaggccgacactacaacccccacaaccattgatcctatacacgagcccccttcgcttcctcctgaaccaaaaacaactaaactcgggcagagacgggagtccagccggcctgttaagcctcccaagaaggatgtgcctgacagtcagcagcaccctgcacctgagaagagctccaaggtctctgagcagctcaagtgctgcagcggaattctcaaagaaatgttcgccaaaaaacacgccgcctatgcatggcccttttacaaaccagtggatgtagaagccctggggttacatgattattgtgacattatcaaacatcccatggacatgagcacaataaaatctaaactggaggccagggaatacagagatgcgcaggaatttggcgccgatgtcaggttaatgttcagcaattgctacaaatacaaccctcctgatcacgaagtagttgctatggcacgtaaacttcaggatgtgttcgaaatgagatttgcaaaaatgccggacgaaccggaagagccagtggtggctgtttcctcccccgctgtcccgccgcctacgaaggtcgttgcccctccctcctccagtgactctagttcagattcatctagcgattctgacagctctactgacgactcagaagaagaaagggcacagaggctcgccgagctacaagaacagctcaaagctgttcatgaacagctagcagctctgagccagccccaacagaataagcctaaaaagaaggaaaaagacaagaaagagaaaaagaaagagaagcataagagaaaggaggaggttgaagaaaacaaaaagtccaaggccaaagagcccccccccaagaagaccaagaaaaacaatagctccaacagcaacgtgagcaagaaggagccagcacctatgaagagtaagccacccccaacatatgagtctgaagaagaagacaaatgtaagcctatgtcctacgaggaaaagcggcagctgagcctcgatattaacaaattacccggagaaaagttgggacgagtggtgcatatcatccagagccgagaaccgtcactgaaaaattctaatcctgatgaaatcgagatcgacttcgagaccctgaagcccagtacactgagagagctcgagaggtatgtcaccagctgtttacgcaaaaagcgtaagccccaagccgagaaagtggacgttatcgcaggatcctctaagatgaaaggcttcagcagctcggaatcagaaagcagctcagagtcaagctcctctgactctgaggactctgaaacagctttctgtacttcaggtgattttgtttcacctgggcccagcccctatcacagccatgttcagtgtggtaggttccgggaaatgctgcggtggtttctggtggacgtggaacaaacagccgctggccagccccacaggcagagcgcagcgggtccagctatcacttgggcccccgccatcgcgtatccctcacctgaatgcgcccgctgctgcgtgggatgtagttag

SEQ ID NO: 320434 - DNA, 2385 bp, Artificial Sequence
  derived and/or modified sequence
atgagtgctgagtctgggccaggtacaaggctgagaaaccttcctgtcatgggtgacggtttagagacttcccagatgtcgaccactcaggcccaagctcaaccacaacccgcaaatgctgcaagcactaatccgccacccccagaaacaagcaacccaaacaagcccaagcgtcagacgaatcaacttcaatatcttctgcgcgtggtgctgaagacgctgtggaagcatcaattcgcttggccattccagcagcctgttgatgcagtgaaactgaaccttccggattactacaaaatcatcaagaccccaatggacatgggtacgattaaaaaacgtcttgaaaataactattattggaacgcccaggaatgcatccaggactttaatacaatgttcacaaactgctacatatacaataaaccgggagatgacatagtattgatggccgaggcccttgagaagctttttctccaaaagatcaatgagctacctactgaggagaccgaaattatgatagtgcaggccaagggacgtggaaggggtaggaaagaaaccggcaccgctaagcctggagtgagcactgtgcctaacactacacaggcctctacccctccccagacccagacgccccagcccaatccccctccagtccaggctactccccatccattccccgcagtgacgcccgatttgattgttcaaactcctgttatgacagtagtgcccccacagccgttgcagacaccaccgcctgtgcccccacagccgcagccccctcccgctcctgcacctcagcccgtgcagagtcatccacctatcattgcggcaaccccacagcccgttaaaaccaagaagggagtgaagcgcaaggctgacacaacaacacccaccacaattgaccccatccatgagcccccatccctaccgccagaacccaagaccactaagctggggcagaggcgcgagtcttcaaggccagtgaaaccccctaagaaggacgtgcctgattcacagcagcatccggctcctgaaaagtctagcaaggtctccgagcagttgaagtgctgctctggcatcctgaaagagatgtttgcgaagaagcacgctgcttacgcctggccgttctataaacctgtcgacgtggaggccctcgggctccacgattattgtgacatcataaagcaccccatggacatgagcaccatcaagtccaagcttgaggccagggaataccgcgatgcccaggagttcggggcagacgttaggcttatgttttctaactgctacaaatacaaccccccagatcacgaggtggtcgccatggcccgaaaacttcaggacgtatttgagatgcgcttcgccaaaatgccagacgagcctgaggaaccagtcgtagccgtgagctcgcccgctgtacccccaccaaccaaagtggtcgcgccaccatccagctctgattctagcagtgactcttccagcgactccgatagcagtaccgacgattcagaggaggaaagagcacagcgcctggccgagctccaggagcagctgaaagctgtccatgaacagttggctgcgctctcccagcctcagcagaacaaacccaagaaaaaggagaaagataaaaaagagaagaagaaggagaagcataagcgcaaggaggaggtggaggaaaacaaaaaaagcaaagctaaagagccccctccgaaaaagacgaagaagaataacagtagtaatagtaacgtgtccaaaaaagaacccgcaccaatgaaatccaagcccccaccaacctatgagagtgaagaagaagacaaatgtaaacccatgtcttacgaggagaagaggcagttaagcctggacattaataaactaccaggggagaagctcggacgtgtggtgcatataattcagtctcgcgagccaagcctgaagaatagtaatcccgacgagattgaaatcgactttgaaaccttgaagccctccaccctaagagaactcgaacgctacgtcacctcctgtctgcgcaaaaaacgaaagccccaggctgaaaaggtggacgtaatcgccggaagctcaaaaatgaaaggattttctagttccgaaagtgaatcatccagtgagagttcctcctcagactcggaagactccgagacggctttttgcactagcggagacttcgtgtcacctggaccttcaccctaccacagccacgtgcagtgtgggagattccgggagatgctgcggtggttcctggtcgacgtcgaacagaccgccgcagggcagccccaccgacagtccgctgctggaccagcaatcacctgggcaccagccatcgcctatccctctcctgagtgcgcgaggtgttgtgtcggatgcagttag

SEQ ID NO: 320435 - DNA, 3235 bp, Artificial Sequence
  derived and/or modified sequence
gacgtcagtgcgctggcggcggcggcggcggcggcggcggcggctgggctgtttgttctggtctcccgcagccgaggagccgaagcagtggcggcggcagcggctgcggcggctgccggcggtgcccgcgggcgagcgcggcctgtgagctcggcagagcggcgggcgggccccggcgccgcgcaggcagctcggggagggggcggcggcagcgggcggacggccggcgggggcggcgtgcggcctagcgtctcagagtgcctggtgaagaatgtgatgggatcactagcatgtctgcggagagcggccctgggacgagattgagaaatctgccagtaatgggggatggactagaaacttcccaaatgtctacaacacaggcccaggcccaaccccagccagccaacgcagccagcaccaaccccccgcccccagagacctccaaccctaacaagcccaagaggcagaccaaccaactgcaatacctgctcagagtggtgctcaagacactatggaaacaccagtttgcatggcctttccagcagcctgtggatgccgtcaagctgaacctccctgattactataagatcattaaaacgcctatggatatgggaacaataaagaagcgcttggaaaacaactattactggaatgctcaggaatgtatccaggacttcaacactatgtttacaaattgttacatctacaacaagcctggagatgacatagtcttaatggcagaagctctggaaaagctcttcttgcaaaaaataaatgagctacccacagaagaaaccgagatcatgatagtccaggcaaaaggaagaggacgtgggaggaaagaaacagggacagcaaaacctggcgtttccacggtaccaaacacaactcaagcatcgactcctccgcagacccagacccctcagccgaatcctcctcctgtgcaggccacgcctcaccccttccctgccgtcaccccggacctcatcgtccagacccctgtcatgacagtggtgcctccccagccactgcagacgcccccgccagtgcccccccagccacaacccccacccgctccagctccccagcccgtacagagccacccacccatcatcgcggccaccccacagcctgtgaagacaaagaagggagtgaagaggaaagcagacaccaccacccccaccaccattgaccccattcacgagccaccctcgctgcccccggagcccaagaccaccaagctgggccagcggcgggagagcagccggcctgtgaaacctccaaagaaggacgtgcccgactctcagcagcacccagcaccagagaagagcagcaaggtctcggagcagctcaagtgctgcagcggcatcctcaaggagatgtttgccaagaagcacgccgcctacgcctggcccttctacaagcctgtggacgtggaggcactgggcctacacgactactgtgacatcatcaagcaccccatggacatgagcacaatcaagtctaaactggaggcccgtgagtaccgtgatgctcaggagtttggtgctgacgtccgattgatgttctccaactgctataagtacaaccctcctgaccatgaggtggtggccatggcccgcaagctccaggatgtgttcgaaatgcgctttgccaagatgccggacgagcctgaggagccagtggtggccgtgtcctccccggcagtgccccctcccaccaaggttgtggccccgccctcatccagcgacagcagcagcgatagctcctcggacagtgacagttcgactgatgactctgaggaggagcgagcccagcggctggctgagctccaggagcagctcaaagccgtgcacgagcagcttgcagccctctctcagccccagcagaacaaaccaaagaaaaaggagaaagacaagaaggaaaagaaaaaagaaaagcacaaaaggaaagaggaagtggaagagaataaaaaaagcaaagccaaggaacctcctcctaaaaagacgaagaaaaataatagcagcaacagcaatgtgagcaagaaggagccagcgcccatgaagagcaagccccctcccacgtatgagtcggaggaagaggacaagtgcaagcctatgtcctatgaggagaagcggcagctcagcttggacatcaacaagctccccggcgagaagctgggccgcgtggtgcacatcatccagtcacgggagccctccctgaagaattccaaccccgacgagattgaaatcgactttgagaccctgaagccgtccacactgcgtgagctggagcgctatgtcacctcctgtttgcggaagaaaaggaaacctcaagctgagaaagttgatgtgattgccggctcctccaagatgaagggcttctcgtcctcagagtcggagagctccagtgagtccagctcctctgacagcgaagactccgaaacagctttctgcaccagtggagacttcgtgtccccagggccttccccgtatcacagtcacgtgcagtgcggccgcttcagggagatgcttcgctggtttctggtggatgtggagcagactgcagctggccagccgcatcgccagtctgctgctggccctgccatcacctgggccccagccattgcctacccctccccagagtgtgctcgttgctgtgttggctgctcctgaatctgccctaactccacacgcacctggacttgcgtgtccctcctgcagttctaactaacagtcccttcttttcaagccccgtgggtctgcacgttggaccctgggttccccattagagcccaccttctgagcagcagcctcagtgggaggtggaggcaggtagtgatgctgggtgccaggtgggagtggagaggggactgctctcctccaagtgtgcactttcctcattattctcaggggcgcagatgctcaggctggcgcaggggagaggctagggagggagccatggtgcccagaaggcctggcgaccagcccctgctgagagatggagctaacatcctgtgtttacggccaacggggttgccgctaggctggtgcagctgtcagtgagctggcgtgctgcagaccacctgagagctggccctagggtctcaggcagactggggagtggggatccacagtgggaaacctgtgttttggcagtagactcctgcatgttctcccacgggcctgtcccatccctgggattttattctaactagaaataaatgctaaccctc

SEQ ID NO: 320436 - DNA, 2385 bp, Artificial Sequence
  derived and/or modified sequence
atgagcgccgagagcggccccggcaccagactgagaaacctgcccgtgatgggcgacggcctggagaccagccagatgagcaccacccaggcccaggcccagccccagcccgccaacgccgccagcaccaacccccccccccccgagaccagcaaccccaacaagcccaagagacagaccaaccagctgcagtacctgctgagagtggtgctgaagaccctgtggaagcaccagttcgcctggcccttccagcagcccgtggacgccgtgaagctgaacctgcccgactactacaagatcatcaagacccccatggacatgggcaccatcaagaagagactggagaacaactactactggaacgcccaggagtgcatccaggacttcaacaccatgttcaccaactgctacatctacaacaagcccggcgacgacatcgtgctgatggccgaggccctggagaagctgttcctgcagaagatcaacgagctgcccaccgaggagaccgagatcatgatcgtgcaggccaagggcagaggcagaggcagaaaggagaccggcaccgccaagcccggcgtgagcaccgtgcccaacaccacccaggccagcacccccccccagacccagaccccccagcccaaccccccccccgtgcaggccaccccccaccccttccccgccgtgacccccgacctgatcgtgcagacccccgtgatgaccgtggtgcccccccagcccctgcagacccccccccccgtgcccccccagccccagcccccccccgcccccgccccccagcccgtgcagagccacccccccatcatcgccgccaccccccagcccgtgaagaccaagaagggcgtgaagagaaaggccgacaccaccacccccaccaccatcgaccccatccacgagccccccagcctgccccccgagcccaagaccaccaagctgggccagagaagagagagcagcagacccgtgaagccccccaagaaggacgtgcccgacagccagcagcaccccgcccccgagaagagcagcaaggtgagcgagcagctgaagtgctgcagcggcatcctgaaggagatgttcgccaagaagcacgccgcctacgcctggcccttctacaagcccgtggacgtggaggccctgggcctgcacgactactgcgacatcatcaagcaccccatggacatgagcaccatcaagagcaagctggaggccagagagtacagagacgcccaggagttcggcgccgacgtgagactgatgttcagcaactgctacaagtacaacccccccgaccacgaggtggtggccatggccagaaagctgcaggacgtgttcgagatgagattcgccaagatgcccgacgagcccgaggagcccgtggtggccgtgagcagccccgccgtgcccccccccaccaaggtggtggccccccccagcagcagcgacagcagcagcgacagcagcagcgacagcgacagcagcaccgacgacagcgaggaggagagagcccagagactggccgagctgcaggagcagctgaaggccgtgcacgagcagctggccgccctgagccagccccagcagaacaagcccaagaagaaggagaaggacaagaaggagaagaagaaggagaagcacaagagaaaggaggaggtggaggagaacaagaagagcaaggccaaggagcccccccccaagaagaccaagaagaacaacagcagcaacagcaacgtgagcaagaaggagcccgcccccatgaagagcaagcccccccccacctacgagagcgaggaggaggacaagtgcaagcccatgagctacgaggagaagagacagctgagcctggacatcaacaagctgcccggcgagaagctgggcagagtggtgcacatcatccagagcagagagcccagcctgaagaacagcaaccccgacgagatcgagatcgacttcgagaccctgaagcccagcaccctgagagagctggagagatacgtgaccagctgcctgagaaagaagagaaagccccaggccgagaaggtggacgtgatcgccggcagcagcaagatgaagggcttcagcagcagcgagagcgagagcagcagcgagagcagcagcagcgacagcgaggacagcgagaccgccttctgcaccagcggcgacttcgtgagccccggccccagcccctaccacagccacgtgcagtgcggcagattcagagagatgctgagatggttcctggtggacgtggagcagaccgccgccggccagccccacagacagagcgccgccggccccgccatcacctgggcccccgccatcgcctaccccagccccgagtgcgccagatgctgcgtgggctgcagctag

SEQ ID NO: 320437 - protein, 722 aa, Artificial Sequence
  derived and/or modified sequence
MSAESGPGTRLRNLPVMGDGLETSQMSTTQAQAQPQPANAASTNPPPPETSNPNKPKRQTNQLQYLLRVVLKTLWKHQFAWPFQQPVDAVKLNLPDYYKIIKTPMDMGTIKKRLENNYYWNAQECIQDFNTMFTNCYIYNKPGDDIVLMAEALEKLFLQKINELPTEETEIMIVQAKGRGRGRKETGTAKPGVSTVPNTTQASTPPQTQTPQPNPPPVQATPHPFPAVTPDLIVQTPVMTVVPPQPLQTPPPVPPQPQPPPAPAPQPVQSHPPIIAATPQPVKTKKGVKRKADTTTPTTIDPIHEPPSLPPEPKTTKLGQRRESSRPVKPPKKDVPDSQQHPAPEKSSKVSEQLKCCSGILKEMFAKKHAAYAWPFYKPVDVEALGLHDYCDIIKHPMDMSTIKSKLEAREYRDAQEFGADVRLMFSNCYKYNPPDHEVVAMARKLQDVFEMRFAKMPDEPEEPVVAVSSPAVPPPTKVVAPPSSSDSSSDSSSDSDSSTDDSEEERAQRLAELQEQLKAVHEQLAALSQPQQNKPKKKEKDKKEKKKEKHKRKEEVEENKKSKAKEPPPKKTKKNNSSNSNVSKKEPAPMKSKPPPTYESEEEDKCKPMSYEEKRQLSLDINKLPGEKLGRVVHIIQSREPSLKNSNPDEIEIDFETLKPSTLRELERYVTSCLRKKRKPQAEKVDVIAGSSKMKGFSSSESESSSESSSSDSEDSETGPA

SEQ ID NO: 320438 - DNA, 4635 bp, Artificial Sequence
  derived and/or modified sequence
attctttggaatactactgctagaagtctgacttaagacccagcttatgggccacatggcacccagctgcttctgcagagaaggcaggccactgatgggtacagcaaagtgtggtgctgctggccaagccaaagacccgtgtaggatgactgggcctctgccccttgtgggtgttgccactgtgcttgagtgcctggtgaagaatgtgatgggatcactagcatgtctgcggagagcggccctgggacgagattgagaaatctgccagtaatgggggatggactagaaacttcccaaatgtctacaacacaggcccaggcccaaccccagccagccaacgcagccagcaccaaccccccgcccccagagacctccaaccctaacaagcccaagaggcagaccaaccaactgcaatacctgctcagagtggtgctcaagacactatggaaacaccagtttgcatggcctttccagcagcctgtggatgccgtcaagctgaacctccctgattactataagatcattaaaacgcctatggatatgggaacaataaagaagcgcttggaaaacaactattactggaatgctcaggaatgtatccaggacttcaacactatgtttacaaattgttacatctacaacaagcctggagatgacatagtcttaatggcagaagctctggaaaagctcttcttgcaaaaaataaatgagctacccacagaagaaaccgagatcatgatagtccaggcaaaaggaagaggacgtgggaggaaagaaacagggacagcaaaacctggcgtttccacggtaccaaacacaactcaagcatcgactcctccgcagacccagacccctcagccgaatcctcctcctgtgcaggccacgcctcaccccttccctgccgtcaccccggacctcatcgtccagacccctgtcatgacagtggtgcctccccagccactgcagacgcccccgccagtgcccccccagccacaacccccacccgctccagctccccagcccgtacagagccacccacccatcatcgcggccaccccacagcctgtgaagacaaagaagggagtgaagaggaaagcagacaccaccacccccaccaccattgaccccattcacgagccaccctcgctgcccccggagcccaagaccaccaagctgggccagcggcgggagagcagccggcctgtgaaacctccaaagaaggacgtgcccgactctcagcagcacccagcaccagagaagagcagcaaggtctcggagcagctcaagtgctgcagcggcatcctcaaggagatgtttgccaagaagcacgccgcctacgcctggcccttctacaagcctgtggacgtggaggcactgggcctacacgactactgtgacatcatcaagcaccccatggacatgagcacaatcaagtctaaactggaggcccgtgagtaccgtgatgctcaggagtttggtgctgacgtccgattgatgttctccaactgctataagtacaaccctcctgaccatgaggtggtggccatggcccgcaagctccaggatgtgttcgaaatgcgctttgccaagatgccggacgagcctgaggagccagtggtggccgtgtcctccccggcagtgccccctcccaccaaggttgtggccccgccctcatccagcgacagcagcagcgatagctcctcggacagtgacagttcgactgatgactctgaggaggagcgagcccagcggctggctgagctccaggagcagctcaaagccgtgcacgagcagcttgcagccctctctcagccccagcagaacaaaccaaagaaaaaggagaaagacaagaaggaaaagaaaaaagaaaagcacaaaaggaaagaggaagtggaagagaataaaaaaagcaaagccaaggaacctcctcctaaaaagacgaagaaaaataatagcagcaacagcaatgtgagcaagaaggagccagcgcccatgaagagcaagccccctcccacgtatgagtcggaggaagaggacaagtgcaagcctatgtcctatgaggagaagcggcagctcagcttggacatcaacaagctccccggcgagaagctgggccgcgtggtgcacatcatccagtcacgggagccctccctgaagaattccaaccccgacgagattgaaatcgactttgagaccctgaagccgtccacactgcgtgagctggagcgctatgtcacctcctgtttgcggaagaaaaggaaacctcaagctgagaaagttgatgtgattgccggctcctccaagatgaagggcttctcgtcctcagagtcggagagctccagtgagtccagctcctctgacagcgaagactccgaaacaggtcctgcctaatcattggacacggactcttaataaaacggtcttcagttccagattccttcccagcaagctatagcttaagtccattttcttccgtgaaagggacaggactccatcaagttatggaattcctcagagccctgggcctgtcccccggggtggattagtcatgtccagcagcacacgcctagtcccgccttcgggaaggctgcctgcctggccagccgcccaggcctctctgtgtaaagactgcctggctgtcctgcccagccttcctggttctctggggtcctctgggtgggtggcatctcctggagggtgatgacaatccccaacacatgcattcatgtggtgctactctgtgtgcaaagccagaccccaagtatgttttctctctttgtcccatccctctttttctgggactttggaccctaactacttccctcctgaaccttgcagtgacatcagtccaggagagctctcgttcagtgtgcggaagaacactctgacctctagagctgtcctagataaggagtgggagctttagaggcaaggcctctagaccctggaaggctcagtgaggctcttcccacagcatgcttctcactggtgccctgtaaggctcgagccaccgctgactctgagccttttggagtctttcctccttcgtctccattgttcccgtgcatttccaaaagcttaagttgcctggtgggcatttccccagtttctttggcctccgtcttctcaagtcacatagggaaagtacctcctggaaccaggctgcagtatgcaggacctgccaggcaggcactggtgaagggccttgggcctatcatccccccaaccccacctcaccccacccgcctcctctagtggggtgagtctgggctggtggaccagagagggtgtcacagaccctcagggactgccccatggacacctctgactggtgttaacagtgtgaacattttccccgtcttcagtcccttagaatgacgacagcccctggggttggggcaggcgagtgtggccacatcatccaagccctcccagagacacaaataggcttttttgctctaaaaataaataccagcccttttttggtcacaaatccagcatctcagcagaaaactgcctgacatgaaaagtcccctgaggaactgcatctgcgtttcaggggcttttcattttttctccttttttaaagtgtagattgtgggtgcttcctagaggcctgccttcttctggaactggaagtgggctatcaccatgggcaagcccttgggtgcaggctccccacctgcctgggaactctggcagctctcctcagctccttgggcttgagcagctgcaactgccccagatttgctgtggaagcaggggctagccctggcctcaccagggcctcccggggccctgcattgatgctcaggagttcctgggctgctcttgatcctttctgggcatccagcttccagttaagctctgtttgccaaacaaactattctcagctgccctttggcctgcgcctgatgtgttcctgttgcagtcccgcctgcctgagacaggagcaggcaggagagccttcatgcccagattcccacaggacaattggggagctgctggcattgtctttctgggaagattctgctttcttggaccaaatggcagcctgattaccagtgtcgggcctgcatgctgcccccgacacacgcacgcacgcgcacacacgtgtgcacatgggccatagccacaagccagctctcctccagggtcctttcaacctcgctgtccagggaccctgtccttcttgcccgtggggcttccatctggcagagaacgttcagggcttgttgaacttgaaagctcattagacttaagctgtcacctgtgcttggtgccccaggaacagccagagaggacagtgcccactcacttcttgttggcagcctcctgtgcaggaagtgccagccgggcctcgacgcaccagctggctgtgggtcctgaggaggggcgggaggcggccgctcagtgcagatggggactcctctcctctgccctgaccttaccctccattacctccttcactggagtggggctggggggtgggtggaatcagtgttttaatcggatttttaaaaaacattttatttctttgtacaattaccatcctatgtaaagatgaaatttgtgttgagttgaagattgtcatggaataaagatcacaccgtacttgaggccatcttcatgtaa

SEQ ID NO: 320439 - DNA, 2169 bp, Artificial Sequence
  derived and/or modified sequence
atgagcgccgaatcgggcccaggcacccggctgcggaatttacccgtcatgggcgacgggttagagacaagtcagatgtctacaactcaggcgcaggcccagcctcagcccgccaacgctgcatctacgaatccccctcctcctgagactagcaatcccaataagcccaaacgacagactaatcagctgcaatacctcctacgggtagtattgaaaaccctttggaaacaccagtttgcctggccctttcaacaaccagtagatgccgtgaaattgaacttgcccgactactataaaatcataaagactccaatggatatgggcactattaagaagagactcgagaataactactactggaatgcgcaagagtgcatccaagatttcaacacgatgttcaccaactgttatatctataataaacctggggatgatattgttctaatggctgaagcactggagaaactgtttctgcagaagatcaacgaactgcctactgaagaaactgagattatgatcgtgcaggctaagggtagaggccggggccggaaagaaaccggaaccgcaaagcccggcgtaagtaccgtcccaaacacaacacaggcgagcactccgccccaaacccaaactcctcagccaaatcccccaccagtgcaggccactcctcacccttttcccgctgttaccccagatctgatcgttcagacgcctgtaatgactgtcgtgccaccccagcctctgcagacacctccaccagttcccccccaaccccagcctccaccagctccggccccccagcctgtgcagtcacatccgccaataatcgcggcaacaccccagcctgtgaagactaagaaaggagtcaagcgcaaagctgataccacgaccccgaccaccattgacccaatacatgaaccgccgtcactgccccccgagcctaagactaccaagctcggacagaggagggagagctcaaggcctgtaaaaccaccaaagaaagatgtcccagattcccaacaacaccccgccccagagaagagctctaaagtgtccgagcagttgaaatgttgttccggcattctgaaggagatgtttgccaagaagcatgcagcctatgcttggcctttttacaagcctgttgacgtggaggccctcggactgcacgactattgcgacataatcaaacatccaatggacatgtccaccatcaaatccaaactggaggcccgagaatatagagatgcccaggaattcggggcagacgtcagattaatgtttagcaattgctacaaatacaacccgcctgaccacgaagtggtggcgatggcgcggaagctacaggatgtgtttgagatgaggttcgccaagatgcccgacgagcctgaggaacctgtcgtcgccgttagctcgcccgctgtgccaccacctactaaagtcgtggcccctccatcaagcagtgacagctcttcggactcgtcatcagactctgactcgagtaccgatgatagcgaagaggaacgtgcacaaagattggctgagcttcaggaacagttaaaggcggtgcatgaacagctcgcggcccttagccaacctcagcagaacaagccgaaaaagaaggagaaggacaagaaagaaaaaaagaaagaaaagcacaaacgaaaggaagaggtggaggaaaacaaaaagagcaaagcaaaggagcccccaccaaagaagaccaagaaaaataattcgtcaaactccaatgtgtccaagaaggagcccgcaccaatgaaatccaagcctcccccaacctacgaatcagaagaagaagacaaatgtaagccgatgagctacgaggagaaacggcaactgagcttagacattaacaagctgcccggcgaaaagctgggaagggtagtacatataattcagagccgggagcctagtttaaagaactccaacccagatgaaatagagattgacttcgagacactcaaacctagcactttaagggagctcgagcgttatgtgacgagttgcctgagaaagaagaggaagcctcaagccgagaaggtggatgtcatagccggcagctccaaaatgaagggcttttcctcaagtgaatccgaatcatcctccgagagcagctcctctgattccgaggatagtgagactggcccggcttag

SEQ ID NO: 320440 - DNA, 2169 bp, Artificial Sequence
  derived and/or modified sequence
atgtctgctgagagcggccctggcacccggctgaggaacctgcctgtgatgggagatggcctggagaccagccagatgagcaccacccaggcccaggcccagccccagcctgccaatgctgccagcaccaaccccccacctcctgagaccagcaaccccaacaagcccaagaggcagaccaaccagctgcagtacctgctgcgggtggtgctgaagaccctgtggaagcaccagtttgcctggcccttccagcagcctgtggatgctgtgaagctgaacctgcctgactactacaagatcatcaagacccccatggacatgggcaccatcaagaagaggctggagaacaactactactggaatgcccaggagtgcatccaggacttcaacaccatgttcaccaactgctacatctacaacaagccaggagatgacatcgtgctgatggccgaggccctggagaagctgttcctgcagaagatcaatgagctgcccacagaggagacagagatcatgattgtgcaggccaagggccggggccggggcaggaaggagaccggcacagccaagccaggagtgtccacagtgcccaacaccacccaggccagcaccccaccccagacccagaccccccagcccaaccccccacctgtgcaggccaccccccaccccttccctgctgtgaccccagacctgattgtgcagacccctgtgatgacagtggtgcccccccagcccctgcagaccccacctcctgtgcccccccagccccagcccccaccagccccagccccccagcctgtgcagagccacccccccatcatcgccgccaccccccagcctgtgaagaccaagaagggcgtgaagaggaaggctgacaccaccacccccaccaccatcgaccccatccacgagccccccagcctgcccccagagcccaagaccaccaagctgggccagaggcgggagagcagcaggcctgtgaagccacccaagaaggatgtgcctgacagccagcagcacccagcccctgagaagagcagcaaggtgtctgagcagctgaagtgctgcagcggcatcctgaaggagatgtttgccaagaagcacgccgcctatgcctggcccttctacaagcctgtggatgtggaggccctgggcctgcatgactactgtgacatcatcaagcaccccatggacatgagcaccatcaagagcaagctggaggcccgggagtacagagatgcccaggagtttggagcagatgtgcggctgatgttcagcaactgctacaagtacaaccccccagaccacgaggtggtggccatggccaggaagctgcaggatgtgtttgagatgagatttgccaagatgccagatgagcctgaggagcctgtggtggccgtgagcagccctgctgtgcccccacccaccaaggtggtggccccacccagcagcagtgacagcagcagtgacagcagcagtgacagcgacagcagcacagatgattctgaggaggagcgggcccagaggctggccgagctgcaggagcagctgaaggctgtgcatgagcagctggccgccctgagccagccccagcagaacaagcccaagaagaaggagaaggacaagaaggagaagaagaaggagaagcacaagaggaaggaggaggtggaggagaacaagaagagcaaggccaaggagcccccacccaagaagaccaagaagaacaacagcagcaacagcaatgtgtccaagaaggagcccgcccccatgaagagcaagcccccacccacctatgaaagtgaggaggaggacaagtgcaagcccatgtcctatgaggagaagaggcagctgagcctggacatcaacaagctgcccggggagaagctgggccgggtggtgcacatcatccagagccgggagcccagcctgaagaacagcaacccagatgaaattgaaattgactttgagaccctgaagcccagcaccctgcgggagctggagcgctacgtgaccagctgcctgaggaagaagaggaagccccaggccgagaaggtggatgtgattgctggcagcagcaagatgaagggcttcagcagcagcgagagcgagagcagcagcgagagcagcagcagtgacagtgaagattctgaaacaggccctgcctag

SEQ ID NO: 320441 - DNA, 2169 bp, Artificial Sequence
  derived and/or modified sequence
atgagcgccgagagcggccccggcacccggctgcggaacctgcccgtgatgggcgacggtcttgagaccagtcagatgagtacaactcaagcacaagcccagccacagcccgccaacgccgcctctacaaatccccctccccctgagaccagcaaccctaacaagcccaaaagacagacaaatcagctgcaataccttcttagggtggtgctgaaaacgctgtggaagcaccagtttgcttggcctttccagcagcccgtagatgccgtgaaactgaacttacctgactattacaagatcattaaaacacccatggatatgggaacaattaagaaaaggctggagaacaactattactggaacgcacaggagtgcatacaggattttaacacgatgttcaccaactgctacatatacaacaagccaggagacgatattgtcctcatggctgaagccctggagaagttgttcttgcaaaagattaatgagctgccgaccgaggaaaccgagattatgatcgtgcaggcaaagggtagaggtagggggaggaaagagaccgggacagccaaacccggagtcagcaccgtccctaatacaactcaggcttctacacctcctcaaactcagacaccccagcccaatcctccaccagtgcaggctacaccccacccgtttcctgctgtaactcccgacctgatcgtgcagacgccagtaatgaccgtcgttcccccacagccactacagacgcctcctccggtgcccccacaaccacagcctcccccggccccagcacctcagcctgtgcagtctcacccacccatcattgccgccaccccacagcctgtcaagaccaagaagggagtcaagcggaaggccgacacgacaactccaacaaccatcgatcctattcacgaacccccctcactgcctcccgaacctaaaactaccaagctgggacagagaagagaatccagccgccctgtgaagccacccaaaaaggatgttcctgactcccagcagcatccagcaccggaaaagagttctaaggtaagcgaacaactgaaatgttgcagcggcatcctgaaagagatgtttgctaaaaagcatgcagcctatgcctggcctttttataaacctgtggacgtggaagcccttggattgcatgactactgcgatattatcaagcacccaatggatatgagcacgatcaagtcaaaacttgaagcgagagagtatagagacgcacaggagtttggggctgacgtgcgtctgatgttctccaactgctacaagtacaacccccccgaccacgaggtcgttgcaatggccagaaaacttcaggacgttttcgagatgcgcttcgctaaaatgccagacgaacccgaggagccagtggtagcagtgtcatcccccgctgttccacctcccaccaaagtggtcgcaccccctagcagtagcgatagctctagtgattcaagcagtgactcagactcgtctacggacgatagtgaggaagaaagagcacagaggcttgctgaactgcaggagcagctgaaggccgtacatgaacaattggccgcccttagtcagccccagcagaacaaaccaaagaaaaaagaaaaggacaagaaagaaaagaaaaaggagaagcacaagagaaaagaagaagtggaggagaacaaaaagtctaaagcaaaggagcctccgccaaagaagaccaagaagaacaatagttccaactcaaacgtctccaagaaggaacccgctccaatgaagagcaaaccacctccaacttacgagagcgaagaagaggataagtgtaaacctatgagctatgaggagaaacgtcagttgtccctggacatcaacaaactgccaggagaaaagcttggacgggtggtccacataattcagagtcgcgagccatccctcaagaactccaaccctgacgaaattgagattgatttcgaaacactcaaaccctcgaccctgagggagctggaaagatatgttaccagctgcctgaggaaaaagaggaagccccaagccgagaaagtcgacgttatcgcgggttccagtaaaatgaaaggcttttcttcgtccgagagtgagtcctcctccgaaagctcaagctcagactccgaggacagtgaaaccgggcccgcgtag

SEQ ID NO: 320442 - DNA, 2169 bp, Artificial Sequence
  derived and/or modified sequence
atgtccgcagaaagtgggcctggcactcggttaaggaatttgcccgttatgggcgacggattggagacctcacagatgagcacaacgcaggcacaggcccagcctcagccggctaatgctgcatccacaaaccctcctccccctgaaacgtcaaaccccaataagccaaaaaggcagacaaatcagttgcagtacctgctgagggtcgtccttaagaccctctggaaacatcaattcgcgtggccctttcaacagccagtggacgcagtcaagttaaatcttcctgactactataagatcataaaaacccctatggacatgggcacaatcaagaaacggttggagaacaattactattggaacgcacaggaatgcattcaggattttaacacgatgtttacaaattgctacatttataataaaccgggagatgatattgtgctaatggccgaagctctggagaagctctttctgcagaaaattaatgaactgcccaccgaggaaacagagattatgatcgtccaggccaaggggcgaggtagaggaaggaaggagactggaactgctaagccgggtgtctctaccgtgccaaatactacgcaggccagtactccacctcaaactcagaccccccaaccaaatccacctcccgtccaggcgactccacacccatttcctgcggtgacccctgacctcatcgtccagactcccgtcatgaccgtggttccgccacagcccttgcagacacctccaccggtgccccctcagccacagccacctcctgcccctgcgcctcagcctgttcagtcacatcccccaatcattgccgctaccccccaacccgttaaaaccaaaaagggggtgaagagaaaagctgacaccacaacacccacaactatcgaccccatccacgagcctccttcactgccacctgaacccaagaccacaaaactaggccagagacgcgagagttctcgacccgttaaacccccaaagaaggatgtgcccgatagccagcaacatccagccccagaaaagagctcaaaagtgagtgaacagctcaaatgctgcagcggaatcctgaaggagatgtttgcaaaaaaacacgcagcctacgcctggcctttttacaagccagtggatgtggaagcacttgggctgcatgattattgtgatattatcaagcatcccatggacatgtccaccatcaaatccaaactggaagcaagagaataccgcgacgcacaggaatttggagccgatgtgaggttgatgttctctaattgctataaatacaatcctccagaccacgaagtggttgctatggcaagaaaactgcaggatgtgttcgagatgcgttttgcaaaaatgcccgacgagccagaagagccagtggtggccgtatcttctcccgctgtaccaccgcctacaaaagtggtagcacccccaagctcttccgactccagctctgactcctcttcagactcggatagcagtacggacgacagcgaagaagagcgtgcccagcggttggccgagctgcaggaacagctgaaagctgtccacgagcaactagctgccctgtcccagcctcagcagaataagccaaagaaaaaggagaaagataaaaaggagaagaaaaaagaaaagcacaagcgaaaagaagaggtcgaggagaacaagaagtctaaagccaaagaaccaccaccaaagaaaactaagaagaataactcatccaactccaatgtgtcaaagaaagaacctgctcctatgaagagtaaacctccgcctacctatgagtcagaggaggaggataagtgtaaaccaatgagctatgaagagaagcgccagctttctctcgacattaacaagcttccgggagagaagctgggccgtgtcgtgcatatcatccaaagcagagaaccttcccttaagaattctaatcccgatgagatagagatcgactttgagacactgaaaccttcaactttgcgagaactagagagatacgttacaagctgtcttcgcaagaaacggaagccacaggccgagaaagttgatgttatcgctggctcctccaaaatgaagggcttcagcagctccgaatctgagagcagctcagagagcagctcctccgactccgaagatagcgagaccggacctgcgtag

SEQ ID NO: 320443 - DNA, 2169 bp, Artificial Sequence
  derived and/or modified sequence
atgagcgccgagagcggccccggcaccagactgagaaacctgcccgtgatgggcgacggcctggagaccagccagatgagcaccacccaggcccaggcccagccccagcccgccaacgccgccagcaccaacccccccccccccgagaccagcaaccccaacaagcccaagagacagaccaaccagctgcagtacctgctgagagtggtgctgaagaccctgtggaagcaccagttcgcctggcccttccagcagcccgtggacgccgtgaagctgaacctgcccgactactacaagatcatcaagacccccatggacatgggcaccatcaagaagagactggagaacaactactactggaacgcccaggagtgcatccaggacttcaacaccatgttcaccaactgctacatctacaacaagcccggcgacgacatcgtgctgatggccgaggccctggagaagctgttcctgcagaagatcaacgagctgcccaccgaggagaccgagatcatgatcgtgcaggccaagggcagaggcagaggcagaaaggagaccggcaccgccaagcccggcgtgagcaccgtgcccaacaccacccaggccagcacccccccccagacccagaccccccagcccaaccccccccccgtgcaggccaccccccaccccttccccgccgtgacccccgacctgatcgtgcagacccccgtgatgaccgtggtgcccccccagcccctgcagacccccccccccgtgcccccccagccccagcccccccccgcccccgccccccagcccgtgcagagccacccccccatcatcgccgccaccccccagcccgtgaagaccaagaagggcgtgaagagaaaggccgacaccaccacccccaccaccatcgaccccatccacgagccccccagcctgccccccgagcccaagaccaccaagctgggccagagaagagagagcagcagacccgtgaagccccccaagaaggacgtgcccgacagccagcagcaccccgcccccgagaagagcagcaaggtgagcgagcagctgaagtgctgcagcggcatcctgaaggagatgttcgccaagaagcacgccgcctacgcctggcccttctacaagcccgtggacgtggaggccctgggcctgcacgactactgcgacatcatcaagcaccccatggacatgagcaccatcaagagcaagctggaggccagagagtacagagacgcccaggagttcggcgccgacgtgagactgatgttcagcaactgctacaagtacaacccccccgaccacgaggtggtggccatggccagaaagctgcaggacgtgttcgagatgagattcgccaagatgcccgacgagcccgaggagcccgtggtggccgtgagcagccccgccgtgcccccccccaccaaggtggtggccccccccagcagcagcgacagcagcagcgacagcagcagcgacagcgacagcagcaccgacgacagcgaggaggagagagcccagagactggccgagctgcaggagcagctgaaggccgtgcacgagcagctggccgccctgagccagccccagcagaacaagcccaagaagaaggagaaggacaagaaggagaagaagaaggagaagcacaagagaaaggaggaggtggaggagaacaagaagagcaaggccaaggagcccccccccaagaagaccaagaagaacaacagcagcaacagcaacgtgagcaagaaggagcccgcccccatgaagagcaagcccccccccacctacgagagcgaggaggaggacaagtgcaagcccatgagctacgaggagaagagacagctgagcctggacatcaacaagctgcccggcgagaagctgggcagagtggtgcacatcatccagagcagagagcccagcctgaagaacagcaaccccgacgagatcgagatcgacttcgagaccctgaagcccagcaccctgagagagctggagagatacgtgaccagctgcctgagaaagaagagaaagccccaggccgagaaggtggacgtgatcgccggcagcagcaagatgaagggcttcagcagcagcgagagcgagagcagcagcgagagcagcagcagcgacagcgaggacagcgagaccggccccgcctag

SEQ ID NO: 320444 - protein, 1130 aa, Artificial Sequence
  derived and/or modified sequence
SYSPYRAGRQGPQQRGRDPGIQLTELPRKDGADAVFPGPSLEPPAGSSGVKATGTLKRPTSLSRHASAAGFPLSGAASWTLGRSHRSPLTAASPGELPTEGAGPDVVEDISHLLADVARFAEGLEKLKECVLRDDLLEARRPRAHECLGEALRVMHQIISKYPLLNTVETLTAAGTLIAKVKAFHYESNNDLEKQEFEKALETIAVAFSSTVSEFLMGEVDSSTLLAVPPGDSSQSMESLYGPGSEGTPPSLEDCDAGCLPAEEVDVLLQRCEGGVDAALLYAKNMAKYMKDLISYLEKRTTLEMEFAKGLQKIAHNCRQSVMQEPHMPLLSIYSLALEQDLEFGHSMVQAVGTLQTQTFMQPLTLRRLEHEKRRKEIKEAWHRAQRKLQEAESNLRKAKQGYVQRCEDHDKARFLVAKAEEEQAGSAPGAGSTATKTLDKRRRLEEEAKNKAEEAMATYRTCVADAKTQKQELEDTKVTALRQIQEVIRQSDQTIKSATISYYQMMHMQTAPLPVHFQMLCESSKLYDPGQQYASHVRQLQRDQEPDVHYDFEPHVSANAWSPVMRARKSSFNVSDVARPEAAGSPPEEGGCTEGTPAKDHRAGRGHQVHKSWPLSISDSDSGLDPGPGAGDFKKFERTSSSGTMSSTEELVDPDGGAGASAFEQADLNGMTPELPVAVPSGPFRHEGLSKAARTHRLRKLRTPAKCRECNSYVYFQGAECEECCLACHKKCLETLAIQCGHKKLQGRLQLFGQDFSHAARSAPDGVPFIVKKCVCEIERRALRTKGIYRVNGVKTRVEKLCQAFENGKELVELSQASPHDISNVLKLYLRQLPEPLISFRLYHELVGLAKDSLKAEAEAKAASRGRQDGSESEAVAVALAGRLRELLRDLPPENRASLQYLLRHLRRIVEVEQDNKMTPGNLGIVFGPTLLRPRPTEATVSLSSLVDYPHQARVIETLIVHYGLVFEEEPEETPGGQDESSNQRAEVVVQVPYLEAGEAVVYPLQEAAADGCRESRVVSNDSDSDLEEASELLSSSEASALGHLSFLEQQQSEASLEVASGSHSGSEEQLEATAREDGDGDEDGPAQQLSGFNTNQSNNVLQAPLPPMRLRGGRMTLGSCRERQPEFV

SEQ ID NO: 320445 - protein, 1163 aa, Artificial Sequence
  derived and/or modified sequence
MFSRKKRELMKTPSISKKNRAGSPSPQPSGPHFISGETEAVSRPENPFNELPSDLPKELPRKDGADAVFPGPSLEPPAGSSGVKATGTLKRPTSLSRHASAAGFPLSGAASWTLGRSHRSPLTAASPGELPTEGAGPDVVEDISHLLADVARFAEGLEKLKECVLRDDLLEARRPRAHECLGEALRVMHQIISKYPLLNTVETLTAAGTLIAKVKAFHYESNNDLEKQEFEKALETIAVAFSSTVSEFLMGEVDSSTLLAVPPGDSSQSMESLYGPGSEGTPPSLEDCDAGCLPAEEVDVLLQRCEGGVDAALLYAKNMAKYMKDLISYLEKRTTLEMEFAKGLQKIAHNCRQSVMQEPHMPLLSIYSLALEQDLEFGHSMVQAVGTLQTQTFMQPLTLRRLEHEKRRKEIKEAWHRAQRKLQEAESNLRKAKQGYVQRCEDHDKARFLVAKAEEEQAGSAPGAGSTATKTLDKRRRLEEEAKNKAEEAMATYRTCVADAKTQKQELEDTKVTALRQIQEVIRQSDQTIKSATISYYQMMHMQTAPLPVHFQMLCESSKLYDPGQQYASHVRQLQRDQEPDVHYDFEPHVSANAWSPVMRARKSSFNVSDVARPEAAGSPPEEGGCTEGTPAKDHRAGRGHQVHKSWPLSISDSDSGLDPGPGAGDFKKFERTSSSGTMSSTEELVDPDGGAGASAFEQADLNGMTPELPVAVPSGPFRHEGLSKAARTHRLRKLRTPAKCRECNSYVYFQGAECEECCLACHKKCLETLAIQCGHKKLQGRLQLFGQDFSHAARSAPDGVPFIVKKCVCEIERRALRTKGIYRVNGVKTRVEKLCQAFENGKELVELSQASPHDISNVLKLYLRQLPEPLISFRLYHELVGLAKDSLKAEAEAKAASRGRQDGSESEAVAVALAGRLRELLRDLPPENRASLQYLLRHLRRIVEVEQDNKMTPGNLGIVFGPTLLRPRPTEATVSLSSLVDYPHQARVIETLIVHYGLVFEEEPEETPGGQDESSNQRAEVVVQVPYLEAGEAVVYPLQEAAADGCRESRVVSNDSDSDLEEASELLSSSEASALGHLSFLEQQQSEASLEVASGSHSGSEEQLEATAREDGDGDEDGPAQQLSGFNTNQSNNVLQAPLPPMRLRGGRMTLGSCRERQPEFV

SEQ ID NO: 320446 - DNA, 3393 bp, Artificial Sequence
  derived and/or modified sequence
tcctactcgccatacagggcgggcagacagggaccacagcaaagaggtcgagaccccgggatccaactcacggaactccctaggaaggatggggcagacgctgtgttccccgggccctccctcgagccccctgcaggttcatctggcgtgaaggcgaccgggactctgaagcgccccactagtctcagcagacatgcctctgcggccgggttccccctgagtggagccgcatcctggaccttaggtagatcgcaccggtcccctttgactgcagcttctcccggggaattaccgacagagggggctggacctgacgtggtcgaggatatttcacacttgctcgcagatgtcgcaaggttcgccgagggcctcgaaaaactcaaagaatgcgtactgcgggatgatctcctcgaagctaggaggcccagagcccatgagtgcctaggagaagctcttcgggtgatgcaccaaataatatccaaataccctctacttaacacggtggagaccctgactgccgctggcacactgatcgcaaaggttaaagcgtttcattatgagtccaacaatgatcttgaaaagcaggaattcgagaaagctctggagacaattgctgtcgctttctcaagtacagtgtccgaatttttgatgggagaagttgactcaagtaccttactggccgttcctcctggcgacagcagccagtccatggagtcgctctacggtccggggtcagaggggacaccgccctccctggaagattgcgacgccggctgcttacccgccgaagaagtggacgtactgctgcagaggtgtgaaggcggtgttgacgctgccctgctgtacgctaagaatatggccaagtatatgaaagatttaatcagctacctggaaaaacgaaccacactggaaatggagttcgccaagggcctccagaagatcgcacataactgtaggcagagcgtcatgcaggaaccacatatgcctttactcagtatctactccctggcccttgaacaggacttggagttcgggcactcaatggtccaagcagtgggtactttgcagacccagacattcatgcagcctctcacactgcgacgtctcgagcacgaaaaacggcgaaaggagattaaagaggcctggcatagagcccagagaaaactccaagaagccgaatcaaatctgaggaaggccaaacagggttatgttcaaagatgcgaggaccacgataaagcacggttcctggtggctaaagcagaggaagagcaggccgggagtgctcctggggcaggcagcacagctacaaagactttagataagcgaaggcggttggaggaggaggcaaagaataaagccgaggaagccatggcaacatacaggacctgcgtggccgacgccaagacgcagaaacaagagcttgaggacaccaaggttacggccctcagacagatccaggaagtcatcagacagtcggaccaaactataaaatcagcaactatatcctactatcagatgatgcacatgcagactgcgccgctgccagttcacttccagatgctctgtgagtctagcaagctttacgatccgggccagcagtacgccagtcatgtaagacagctgcagagggatcaggaaccagacgtccactatgactttgagccacatgtgagcgcaaatgcatggtccccggtaatgcgcgcgcgcaaaagcagtttcaatgtaagcgatgtggctcgccctgaagctgccggctcgccaccagaggaggggggctgtactgaaggcacccccgctaaggatcatcgagcagggaggggccatcaggtccataagtcctggcctttgagcattagcgattccgattctggcttggacccgggccccggagctggcgatttcaagaaatttgaaaggacctctagcagtggtaccatgtcatccacggaggagcttgtcgatcccgacggaggcgctggcgcttctgcattcgaacaggctgatctgaacggcatgaccccagaattgccggtggccgttccatcagggccgttccgccacgaaggtctgagtaaagctgcccgcacacacagactgcgaaaattgcgaacacccgctaagtgccgggaatgcaattcgtatgtatacttccagggcgctgagtgcgaagaatgttgcttagcctgccataagaagtgcttggaaaccctggccatccagtgcggacacaagaagctccaaggccgtttacagctgttcggtcaggatttctcccatgcagctaggtccgcacctgacggtgtgccttttattgtgaaaaaatgtgtttgtgaaattgagcggagggccctgcgaaccaaggggatatatcgcgtgaacggggttaaaacacgggtagagaaactgtgccaggccttcgagaacgggaaggagctagtggagctgagccaagcctcccctcacgacatctccaacgtactgaagttatatctgcggcagttgcccgagcccctcatcagctttagactctaccacgaacttgtgggtctggccaaggacagtttgaaagcagaagccgaggcgaaagcagcgagcaggggcagacaggacggttcagaatccgaagcagtggccgtcgccctcgcagggcgtcttagagagcttttgagggatttgccacccgagaaccgcgcatcccttcagtacctgctgaggcatctgagaagaattgtggaggtggagcaagacaacaaaatgacacctggaaacttgggtatagtgtttggaccaactctattgagacccaggcccaccgaagcaactgtgtctctatctagcctcgtggattacccccatcaggcccgcgtgattgagaccttgattgtgcactatggactggtgttcgaggaagagccggaagagactcccggtggacaggatgagagcagcaatcagcgtgccgaggtcgtggtgcaggtcccctacttagaagcaggagaggctgtggtgtacccattacaggaagccgctgcggatggctgcagagagtctagggttgtctccaacgattcggactccgaccttgaggaagcatctgaactgttgtcttcttcagaggcttcagccctgggtcacctgagttttctcgagcagcagcagtccgaggcaagcctggaagtcgcttctgggtcccatagtggatccgaggagcagctggaggcaactgccagagaggatggggacggggacgaggacggaccggcacagcagctgtctggatttaacacaaaccaatcaaataacgtgttgcaagcaccactgccaccaatgcggctgcggggggggaggatgaccctaggcagctgtcgggagaggcagccggagtttgtctag

SEQ ID NO: 320447 - DNA, 4015 bp, Artificial Sequence
  derived and/or modified sequence
agctacagcccctaccgggcgggacggcaggggccacagcagagaggccgggaccccggcattcagctcacggagctgcccaggaaggatggggctgacgcggtgttccccggaccaagcctggagccgcccgctgggtcctccggcgtcaaggccacagggaccctcaagcggcccaccagcctgagccgccacgccagcgcggctggcttccccctgtcgggtgctgcctcctggacactgggccggagccaccggagcccactgacagccgccagcccgggcgagctgcccaccgagggtgccggcccggacgtcgtcgaggacatctcccatctgctggcggacgtggcccgcttcgctgagggccttgagaaacttaaggagtgtgtgttgcgtgacgacctccttgaggcccgccgcccgcgggcccacgagtgcctgggtgaggctctgcgtgtcatgcatcagatcatctccaagtacccgctgctgaacaccgtggagacgctcaccgcagccggcaccctcattgccaaggtcaaagccttccattatgagagcaacaatgatctggagaaacaggagttcgagaaggccctggagacgattgctgtggccttcagtagcacagtgtccgagttcctcatgggtgaagtggacagcagcaccctcctagcagtgcctcctggggactcgagccagtccatggaaagcctgtatggaccgggcagtgagggcacgcctcccagcctggaagactgtgacgccggctgcctgcccgccgaggaggtggacgtgctgctacagcgctgtgaggggggcgtggatgccgcactgctgtatgccaagaacatggccaagtacatgaaggacctcatcagctacctggagaagcggacgacgctggagatggagtttgccaagggcctgcagaagatcgctcacaactgcagacagagcgtcatgcaggagccccacatgccgctcctgtccatctactcgctggccctggagcaggacctggagttcggccacagcatggtgcaggcggtgggcaccttgcagacccagaccttcatgcagcccctgaccctgcggcggcttgaacacgagaagcgcaggaaggagatcaaggaggcctggcaccgtgcccagaggaagctgcaagaggcggagtccaacctgcgcaaggccaagcagggttacgtgcagcgctgcgaggaccacgacaaggctcgcttcctcgtggccaaggcggaggaggagcaggctggcagcgcgccgggagcaggcagcacggccaccaagaccctggacaagcggcggcggctggaggaggaggccaagaacaaggcggaggaagctatggccacctaccgcacctgcgtggccgacgcgaagacgcagaagcaggagctggaggataccaaggtgacggcgctgcggcagatccaggaggtcatccggcagagcgaccaaaccatcaagtcggccacgatctcctactaccagatgatgcatatgcagacggcgccgctgcccgtgcacttccagatgctgtgtgagagcagcaagctgtatgacccaggccagcagtacgcctcccacgtgcgccagctgcagcgggaccaggagcccgatgtgcactacgactttgagccccacgtctccgccaacgcctggtcccccgtcatgcgtgcccggaagagcagcttcaacgtgagtgatgtggcgcggccggaggctgccgggagccccccagaagaaggcgggtgcactgagggcacacctgccaaggaccacagggccgggcgaggacaccaggttcacaagtcatggccgctctcgatctcagactcggacagtgggctggaccccggccctggcgcaggggactttaagaagttcgagcggacgtcatccagtggtaccatgtcgtccacggaggagctggtggacccagacggtggagccggggcttcagcctttgagcaggctgacctcaacggcatgacccccgagctgccggtggccgtgcccagtggaccgttccgccacgaggggctgtccaaggcggcccgtactcaccggctccggaagctccgcacgcccgccaagtgccgcgagtgcaacagctacgtctacttccagggtgctgagtgtgaagagtgctgcctggcctgccacaagaaatgtctggagacgctggccatacagtgcgggcacaagaagctgcaaggccgcctgcagctgttcggccaggacttcagccacgcggcccgcagcgcccccgacggcgtgcccttcatcgtcaagaagtgcgtctgcgagatcgagcggcgggcgctgcgcaccaagggcatctaccgggtcaatggggtaaagacacgcgtggagaagctgtgccaggccttcgagaacggcaaggagctggtcgagctgtcgcaggcctcgccccacgacatcagcaacgtcctcaagctctacctgcgtcagcttcccgagccgctcatctccttccgcctctaccacgagctcgtagggctggccaaggacagcctgaaggcagaggccgaggccaaggcggcgtcccggggccggcaggacggctcggagagcgaggcagtggcggtggccctggcaggtcggctgcgggagctcctgcgggacctgccgcctgagaaccgggcctcgctgcagtacctgctgcgtcacctacgcaggatcgtggaggtggagcaggacaacaagatgacccccgggaacctgggcatcgtgttcgggcccacgctgcttcggccacggcccaccgaggccaccgtgtccctctcctccctggtggattatccccatcaggcccgcgtcatcgagactctcatcgtccactacggcctggtcttcgaggaggagccggaggagacccccgggggccaggacgagtcatccaaccagcgagctgaggtagtcgtccaggtgccgtacctggaggcgggcgaggcggtggtctacccgctgcaggaggcggcggcggacgggtgcagagaatcccgagttgtgtccaacgattcggactcggacctagaggaggcctccgagctgctgtcctcatcggaggccagtgccctgggccacctcagcttcctggagcagcagcagagcgaggccagcctagaggtggcttctggcagccacagcggcagtgaggagcagctggaggccacagcccgggaggacggggacggggacgaggacggcccggcccagcagctctcaggattcaacaccaaccagtccaacaacgtgctgcaggccccactgccccccatgaggctccgtggcgggcggatgacactgggctcctgcagggaaaggcagccggaattcgtgtgagctggggtggggctgggaccacaggtggcttctctcttgcctgctcctgtccctccagcacgtcccctgcaccacggcatagcttaggtgcgccgtcctggggtcgctgccgagagcgcctggacttcgacgtcccaccagcgggcgcctcctcccagaggcttccaggagcacgagggccttgcggcacaggactgtgccctgtgctgtcccctgcaccccggctcagctgagctggggaacactgctgtcgtgtgaagtcacagtggccttgttggtgcccacagggctgtgtggatggaggaagctgtccctgcccagtgcatcccccaggtcatcacggggacgcaggaggcaggccctgccctgccctctcctcacaggtctgttgcagggactccagaaaccattctgggagccgtggatgggggcggagctggggtttggtgcagtttccagggtgcagtacagcagggcctgaatactggccctggactcccttttccagaacaccaggtgtggccacctggggctcaggtacacagtggggtctctcggaagccaccgtgtggttctttcacaggcacgtttattttgctgaaataaaaagtttttaatcggg

SEQ ID NO: 320448 - DNA, 3393 bp, Artificial Sequence
  derived and/or modified sequence
tcctacagcccctacagagctggccggcagggcccccagcagaggggccgggaccccggcatccagctgacagagctgcccaggaaggatggagcagatgctgtgtttcctggccccagcctggagcccccagctggcagcagcggcgtgaaggccaccggcaccctgaagaggcccaccagcctgagcagacatgccagcgctgctggcttccccctgagcggggccgcctcctggaccctgggccgcagccacaggagccccctgacagctgccagccctggagagctgcccacagaaggagctggcccagatgtggtggaggacatcagccacctgctggctgatgtggccaggtttgctgagggcctggagaagctgaaggaatgtgtgctgagagatgacctgctggaggcccggcggccccgggcccacgagtgcctgggggaggccctgcgggtgatgcaccagatcatcagcaagtaccccctgctgaacacagtggagaccctgacagctgctggcaccctcatcgccaaggtgaaggccttccactatgagagcaacaatgacctggagaagcaggagtttgagaaggccctggagaccatcgctgtggccttcagcagcacagtgtctgagttcctgatgggagaggtggacagcagcaccctgctggccgtgcccccaggggacagcagccagagcatggagagcctgtatggccctggcagcgagggcaccccacccagcctggaggactgtgatgctggctgcctgcctgctgaggaggtggatgtgctgctgcagagatgtgagggcggcgtggatgctgccctgctgtatgccaagaacatggccaagtacatgaaggacctgatctcctacctggagaagaggaccaccctggagatggagtttgccaagggcctgcagaagatcgcccacaactgccggcagagcgtgatgcaggagccccacatgcccctgctgagcatctacagcctggccctggagcaggacctggagtttggccacagcatggtgcaggccgtgggcaccctgcagacccagaccttcatgcagcccctgaccctgcggcggctggagcacgagaagaggaggaaggagatcaaggaggcctggcaccgggcccagaggaagctgcaggaggccgagagcaacctgaggaaggccaagcagggctacgtgcagagatgtgaggaccatgacaaggcccgcttcctggtggccaaggccgaggaggagcaggccggcagcgcccctggagctggcagcacagccaccaagaccctggacaagagaagaaggctggaggaggaggccaagaacaaggccgaggaggccatggccacctaccgcacctgtgtggctgatgccaagacccagaagcaggagctggaggacaccaaggtgacagccctgcggcagatccaggaggtgatccggcagagcgaccagaccatcaagagcgccaccatctcctactaccagatgatgcacatgcagacagcccccctgcctgtgcacttccagatgctgtgtgagagcagcaagctgtatgaccccggccagcagtatgccagccacgtgcggcagctgcagagggaccaggagccagatgtgcactatgactttgagccccacgtgtctgccaatgcctggagccctgtgatgagggccaggaagagcagcttcaacgtgtctgatgtggcccggcctgaggccgccggcagccccccagaggagggcggctgcacagagggcaccccagccaaggaccaccgggccggccggggccaccaggtgcacaagtcctggcccctgagcatcagtgacagcgacagcggcctggaccccggccctggagctggggacttcaagaagtttgagaggaccagcagcagcggcaccatgagcagcacagaggagctggtggaccctgatggaggagctggggccagcgcctttgagcaggccgacctgaatggcatgaccccagagctgcctgtggccgtgcccagcggccccttcagacatgagggcctgagcaaggccgcccggacccaccggctgaggaagctgcggaccccagccaagtgccgggagtgcaacagctatgtgtacttccagggcgcagaatgtgaggagtgctgcctggcctgccacaagaagtgcctggagaccctggccatccagtgtggccacaagaagctgcagggccgcctgcagctgtttggccaggacttcagccacgccgcccggagcgccccagatggagtgcccttcatcgtgaagaagtgtgtgtgtgaaattgaaagaagagccctgcggaccaagggcatctacagagtgaatggagtgaagaccagggtggagaagctgtgccaggcctttgaaaatggcaaggagctggtggagctgagccaggccagcccccatgacatcagcaatgtgctgaagctgtacctgcggcagctgcctgagcccctcatctccttccggctgtaccacgagctggtgggcctggccaaggacagcctgaaggccgaggccgaggccaaggccgccagccggggccggcaggacggcagcgagagcgaggccgtggccgtggccctggccggccgcctgcgggagctgctgcgggacctgcccccagaaaatagagccagcctgcagtacctgctgcggcacctgcggcgcatcgtggaggtggagcaggacaacaagatgaccccaggcaacctgggcatcgtgtttggccccaccctgctgcggccccggcccacagaggccaccgtgtccctgagcagcctggtggactacccccaccaggcccgggtgattgagaccctgattgtgcactacggcctggtgtttgaggaggagcctgaggagacccctgggggccaggatgagagcagcaaccagagagctgaggtggtggtgcaggtgccctacctggaggccggggaggccgtggtgtaccccctgcaggaggccgctgctgatggctgccgggagagccgggtggtgtccaatgacagcgacagcgacctggaggaggccagcgagctgctgagcagcagcgaggccagcgccctgggccacctgtccttcctggagcagcagcagagcgaggccagcctggaggtggccagcggcagccacagcggcagcgaggagcagctggaggccacagcccgggaggatggagatggagatgaagatggccctgcccagcagctgagcggcttcaacaccaaccagagcaacaacgtgctgcaggcccccctgccccccatgaggctgcggggcggccgcatgaccctgggcagctgccgggagcggcagcctgagtttgtgtag

SEQ ID NO: 320449 - DNA, 3393 bp, Artificial Sequence
  derived and/or modified sequence
agctacagcccctaccgggccggccggcagggcccccagcagcggggacgggacccgggcatccagctcacagagttgccaagaaaggacggcgctgatgctgtctttcccggaccctccctggaacctcccgcagggtcctctggggtgaaggctaccggcaccctcaagcgtcccaccagtctcagtcggcacgcttccgccgccgggttcccgctcagcggggcagcgtcttggacgctgggacgatcccatagatcccctttgactgccgccagtcccggggaactgcccactgagggagctgggcccgacgtggtagaagatatcagccacttgctggccgacgtagcaagattcgcagaaggtctagagaagttgaaggagtgcgtcctcagagatgacctgcttgaagcccgcaggcctcgggcccacgaatgtctcggggaggctttgcgcgtgatgcaccagattatatcgaagtatcctctactaaatactgtggagacactgacagctgcgggtacacttattgcgaaggtgaaagcattccactacgaatctaataacgaccttgaaaagcaggagtttgagaaggctctagaaacgatcgccgtggccttcagctctactgtctccgagtttcttatgggggaagtcgactctagtactcttctcgcagtaccgcccggggattcgtctcagtctatggagtcgctgtacggacctgggtcagagggcaccccaccttcgctggaggactgcgacgcaggttgcttgccagcagaagaagtcgacgttctcctgcagcggtgcgaaggcggagtggacgccgcactcttgtatgcaaagaacatggcaaagtatatgaaggatctgatctcatatctcgaaaaaagaactaccttggagatggaatttgccaaggggctccaaaagatcgcacataactgtaggcagtccgtgatgcaggagccccacatgcctctcctctccatttatagccttgctcttgagcaggacttggagtttggacactccatggttcaggctgttgggactctgcagacacagacattcatgcaacccctgaccttaaggcggttggagcacgagaagagacgcaaggaaataaaagaagcctggcatcgggctcaacgtaaactgcaggaggccgagagtaacctgagaaaagctaagcagggatacgtgcagaggtgtgaggatcatgacaaggccaggttcctggtggcaaaggcagaagaggagcaggccggctcggcccccggcgccggcagtaccgctacaaaaactctggataagagacggcggttagaggaggaggctaaaaacaaagccgaggaggcaatggccacttatcggacgtgcgtggcagatgctaagacccagaagcaagagctcgaggatacaaaagtcacagctttgaggcagatacaggaagtcattcgacagtccgatcaaacaattaagtctgctaccatctcatactatcagatgatgcatatgcagactgcccctttacccgtgcacttccagatgctctgcgaaagctccaagctctacgatccaggtcagcagtacgcttctcacgtaagacagcttcagagggatcaggagcccgacgtgcactatgatttcgagccccacgtcagtgccaacgcctggagccccgttatgcgggcaaggaaaagcagctttaatgtgtccgacgtcgctaggcctgaggcagcaggctccccccccgaggaaggtgggtgcacggaggggacaccggccaaggatcatcgggcgggacgcggccaccaggtccacaagtcatggcccctctcaatttccgactccgattcgggcttggaccctggacctggggccggagattttaagaaattcgagcgcacctcatcttccgggaccatgagtagtaccgaggagctcgtcgatccagacggaggggctggcgctagtgccttcgagcaggcagacttgaacggcatgacgcctgagctgcccgtcgccgtaccttcaggcccattccgccacgaagggctgtctaaggctgctaggacgcacaggctgcggaagctgaggacccccgctaagtgcagggagtgcaacagctatgtctatttccagggggccgaatgcgaagagtgttgtctggcctgccataaaaaatgccttgagacactcgctatacaatgcggtcataagaaactccaggggcgccttcagctgttcggtcaggacttctctcatgccgccaggtccgctccagacggggtcccattcatcgtcaagaaatgtgtctgtgaaattgaaaggcgggcactgaggactaagggaatatatcgcgtgaacggtgtaaagacccgagtggagaagctgtgccaggcctttgaaaacggtaaggagctagtggagctcagccaggcctcaccacatgatatatccaatgttctgaagctgtacctgaggcaactaccagagccactgatttctttccggctctaccatgagctggtgggcctagcaaaggacagcttgaaagctgaagccgaagccaaggccgctagccgaggcagacaggatgggagcgagtcggaagcagtcgcggtcgcactggcaggtcgactgcgagaactgcttagggacctgccaccggaaaaccgcgcctctctgcagtatctgctgcggcatctacggaggattgtagaggtggagcaggacaacaaaatgactccaggaaatctcgggattgtgttcggaccaacactgctgaggccccgtcctacggaggcgactgtctcattgtcatctctggtcgactacccacaccaggcaagagtaatcgagactctgatcgtccattacggactcgtcttcgaggaggaaccggaagagacaccagggggtcaggatgaaagctcaaatcagcgcgccgaggtcgtagtccaggtgccgtatttggaagccggcgaggctgtggtctatccactgcaggaggcagccgccgacggatgtagggagagtcgagtggtatcaaatgactctgactccgacctggaggaggcatcagagctgctctcctcttctgaagcctcagcccttgggcatctgtctttcctggagcagcagcagagcgaggcctccctggaagtggccagcggctcccacagcgggtcggaggagcagctggaagctacggcgagggaagatggcgacggggacgaggacggacctgctcagcagctgtctggctttaacaccaatcagtccaacaacgtcctccaggcacccctcccccctatgagactcagggggggccgcatgacactcgggtcatgcagagagaggcagcccgaatttgtgtag

SEQ ID NO: 320450 - DNA, 3393 bp, Artificial Sequence
  derived and/or modified sequence
agttactcaccctacagggctggccgacaggggcctcagcagagaggaagagatccaggtatccaactcacagagctgccgaggaaggacggcgcagacgctgtgtttcccggacctagtctcgagccccctgccggttcctcaggcgtcaaggctaccggaactctgaagcggcctactagcctgagtcgccacgctagcgctgctggattccctttgtcaggcgctgcaagctggaccctgggccgttctcaccgctccccattgacagccgcaagcccgggagaattacccacagagggagcaggccctgacgttgtggaagacatatcccaccttctcgccgatgtggctagatttgctgagggtcttgagaagctgaaagaatgtgtgttgcgcgatgatctcctggaagcacgcaggccccgagcacatgagtgcttgggcgaagcactaagggtaatgcatcagataatttccaagtaccctctgttaaataccgttgagacactcacagctgcagggacactgattgctaaggtgaaagcgttccattacgagtcaaacaacgaccttgaaaaacaagagtttgagaaagcattggagacaatcgcggtggccttctcctccacagtttctgagttcctgatgggcgaagttgactcgtctaccttactggcggtgcctccaggggactccagtcagtcaatggagtctttgtatggacccggaagtgaaggtacccccccaagtcttgaagactgtgacgccggttgtctgcctgctgaggaggttgacgtcctattgcagagatgcgagggaggagttgatgccgcacttctgtatgctaaaaatatggccaagtatatgaaggacctgatttcatatctggagaaacgcaccacattagagatggaatttgcgaagggactccaaaaaatcgctcataactgccggcagtctgtcatgcaggaaccccatatgcctttactgtcaatctattccctggctctggagcaagacttagaatttggccattctatggtccaggcagttgggactttgcaaactcagacattcatgcaaccgctgacgctacgtaggctggaacacgagaaaaggaggaaggagattaaagaagcctggcacagagctcaaaggaaactacaggaggccgaatccaatctgcgcaaagctaagcaaggttacgtccagagatgcgaagaccatgacaaggctcgctttctggttgccaaggctgaagaagagcaggccggaagcgctcctggcgcagggtcaactgcaacaaagacattggacaagcggagacggttagaagaggaggccaagaacaaagccgaagaggccatggctacatatagaacttgcgtggcagacgctaaaacccagaagcaggagcttgaggacactaaagtgaccgcccttcgacaaattcaggaggtcatcagacagagcgatcagaccattaaatccgccacgatatcctactaccaaatgatgcacatgcagacggcacctctccccgtgcacttccaaatgctctgcgaaagtagcaaactgtatgaccccggtcagcaatatgcctcccacgtgagacagctgcagagagatcaagagccagacgtgcattacgatttcgagccccacgtctccgcaaacgcttggagtcctgtcatgagagccaggaagagtagctttaatgtgtccgatgtggccagacctgaggcagctggatcaccacctgaggaaggcggatgcacagaagggactccagccaaggatcatcgtgctggtagagggcaccaggttcataagtcatggccactttccatctccgactccgacagcggcctggaccccggacccggagccggtgatttcaaaaagtttgaacgcaccagctcctcaggaactatgtccagcacagaggagcttgtggaccccgatggcggagccggtgcgtctgcttttgagcaggcggaccttaacgggatgactccagagctgccagtggcagtcccttccggacccttcagacatgaggggctgtccaaggccgcaaggactcaccgactgagaaaattaagaactccagctaaatgcagggagtgcaattcgtacgtgtactttcagggggctgagtgcgaggaatgttgcctggcctgtcacaaaaaatgtctcgagacactggctattcagtgtggtcacaagaaactgcaggggcgacttcaacttttcggccaggactttagtcacgctgcacgctcagctcctgacggtgtgccatttatcgttaagaaatgcgtgtgtgaaatcgagcgtagggcactcaggactaaaggtatttaccgggtgaacggggttaagacgcgggtggagaaactgtgtcaagccttcgagaacggaaaggagttggtggaactctcccaggctagcccccatgacattagtaatgtgctgaagctctacctgcgtcaactcccggagcccctgatctccttcagattgtatcatgaactcgtcggattggccaaggactcgttaaaggccgaggccgaggctaaggctgcttcccgtggacgccaggacggtagtgaatcagaagctgtcgccgttgctctggcgggtagacttcgagagctgcttcgggacctgccacccgagaaccgggcttcactccagtatcttcttcgccacctgaggcggattgtggaggtagagcaggataacaaaatgacccccggaaacctcggaatcgtttttggccctaccttgctgcgccctcgccctactgaagccaccgttagtctgtctagtctggtggattacccacatcaggctcgcgtgattgaaaccttgatcgtgcactacgggctcgtcttcgaggaggagccagaggaaacgcccggaggacaggatgagagcagtaatcagagggccgaggtggttgtgcaggtgccctatctcgaggcaggcgaagcagtggtgtaccccttgcaggaagccgcagccgacggatgtcgggaaagccgagtcgtaagcaatgatagtgacagcgatctggaggaggcgtcagagctgctgtctagctctgaggccagcgctcttggccacttgagcttcttagaacagcagcagagtgaggcatccctggaagttgctagtggaagtcactctggttcagaggaacaacttgaggccacggctagggaagacggagatggagacgaggatgggcctgcccagcagctgagcgggttcaacactaatcagtcgaacaacgttcttcaagccccactgcctcctatgagactgcgaggcggaaggatgacgcttggcagctgccgggagcggcagcctgagttcgtgtag

SEQ ID NO: 320451 - DNA, 3393 bp, Artificial Sequence
  derived and/or modified sequence
agctacagcccctacagagccggcagacagggcccccagcagagaggcagagaccccggcatccagctgaccgagctgcccagaaaggacggcgccgacgccgtgttccccggccccagcctggagccccccgccggcagcagcggcgtgaaggccaccggcaccctgaagagacccaccagcctgagcagacacgccagcgccgccggcttccccctgagcggcgccgccagctggaccctgggcagaagccacagaagccccctgaccgccgccagccccggcgagctgcccaccgagggcgccggccccgacgtggtggaggacatcagccacctgctggccgacgtggccagattcgccgagggcctggagaagctgaaggagtgcgtgctgagagacgacctgctggaggccagaagacccagagcccacgagtgcctgggcgaggccctgagagtgatgcaccagatcatcagcaagtaccccctgctgaacaccgtggagaccctgaccgccgccggcaccctgatcgccaaggtgaaggccttccactacgagagcaacaacgacctggagaagcaggagttcgagaaggccctggagaccatcgccgtggccttcagcagcaccgtgagcgagttcctgatgggcgaggtggacagcagcaccctgctggccgtgccccccggcgacagcagccagagcatggagagcctgtacggccccggcagcgagggcaccccccccagcctggaggactgcgacgccggctgcctgcccgccgaggaggtggacgtgctgctgcagagatgcgagggcggcgtggacgccgccctgctgtacgccaagaacatggccaagtacatgaaggacctgatcagctacctggagaagagaaccaccctggagatggagttcgccaagggcctgcagaagatcgcccacaactgcagacagagcgtgatgcaggagccccacatgcccctgctgagcatctacagcctggccctggagcaggacctggagttcggccacagcatggtgcaggccgtgggcaccctgcagacccagaccttcatgcagcccctgaccctgagaagactggagcacgagaagagaagaaaggagatcaaggaggcctggcacagagcccagagaaagctgcaggaggccgagagcaacctgagaaaggccaagcagggctacgtgcagagatgcgaggaccacgacaaggccagattcctggtggccaaggccgaggaggagcaggccggcagcgcccccggcgccggcagcaccgccaccaagaccctggacaagagaagaagactggaggaggaggccaagaacaaggccgaggaggccatggccacctacagaacctgcgtggccgacgccaagacccagaagcaggagctggaggacaccaaggtgaccgccctgagacagatccaggaggtgatcagacagagcgaccagaccatcaagagcgccaccatcagctactaccagatgatgcacatgcagaccgcccccctgcccgtgcacttccagatgctgtgcgagagcagcaagctgtacgaccccggccagcagtacgccagccacgtgagacagctgcagagagaccaggagcccgacgtgcactacgacttcgagccccacgtgagcgccaacgcctggagccccgtgatgagagccagaaagagcagcttcaacgtgagcgacgtggccagacccgaggccgccggcagcccccccgaggagggcggctgcaccgagggcacccccgccaaggaccacagagccggcagaggccaccaggtgcacaagagctggcccctgagcatcagcgacagcgacagcggcctggaccccggccccggcgccggcgacttcaagaagttcgagagaaccagcagcagcggcaccatgagcagcaccgaggagctggtggaccccgacggcggcgccggcgccagcgccttcgagcaggccgacctgaacggcatgacccccgagctgcccgtggccgtgcccagcggccccttcagacacgagggcctgagcaaggccgccagaacccacagactgagaaagctgagaacccccgccaagtgcagagagtgcaacagctacgtgtacttccagggcgccgagtgcgaggagtgctgcctggcctgccacaagaagtgcctggagaccctggccatccagtgcggccacaagaagctgcagggcagactgcagctgttcggccaggacttcagccacgccgccagaagcgcccccgacggcgtgcccttcatcgtgaagaagtgcgtgtgcgagatcgagagaagagccctgagaaccaagggcatctacagagtgaacggcgtgaagaccagagtggagaagctgtgccaggccttcgagaacggcaaggagctggtggagctgagccaggccagcccccacgacatcagcaacgtgctgaagctgtacctgagacagctgcccgagcccctgatcagcttcagactgtaccacgagctggtgggcctggccaaggacagcctgaaggccgaggccgaggccaaggccgccagcagaggcagacaggacggcagcgagagcgaggccgtggccgtggccctggccggcagactgagagagctgctgagagacctgccccccgagaacagagccagcctgcagtacctgctgagacacctgagaagaatcgtggaggtggagcaggacaacaagatgacccccggcaacctgggcatcgtgttcggccccaccctgctgagacccagacccaccgaggccaccgtgagcctgagcagcctggtggactacccccaccaggccagagtgatcgagaccctgatcgtgcactacggcctggtgttcgaggaggagcccgaggagacccccggcggccaggacgagagcagcaaccagagagccgaggtggtggtgcaggtgccctacctggaggccggcgaggccgtggtgtaccccctgcaggaggccgccgccgacggctgcagagagagcagagtggtgagcaacgacagcgacagcgacctggaggaggccagcgagctgctgagcagcagcgaggccagcgccctgggccacctgagcttcctggagcagcagcagagcgaggccagcctggaggtggccagcggcagccacagcggcagcgaggagcagctggaggccaccgccagagaggacggcgacggcgacgaggacggccccgcccagcagctgagcggcttcaacaccaaccagagcaacaacgtgctgcaggcccccctgccccccatgagactgagaggcggcagaatgaccctgggcagctgcagagagagacagcccgagttcgtgtag

SEQ ID NO: 320452 - protein, 361 aa, Artificial Sequence
  derived and/or modified sequence
MDPLGAAKPQWPWRRCLAALLFQLLVAVCFFSYLRVSRDDATGSPRAPSGSSRQDTTPTRPTLLILLRTWPFHIPVALSRCSEMVPGTADCHITADRKVYPQADMVIVHHWDIMSNPKSRLPPSPRPQGQRWIWFNLEPPPNCQHLEALDRYFNLTMSYRSDSDIFTPYGWLEPWSGQPAHPPLNLSAKTELVAWAVSNWKPDSARVRYYQSLQAHLKVDVYGRSHKPLPKGTMMETLSRYKFYLAFENSLHPDYITEKLWRNALEAWAVPVVLGPSRSNYERFLPPDAFIHVDDFQSPKDLARYLQELDKDHARYLSYFRWRETLRPRSFSWALDFCKACWKLQQESRYQTVRSIAAWFT

SEQ ID NO: 320453 - DNA, 2239 bp, Artificial Sequence
  derived and/or modified sequence
tctgttcccacttcctccccgccccaggaaacctgccatggcctcctggtgagctgtcctcatccactgctcgctgcctctccagaaccttggtgtgaacttaggtcttggcgtcgggatcccttttcgtcacactcaggtgacctacagggagctccgctcgacactgcaaggcttagaccagttcggtccaacagagaaagcaggcaaccaccatgtcatttgaaaacagtttcatcgggatataattcgcaacccatacagtgaatccatttaagatactctgacccatggatcccctgggtgcagccaagccacaatggccatggcgccgctgtctggccgcactgctatttcagctgctggtggctgtgtgtttcttctcctacctgcgtgtgtcccgagacgatgccactggatcccctagggctcccagtgggtcctcccgacaggacaccactcccacccgccccaccctcctgatcctgctacggacatggcctttccacatccctgtggctctgtcccgctgttcagagatggtgcccggcacagccgactgccacatcactgccgaccgcaaggtgtacccacaggcagacatggtcatcgtgcaccactgggatatcatgtccaaccctaagtcacgcctcccaccttccccgaggccgcaggggcagcgctggatctggttcaacttggagccaccccctaactgccagcacctggaagccctggacagatacttcaatctcaccatgtcctaccgcagcgactccgacatcttcacgccctacggctggctggagccgtggtccggccagcctgcccacccaccgctcaacctctcggccaagaccgagctggtggcctgggcggtgtccaactggaagccggactcagccagggtgcgctactaccagagcctgcaggctcatctcaaggtggacgtgtacggacgctcccacaagcccctgcccaaggggaccatgatggagacgctgtcccggtacaagttctacctggccttcgagaactccttgcaccccgactacatcaccgagaagctgtggaggaacgccctggaggcctgggccgtgcccgtggtgctgggccccagcagaagcaactacgagaggttcctgccacccgacgccttcatccacgtggacgacttccagagccccaaggacctggcccggtacctgcaggagctggacaaggaccacgcccgctacctgagctactttcgctggcgggagacgctgcggcctcgctccttcagctgggcactggatttctgcaaggcctgctggaaactgcagcaggaatccaggtaccagacggtgcgcagcatagcggcttggttcacctgagaggccggcatggtgcctgggctgccgggaacctcatctgcctggggcctcacctgctggagtcctttgtggccaaccctctctcttacctgggacctcacacgctgggcttcacggctgccaggagcctctcccctccagaagacttgcctgctagggacctcgcctgctggggacctcgcctgttggggacctcacctgctggggacctcacctgctggggaccttggctgctggaggctgcacctactgaggatgtcggcggtcggggactttacctgctgggacctgctcccagagaccttgccacactgaatctcacctgctggggacctcaccctggagggccctgggccctggggaactggcttacttggggccccacccgggagtgatggttctggctgatttgtttgtgatgttgttagccgcctgtgaggggtgcagagagatcatcacggcacggtttccagatgtaatactgcaaggaaaaatgatgacgtgtctcctcactctagaggggttggtcccatgggttaagagctcaccccaggttctcacctcaggggttaagagctcagagttcagacaggtccaagttcaagcccaggaccaccacttatagggtacaggtgggatcgactgtaaatgaggacttctggaacattccaaatattctggggttgagggaaattgctgctgtctacaaaatgccaagggtggacaggcgctgtggctcacgcctgtaatcccagcactttgggaggctgaggtaggaggattgattgaggccaagagttaaagaccagcctggtcaatatagcaagaccacgtctctaaataaaaaataataggccggccag

SEQ ID NO: 320454 - DNA, 2182 bp, Artificial Sequence
  derived and/or modified sequence
gttcccacttcctccccgccccaggaaacctgccatggcctcctggtgagctgtcctcatccactgctcgctgcctctccaggtgacctacagggagctccgctcgacactgcaaggcttagaccagttcggtccaacagagaaagcaggcaaccaccatgtcatttgaaaacagtttcatcgggatataattcgcaacccatacagtgaatccatttaagatactctgacccatggatcccctgggtgcagccaagccacaatggccatggcgccgctgtctggccgcactgctatttcagctgctggtggctgtgtgtttcttctcctacctgcgtgtgtcccgagacgatgccactggatcccctagggctcccagtgggtcctcccgacaggacaccactcccacccgccccaccctcctgatcctgctacggacatggcctttccacatccctgtggctctgtcccgctgttcagagatggtgcccggcacagccgactgccacatcactgccgaccgcaaggtgtacccacaggcagacatggtcatcgtgcaccactgggatatcatgtccaaccctaagtcacgcctcccaccttccccgaggccgcaggggcagcgctggatctggttcaacttggagccaccccctaactgccagcacctggaagccctggacagatacttcaatctcaccatgtcctaccgcagcgactccgacatcttcacgccctacggctggctggagccgtggtccggccagcctgcccacccaccgctcaacctctcggccaagaccgagctggtggcctgggcggtgtccaactggaagccggactcagccagggtgcgctactaccagagcctgcaggctcatctcaaggtggacgtgtacggacgctcccacaagcccctgcccaaggggaccatgatggagacgctgtcccggtacaagttctacctggccttcgagaactccttgcaccccgactacatcaccgagaagctgtggaggaacgccctggaggcctgggccgtgcccgtggtgctgggccccagcagaagcaactacgagaggttcctgccacccgacgccttcatccacgtggacgacttccagagccccaaggacctggcccggtacctgcaggagctggacaaggaccacgcccgctacctgagctactttcgctggcgggagacgctgcggcctcgctccttcagctgggcactggatttctgcaaggcctgctggaaactgcagcaggaatccaggtaccagacggtgcgcagcatagcggcttggttcacctgagaggccggcatggtgcctgggctgccgggaacctcatctgcctggggcctcacctgctggagtcctttgtggccaaccctctctcttacctgggacctcacacgctgggcttcacggctgccaggagcctctcccctccagaagacttgcctgctagggacctcgcctgctggggacctcgcctgttggggacctcacctgctggggacctcacctgctggggaccttggctgctggaggctgcacctactgaggatgtcggcggtcggggactttacctgctgggacctgctcccagagaccttgccacactgaatctcacctgctggggacctcaccctggagggccctgggccctggggaactggcttacttggggccccacccgggagtgatggttctggctgatttgtttgtgatgttgttagccgcctgtgaggggtgcagagagatcatcacggcacggtttccagatgtaatactgcaaggaaaaatgatgacgtgtctcctcactctagaggggttggtcccatgggttaagagctcaccccaggttctcacctcaggggttaagagctcagagttcagacaggtccaagttcaagcccaggaccaccacttatagggtacaggtgggatcgactgtaaatgaggacttctggaacattccaaatattctggggttgagggaaattgctgctgtctacaaaatgccaagggtggacaggcgctgtggctcacgcctgtaatcccagcactttgggaggctgaggtaggaggattgattgaggccaagagttaaagaccagcctggtcaatatagcaagaccacgtctctaaataaaaaataataggccggccag

SEQ ID NO: 320455 - DNA, 2589 bp, Artificial Sequence
  derived and/or modified sequence
tctgttcccacttcctccccgccccaggaaacctgccatggcctcctggtgagctgtcctcatccactgctcgctgcctctccagatcttcagttgcttcaggccatttgaacgtatatgagccggtcgtaggggatatgatggcttagcttgggctcagaggcctgaaaatcgcccccaccaatcacctgtttcccccaatctaccctcctgaaggtcactgacaaagacttcattgtctcctaggagaggctgccatatatccagggctgacgtaattccatcttaatatcagttacattataaaaatttacctcgtgcctgaggccccagagcccaagggtgcaaagcagtaattggtcaaagttcaacttccctcccactctgggctcaggctgtcccctgagggcctgtgttttgagtctctttccagaaccttggtgtgaacttaggtcttggcgtcgggatcccttttcgtcacactcaggtgacctacagggagctccgctcgacactgcaaggcttagaccagttcggtccaacagagaaagcaggcaaccaccatgtcatttgaaaacagtttcatcgggatataattcgcaacccatacagtgaatccatttaagatactctgacccatggatcccctgggtgcagccaagccacaatggccatggcgccgctgtctggccgcactgctatttcagctgctggtggctgtgtgtttcttctcctacctgcgtgtgtcccgagacgatgccactggatcccctagggctcccagtgggtcctcccgacaggacaccactcccacccgccccaccctcctgatcctgctacggacatggcctttccacatccctgtggctctgtcccgctgttcagagatggtgcccggcacagccgactgccacatcactgccgaccgcaaggtgtacccacaggcagacatggtcatcgtgcaccactgggatatcatgtccaaccctaagtcacgcctcccaccttccccgaggccgcaggggcagcgctggatctggttcaacttggagccaccccctaactgccagcacctggaagccctggacagatacttcaatctcaccatgtcctaccgcagcgactccgacatcttcacgccctacggctggctggagccgtggtccggccagcctgcccacccaccgctcaacctctcggccaagaccgagctggtggcctgggcggtgtccaactggaagccggactcagccagggtgcgctactaccagagcctgcaggctcatctcaaggtggacgtgtacggacgctcccacaagcccctgcccaaggggaccatgatggagacgctgtcccggtacaagttctacctggccttcgagaactccttgcaccccgactacatcaccgagaagctgtggaggaacgccctggaggcctgggccgtgcccgtggtgctgggccccagcagaagcaactacgagaggttcctgccacccgacgccttcatccacgtggacgacttccagagccccaaggacctggcccggtacctgcaggagctggacaaggaccacgcccgctacctgagctactttcgctggcgggagacgctgcggcctcgctccttcagctgggcactggatttctgcaaggcctgctggaaactgcagcaggaatccaggtaccagacggtgcgcagcatagcggcttggttcacctgagaggccggcatggtgcctgggctgccgggaacctcatctgcctggggcctcacctgctggagtcctttgtggccaaccctctctcttacctgggacctcacacgctgggcttcacggctgccaggagcctctcccctccagaagacttgcctgctagggacctcgcctgctggggacctcgcctgttggggacctcacctgctggggacctcacctgctggggaccttggctgctggaggctgcacctactgaggatgtcggcggtcggggactttacctgctgggacctgctcccagagaccttgccacactgaatctcacctgctggggacctcaccctggagggccctgggccctggggaactggcttacttggggccccacccgggagtgatggttctggctgatttgtttgtgatgttgttagccgcctgtgaggggtgcagagagatcatcacggcacggtttccagatgtaatactgcaaggaaaaatgatgacgtgtctcctcactctagaggggttggtcccatgggttaagagctcaccccaggttctcacctcaggggttaagagctcagagttcagacaggtccaagttcaagcccaggaccaccacttatagggtacaggtgggatcgactgtaaatgaggacttctggaacattccaaatattctggggttgagggaaattgctgctgtctacaaaatgccaagggtggacaggcgctgtggctcacgcctgtaatcccagcactttgggaggctgaggtaggaggattgattgaggccaagagttaaagaccagcctggtcaatatagcaagaccacgtctctaaataaaaaataataggccggccaggc

SEQ ID NO: 320456 - DNA, 2048 bp, Artificial Sequence
  derived and/or modified sequence
tctgttcccacttcctccccgccccaggaaacctgccatggcctcctggtgagctgtcctcatccactgctcgctgcctctccagatactctgacccatggatcccctgggtgcagccaagccacaatggccatggcgccgctgtctggccgcactgctatttcagctgctggtggctgtgtgtttcttctcctacctgcgtgtgtcccgagacgatgccactggatcccctagggctcccagtgggtcctcccgacaggacaccactcccacccgccccaccctcctgatcctgctacggacatggcctttccacatccctgtggctctgtcccgctgttcagagatggtgcccggcacagccgactgccacatcactgccgaccgcaaggtgtacccacaggcagacatggtcatcgtgcaccactgggatatcatgtccaaccctaagtcacgcctcccaccttccccgaggccgcaggggcagcgctggatctggttcaacttggagccaccccctaactgccagcacctggaagccctggacagatacttcaatctcaccatgtcctaccgcagcgactccgacatcttcacgccctacggctggctggagccgtggtccggccagcctgcccacccaccgctcaacctctcggccaagaccgagctggtggcctgggcggtgtccaactggaagccggactcagccagggtgcgctactaccagagcctgcaggctcatctcaaggtggacgtgtacggacgctcccacaagcccctgcccaaggggaccatgatggagacgctgtcccggtacaagttctacctggccttcgagaactccttgcaccccgactacatcaccgagaagctgtggaggaacgccctggaggcctgggccgtgcccgtggtgctgggccccagcagaagcaactacgagaggttcctgccacccgacgccttcatccacgtggacgacttccagagccccaaggacctggcccggtacctgcaggagctggacaaggaccacgcccgctacctgagctactttcgctggcgggagacgctgcggcctcgctccttcagctgggcactggatttctgcaaggcctgctggaaactgcagcaggaatccaggtaccagacggtgcgcagcatagcggcttggttcacctgagaggccggcatggtgcctgggctgccgggaacctcatctgcctggggcctcacctgctggagtcctttgtggccaaccctctctcttacctgggacctcacacgctgggcttcacggctgccaggagcctctcccctccagaagacttgcctgctagggacctcgcctgctggggacctcgcctgttggggacctcacctgctggggacctcacctgctggggaccttggctgctggaggctgcacctactgaggatgtcggcggtcggggactttacctgctgggacctgctcccagagaccttgccacactgaatctcacctgctggggacctcaccctggagggccctgggccctggggaactggcttacttggggccccacccgggagtgatggttctggctgatttgtttgtgatgttgttagccgcctgtgaggggtgcagagagatcatcacggcacggtttccagatgtaatactgcaaggaaaaatgatgacgtgtctcctcactctagaggggttggtcccatgggttaagagctcaccccaggttctcacctcaggggttaagagctcagagttcagacaggtccaagttcaagcccaggaccaccacttatagggtacaggtgggatcgactgtaaatgaggacttctggaacattccaaatattctggggttgagggaaattgctgctgtctacaaaatgccaagggtggacaggcgctgtggctcacgcctgtaatcccagcactttgggaggctgaggtaggaggattgattgaggccaagagttaaagaccagcctggtcaatatagcaagaccacgtctctaaataaaaaataataggccggccaggc

SEQ ID NO: 320457 - DNA, 1086 bp, Artificial Sequence
  derived and/or modified sequence
atggacccgctgggggccgcaaagcctcagtggccctggcggcgctgcctggccgcactactttttcaactcttggtcgcagtgtgcttttttagttacctgagagtttccagagatgatgccacgggatcgccacgggcaccatccggctcgtcccggcaggatacaactcccactagacccacattgctgattttgcttagaacctggccatttcacatccccgttgccctcagcagatgctcggagatggtcccaggcactgccgactgtcacattactgcagatcgaaaagtatatccccaggctgacatggttatcgtacatcactgggacatcatgagcaacccaaagagtagattgcccccaagtccccgtccacaggggcagcggtggatatggttcaacctggaacccccccctaactgccaacacctggaagccctcgatcgctatttcaacctgaccatgagttaccgctctgatagtgatatctttaccccttacggatggctggagccatggtccgggcagccagcgcaccctccactgaatctcagcgcgaaaactgagctcgtcgcctgggccgtgtccaattggaagcccgactcagctagagtgcgctattaccagtcactccaggcacatttgaaagtcgatgtgtacggtagatcgcacaaacccttgccgaagggcacaatgatggagaccctgagtagatataaattttatctggccttcgagaactcacttcaccctgattacatcactgaaaagttatggcgaaacgccctggaagcttgggccgtgccagtagtccttggacccagtcgatctaattatgagcgattcctgccccccgatgcctttatccacgttgacgattttcagagccctaaagatcttgctagatatcttcaagagttagacaaggatcatgctcgatatttgagctattttcgatggcgcgaaactcttaggcctcgctcattcagttgggctttggatttttgtaaagcttgctggaagctgcagcaggagtcaaggtaccagacagtgcgatctatagccgcatggttcacttag

SEQ ID NO: 320458 - DNA, 1086 bp, Artificial Sequence
  derived and/or modified sequence
atggatcccctcggcgcagccaagccacagtggccatggaggaggtgcctagcagccctgctcttccagcttctcgtggcggtgtgctttttttcctacctgagggtgtctcgggacgacgcgaccggctcccccagagccccttccggtagctcacgccaggatactacgccgaccaggccaaccctgctcatcctgctcagaacatggccttttcacatcccagtggccctgagccgatgctcggaaatggtccctggaaccgctgattgtcacatcactgcagataggaaagtgtacccacaggcagatatggttatcgtgcaccactgggatattatgagcaaccccaagtcccggttgcctccatccccaaggccccagggccagcgatggatctggtttaacctggagcctcccccaaactgtcagcatttggaagctctcgacaggtactttaacctgacgatgagctaccgctcagattccgacatcttcaccccatatggatggctggaaccctggagtgggcagcccgcgcacccacccctgaacctgagtgccaagactgaactcgtcgcctgggcggtgagcaactggaaaccagactctgcacgtgtgcggtattaccagagtctacaagcacatctgaaggttgatgtctacggaagatcacataagccactcccgaagggaaccatgatggagactctctctaggtacaaattctacctagcttttgagaattcgctgcaccccgactatatcacagagaagttatggaggaacgcactggaggcctgggcagtccctgtggtgctgggcccctctcgcagtaactacgagagattccttccacccgacgcttttatccatgtcgatgacttccaaagtccgaaggaccttgccagatatctgcaggaactagacaaagaccatgcaagatatctctcctacttcagatggagggaaaccctaagacctcggtccttttcatgggcattagatttttgtaaagcgtgttggaaactgcagcaggagtcccggtaccaaacagttcggtccatcgccgcctggtttacatag

SEQ ID NO: 320459 - DNA, 1086 bp, Artificial Sequence
  derived and/or modified sequence
atggatccattgggggctgccaaacctcagtggccttggcgtagatgcctcgctgccctgctgtttcaactacttgtcgcagtgtgcttttttagctacctaagagtgtctagagatgatgccaccggttctcccagagctccgtcagggtcgagtaggcaagacacaactcccacacgccctacgcttctaattctgcttcgaacctggccttttcatattccggttgctttgtctcgctgctctgaaatggttcccggcactgcggactgccatatcaccgccgaccgtaaggtatatccacaagcggacatggtcatcgtgcaccactgggatattatgagtaatcccaagagccgcctgccaccgagcccacgccctcaaggccagcggtggatctggtttaacctcgaaccacctccgaactgccagcacttggaagccctggaccggtattttaaccttacgatgtcttaccgcagcgacagtgacatcttcactccttacggttggctagagccctggtctgggcagccagcccacccaccactgaacctgagcgcaaaaaccgagctggtcgcgtgggctgtaagcaattggaaacccgatagtgcaagagtgcggtactatcagagcttgcaggcccatctcaaagttgacgtctatggcaggtcccacaaaccacttccaaaaggtaccatgatggagactctgtccaggtacaagttttatctggcctttgagaattccttacacccggactatattaccgagaaactgtggcggaacgcactcgaggcctgggcagtaccagttgtactgggcccttccagaagcaactatgaaaggtttctcccccccgatgcatttatccatgtggacgacttccagtcgcccaaagacctggctcgctatctgcaggagctcgataaagatcacgcgcgctacctgtcatactttcggtggagggagacacttcgcccgcgctcgttctcctgggcactagatttttgtaaggcctgttggaaattgcagcaggaatcccggtatcagacggtacggagtatcgcagcctggtttacgtag

SEQ ID NO: 320460 - DNA, 1086 bp, Artificial Sequence
  derived and/or modified sequence
atggaccctttgggcgccgccaagcctcagtggccctggcgacggtgtttggccgccctgctgtttcagctacttgttgccgtgtgcttcttttcttacttacgggtttcaagggatgatgctacgggttccccccgcgcgccatctggtagctcgcggcaagatacaactcccaccagacctacactgctaattctgcttcggacttggccatttcacattcctgtggccctttctaggtgctctgaaatggttcccggcacagcagattgccacatcacagcagacagaaaagtctacccccaggcggacatggtgattgtacaccattgggacatcatgtccaaccccaaatctcgattgccccctagtcctcgcccacaaggccagagatggatctggtttaatttggagccacctccaaattgtcaacacttagaggctcttgacagatacttcaacctgactatgtcatacagatcagactctgacattttcaccccttacgggtggttggagccttggtcaggccagcctgcccatcccccactgaatctcagcgcaaagacagaactcgtggcgtgggctgtcagcaactggaagcccgacagcgccagagttcgatattatcaatctctccaggcgcacctgaaggttgacgtctacggccgctcgcacaaaccgctcccaaagggcaccatgatggagacactgtcaagatacaagttttatcttgcctttgagaactccttacatcccgactacatcactgagaaactgtggcgcaacgcccttgaagcctgggcagttccggtggtcctgggtccatcccgcagcaactatgaaaggttcctccccccagacgcattcattcatgttgacgattttcagtcccccaaggatctggccagatacctccaagagctggataaggatcatgcgcgttacctgagctacttccggtggagggagaccctgcggccccggagtttcagctgggccctggatttttgcaaggcatgctggaagttgcaacaggagtccagataccagactgttaggagtattgcagcttggttcacctag

SEQ ID NO: 320461 - DNA, 1086 bp, Artificial Sequence
  derived and/or modified sequence
atggaccccctgggcgccgccaagccccagtggccctggaggcgctgcctggccgccctgctcttccagctgctggtggccgtgtgcttcttctcctacctgcgggtgtccagagatgatgccaccggcagcccccgggcccccagcggcagcagccggcaggacaccacccccacccggcccaccctgctgatcctgctgcggacctggcccttccacatccctgtggccctgagccgctgcagcgagatggtgcccggcacagctgactgccacatcacagctgacaggaaggtgtacccccaggccgacatggtgattgtgcaccactgggacatcatgagcaaccccaagagccggctgccccccagcccccggccccagggccagcgctggatctggttcaacctggagcccccacccaactgccagcacctggaggccctggaccgctacttcaacctgaccatgagctacagaagtgacagcgacatcttcaccccctacggctggctggagccctggagcggccagcctgcccacccccccctgaacctgagcgccaagacagagctggtggcctgggccgtgagcaactggaagccagacagcgcccgggtgcgctactaccagagcctgcaggcccacctgaaggtggatgtgtatggccgcagccacaagcccctgcccaagggcaccatgatggagaccctgagccgctacaagttctacctggcctttgagaacagcctgcacccagactacatcacagagaagctgtggagaaatgccctggaggcctgggccgtgcctgtggtgctgggccccagccgcagcaactatgagcgcttcctgcccccagatgccttcatccacgtggatgacttccagagccccaaggacctggcccgctacctgcaggagctggacaaggaccacgcccgctacctgagctacttccgctggagggagaccctgcggcccaggagcttctcctgggccctggacttctgcaaggcctgctggaagctgcagcaggagagccgctaccagacagtgcgcagcattgctgcctggttcacctag

SEQ ID NO: 320462 - DNA, 1086 bp, Artificial Sequence
  derived and/or modified sequence
atggaccccctgggcgccgccaagccccagtggccctggcggcggtgcctggccgctcttttgtttcaactcctggtggctgtgtgcttttttagctacctgagagtgagcagggacgacgcaaccgggtccccacgcgcaccatcaggatcttcccgccaggatactacccccacacgccccaccttgctgatacttctgaggacatggccattccatatcccagtggccctgagcaggtgcagcgaaatggtgcctggaactgccgactgccatatcacagccgaccgtaaggtctatccccaggcagatatggtgatagtgcaccactgggacatcatgagtaaccccaaaagccgcctcccgccttctccccgacctcaggggcagagatggatctggttcaacctggagccaccgcctaactgtcagcatcttgaggcccttgaccggtactttaatcttacgatgagttaccgtagcgattctgacatcttcaccccttacggctggctagaaccttggagcggccaaccagctcatcctccgctgaacctgtctgccaagaccgaactggtggcctgggctgttagcaactggaaaccggacagcgctcgggttcgatactaccaaagcctgcaggctcacctgaaggtggatgtgtatggacgttcacacaaacccctacctaaaggcacaatgatggaaacactgtcacgatataaattctatctggcatttgagaatagcttgcatccagactacatcacagagaagttgtggcgcaacgccctggaagcttgggccgtgccagttgttctgggacccagtaggtcaaattacgagcgcttcttgccacccgacgcctttattcacgtcgacgactttcagagtccaaaagatttggctagatatttgcaagagttggacaaggatcacgcccgctatctctcctactttaggtggagagagacgttacgccccaggagttttagctgggcgctcgatttttgtaaagcctgttggaagctgcaacaagaatctcgctaccagacagtccgatccatcgccgcatggtttacctag

SEQ ID NO: 320463 - DNA, 1086 bp, Artificial Sequence
  derived and/or modified sequence
atggaccccctgggcgccgccaagccccagtggccctggcggcggtgcctggcagccttactcttccagttacttgtggccgtgtgtttcttctcttaccttcgcgtgtctagagacgacgcaactggatcccccagggcaccgagtggctcatcgagacaagacacaacccccacgcggccgacattgttgatcctgctacgcacttggccatttcacattccagtggcgctgagtcgttgcagcgaaatggtgcctggaaccgcggactgccacatcaccgcagatcggaaggtctaccctcaggccgacatggtaatcgtgcaccactgggatattatgtcgaatcctaagagtcgattgccccctagcccccggccccagggccaacggtggatctggttcaacttggaacctccacccaactgccagcacctcgaggccctggatcgctattttaatttgactatgagttatagatcggactctgacattttcactccatatggatggctggagccgtggtctggccagcccgctcacccacctctgaacttgagtgctaagaccgagctggtcgcatgggctgtctctaattggaagcccgatagtgcacgcgttagatactaccaaagtctccaagcgcatctgaaggtggatgtatatggccggtcccacaagccactgccaaagggcacaatgatggaaaccttgagtcggtacaaattctatcttgccttcgagaacagcctgcatcctgactatatcacagagaagctctggcggaatgctctcgaggcatgggctgtgcctgtggttttggggccatctcgatctaattacgaacgcttcctgccacccgacgcctttatccacgtggatgatttccagtcaccgaaagacctggccagatatctgcaagagctggataaggaccacgctaggtacctgtcttactttcgatggagagagactcttagaccccgctcattctcctgggccctggacttttgcaaggcctgttggaagctccagcaggagtcacggtaccagactgtgcgtagtatcgccgcctggtttacttag

SEQ ID NO: 320464 - DNA, 1086 bp, Artificial Sequence
  derived and/or modified sequence
atggaccccctgggcgccgccaagccccagtggccctggcggcggtgcctggccgcattgttgttccagctgctggtcgctgtctgtttcttttcatatcttcgcgtgtccagagacgacgccactggaagcccaagggccccctctggtagcagccggcaagatactacacccacacggcctaccttgctgattttactgcggacgtggccctttcacatccctgttgcgttgagtcgttgcagcgagatggttcctggcaccgcagactgccatattacagcagacaggaaggtttaccctcaggccgatatggtgatcgtccatcattgggatattatgagtaatcctaagtcaaggctgcccccatctccaaggccacaaggacagcgctggatttggtttaacttggagccgccacccaactgtcagcacctcgaggccctcgacaggtattttaatttgaccatgtcttatcggtccgattccgatatatttactccttatgggtggctcgagccatggtcgggacagcccgcacaccccccactgaatctgtcagcaaagaccgaactggtcgcctgggctgtttctaattggaagcctgacagtgccagagtccgctattaccagagtctgcaggcccacttaaaggtggacgtttacgggaggtcgcataagccactgcctaagggaaccatgatggagaccctgtctaggtataagttctatttagcgtttgagaattctctccaccctgactatatcaccgagaagctgtggcgtaacgctctggaagcctgggccgtgccggtggtgctggggcctagtaggtctaactatgaacgtttcctgcccccggacgcattcatccacgtggacgatttccagtcacccaaagatctagccaggtacctacaggagcttgataaggatcatgcccgatatctgtcttattttcgatggcgcgagacattgagaccccggtccttctcctgggcactggacttttgcaaggcttgttggaagctccaacaggaaagtcgctatcagacggttcgttccattgccgcatggttcacatag

SEQ ID NO: 320465 - DNA, 1086 bp, Artificial Sequence
  derived and/or modified sequence
atggaccccctgggcgccgccaagccccagtggccctggcggcggtgcctcgctgctctcttatttcaactgctggtggctgtctgtttcttcagctatcttcgggtgtcccgcgatgacgcgaccggcagcccccgagcccctagcggcagtagccggcaagacactacacctacacgacccactctcttgattctgctgaggacttggccgtttcacatacctgtggcactgagccgatgctctgaaatggtccccggcacggctgactgccatataaccgctgaccgtaaggtgtacccccaggcagatatggttattgtgcatcattgggatataatgtccaacccaaaatcccgtttgccgccatcccctcgaccacagggccagcgctggatctggtttaatcttgagcccccccccaattgccaacatttagaagccctcgacagatacttcaatctcactatgagttatagatccgactcggacatctttacaccatacgggtggctcgaaccttggtcaggtcagccagctcacccaccgttaaacctcagcgcaaagaccgagctggtggcttgggccgtctccaattggaaaccggactcagctcgcgtccgctattaccagagtctgcaggcgcatctgaaggtggacgtctacggtcgctcccataagccgttgccaaagggaaccatgatggagactctctcaaggtacaagttctacttggccttcgaaaatagcctgcatccagattatattacagaaaagctgtggcggaatgccctggaggcttgggcagtcccagtagtgctggggccatctcgctctaattacgaaaggttccttccgcccgacgccttcattcacgtcgacgattttcagtcaccaaaggacctcgctaggtatctgcaggaactcgataaagaccacgcgagatatctgtcatatttccgctggagggagactctgcggcctagatcattttcatgggctctagatttctgtaaggcttgttggaagctgcagcaggagtctagatatcagacggtgaggagcatagccgcatggttcacttag

SEQ ID NO: 320466 - DNA, 1086 bp, Artificial Sequence
  derived and/or modified sequence
atggaccccctaggggctgccaagccacagtggccttggagaaggtgtctggccgcactcttattccaactactagtggccgtgtgtttcttttcttacttgagggtgagccgggatgatgcaaccggttctcccagggctcccagcggatcctctcggcaggacaccacgccaactagacctacactgttgattctattacgcacctggcctttccatattccagtggctctgtctcgctgctccgaaatggtcccgggaacagctgactgccacatcacagcggatagaaaggtttatccacaggcggatatggtgatcgtccatcactgggacataatgtccaatccaaaaagccgtctcccacccagtcccagaccccagggccagaggtggatctggtttaacttggaaccaccgccaaattgccagcacctggaagccctggaccgttacttcaatctcaccatgagctatcgaagcgattctgatattttcacaccgtacgggtggctggaaccatggagcggacagccggctcacccaccactcaacctgagtgctaaaactgaactggtagcttgggccgtgagcaattggaagccagacagcgccagagtacgatattaccaatccctgcaggcacacctcaaagtggatgtgtatggtagaagtcacaagccgttacccaagggaactatgatggaaaccctgtctagatacaagttctatcttgctttcgagaactcactccacccggactatatcacagaaaagctctggcggaacgccctcgaagcctgggcggtgccggtagtgctcggaccctcgcgctccaactatgagcgattcttgccacccgatgccttcatccacgtggatgacttccagtcccctaaggatctggcaaggtatctccaggaattggataaagaccacgctagatatttatcttacttccggtggcgtgaaaccctacgtccccgaagttttagctgggccctcgacttttgtaaggcttgctggaaattacagcaagagtctagatatcaaaccgtgcgctctatagccgcatggttcacttag

SEQ ID NO: 320467 - DNA, 1086 bp, Artificial Sequence
  derived and/or modified sequence
atggatcctctgggagctgctaagccacagtggccgtggcgacgttgtctagcggctttactgttccaactcctggtcgctgtctgtttctttagttatctgcgagtgtctcgagacgacgcaacaggaagccctcgggctccgtccgggagcagtcgacaggatacgacccccacaagacctaccctcctcattctcttacggacctggcccttccacatccccgttgctctgtcacggtgctccgagatggtgcctgggaccgccgattgtcatataaccgcagaccggaaggtgtaccctcaggcagatatggttatcgtacaccactgggatattatgtcaaatcctaagagcagattgccaccctcccctcgtccgcaagggcaaagatggatatggtttaacctggaaccaccaccgaattgccagcatctggaggctttagacaggtatttcaacttaactatgagctacaggtcagactctgacatctttaccccctacggatggcttgagccgtggtcaggccagcctgcgcaccccccactcaatctctcagcgaagacagagctggtcgcttgggctgtgtcaaactggaagcctgactccgcaagagtgcggtactaccagtccctgcaagcccatcttaaggtggatgtctatgggagatctcacaaaccactccccaagggaaccatgatggagacactctccagatataagttttatctcgcatttgagaatagtctgcaccctgattacatcacggagaaactgtggcgcaacgcactggaggcctgggccgtccccgtggtgttgggcccatctcgttctaactacgagcggttcctaccacctgacgccttcattcatgtggacgatttccagtctccgaaggaccttgcccgatatctgcaagaactcgataaggaccacgccagatacctcagttattttagatggcgcgaaactctgaggcccagatcatttagctgggccttagacttttgtaaggcgtgttggaaactgcaacaggagagtcgctaccagacggtgcggtcaattgccgcatggttcacctag

SEQ ID NO: 320468 - DNA, 1086 bp, Artificial Sequence
  derived and/or modified sequence
atggatcccctgggggctgcaaagccacagtggccatggcgccgatgcctagccgcactcctgttccagctgttagtagcggtgtgcttcttcagctacttaagagtgtctagagacgatgccaccggctctcctcgtgccccaagtggctcgtcccggcaggacacaacacccacccggccaacgcttttgattttactcagaacttggccattccacatcccagtggctttgagtagatgcagcgagatggtgcccggaaccgccgattgccatataactgcggataggaaggtatatccccaagccgacatggtgattgttcatcactgggacataatgtcaaaccctaaatctaggctgccgccaagcccccgaccacagggccaacgctggatatggttcaatctggaacccccacccaactgccaacatctggaagccctggacaggtactttaacttgacaatgtcgtaccgaagtgacagcgacattttcacaccatacgggtggctcgaaccttggtcaggtcaacctgcccacccccctctgaacctttctgcgaaaactgaactagtggcctgggccgtgtcaaattggaaacccgattccgcacgtgtgcggtactaccagtcacttcaggcgcatctcaaggttgatgtttacggcaggtcacataagccactccctaagggaactatgatggaaactctatcccgctacaaattttacctggcttttgaaaattccctccacccggactacataaccgagaaactttggcgcaacgctttggaggcatgggccgttcccgtggtgttgggtccctctcgcagcaactacgagaggtttctgcctccagacgcctttatacacgtcgatgactttcaatccccaaaagatctggcgaggtatttgcaggagttggacaaggaccacgctaggtatctgagttatttcagatggagggaaactcttagacctaggtcgttctcatgggccctggacttttgcaaagcttgctggaagttgcagcaggaatctaggtaccaaaccgtccggagtattgctgcatggttcacttag

SEQ ID NO: 320469 - DNA, 1086 bp, Artificial Sequence
  derived and/or modified sequence
atggatcccttaggtgctgccaaacctcagtggccatggagaagatgcctggcagccctgctcttccagttgctagtggctgtatgctttttttcttacctgcgagtgtcaagggatgacgcaacaggaagtcctagagcaccttctggctcgtcacgtcaagatactacaccaacccgccctactcttctgattctcctgcgcacgtggccgtttcacataccggttgctttatctagatgctccgaaatggttcccggaacagctgattgccatataacagctgataggaaagtctatccacaggccgatatggtcattgtccaccactgggatattatgtctaaccccaaatctcggctccccccttcaccaagacctcaagggcagcgctggatatggttcaaccttgaaccaccaccgaattgtcagcacctggaagctctagataggtacttcaacctcacaatgagttacagatctgattcagacattttcaccccgtatggttggctcgagccctggtcaggccagcccgcacatcctccgctgaatctgagcgcaaaaacggagctcgtggcttgggccgtttcaaattggaagccagacagtgcccgtgtcagatactatcaatcactgcaagcccacctgaaagtagacgtctacggcaggagtcataaacccctaccgaagggcactatgatggagaccctgtccaggtacaaattttatctggcgttcgaaaattcattgcaccccgactatatcactgaaaagttatggagaaacgccctcgaggcctgggctgttcccgttgtgctgggaccgtcacgctccaattacgagcgcttcctgcccccagatgcattcatccatgtcgatgattttcaatctcccaaggatctcgcaagatacctgcaggagctcgataaggaccacgccagatatctttcttattttcgctggagagaaaccctgcgtccaaggtcattctcctgggccctcgatttttgtaaggcatgctggaagttacagcaggaaagcaggtaccagacagtacggtcaattgcagcctggttcacctag

SEQ ID NO: 320470 - DNA, 1086 bp, Artificial Sequence
  derived and/or modified sequence
atggaccccctgggcgccgccaagccccagtggccctggagaagatgcctggccgccctgctgttccagctgctggtggccgtgtgcttcttcagctacctgagagtgagcagagacgacgccaccggcagccccagagcccccagcggcagcagcagacaggacaccacccccaccagacccaccctgctgatcctgctgagaacctggcccttccacatccccgtggccctgagcagatgcagcgagatggtgcccggcaccgccgactgccacatcaccgccgacagaaaggtgtacccccaggccgacatggtgatcgtgcaccactgggacatcatgagcaaccccaagagcagactgccccccagccccagaccccagggccagagatggatctggttcaacctggagcccccccccaactgccagcacctggaggccctggacagatacttcaacctgaccatgagctacagaagcgacagcgacatcttcaccccctacggctggctggagccctggagcggccagcccgcccacccccccctgaacctgagcgccaagaccgagctggtggcctgggccgtgagcaactggaagcccgacagcgccagagtgagatactaccagagcctgcaggcccacctgaaggtggacgtgtacggcagaagccacaagcccctgcccaagggcaccatgatggagaccctgagcagatacaagttctacctggccttcgagaacagcctgcaccccgactacatcaccgagaagctgtggagaaacgccctggaggcctgggccgtgcccgtggtgctgggccccagcagaagcaactacgagagattcctgccccccgacgccttcatccacgtggacgacttccagagccccaaggacctggccagatacctgcaggagctggacaaggaccacgccagatacctgagctacttcagatggagagagaccctgagacccagaagcttcagctgggccctggacttctgcaaggcctgctggaagctgcagcaggagagcagataccagaccgtgagaagcatcgccgcctggttcacctag

SEQ ID NO: 320471 - DNA, 1447 bp, Artificial Sequence
  derived and/or modified sequence
cgaagcactggagagtgtcatggaggcctacgagcaggtccaaaagggacccctgaagctgaaaggcgtcgcagagctgggagtgaccaagcggaagaagaaaaagaaggacaaagacaaagcgaaactcctggaagcaatgggaacgagcaaaaagaacgaggaggagaagcggcgcggcctggacaagcggaccccggcccaggcggccttcgagaaaatgcaggagaagcggcaaatggaaaggatcctaaagaaggcatccaaaacccacaagcagagagtggaggacttcaacagacacctggacacactcacggagcattacgacattcccaaagtcagctggacgaagtagccgcctgcccccagtatggagcagcatcgagggttcgcaaaaggccacactggggttgtgtgtgtttcctttggtatattctggaaacatggctacacacacccttgcatcttctgctacagactgcttttcgaagctgtgtaccctcattctggaacttgattaaagtaagatcgtccttgtactcagtttaggcttcttggcaacatacagaagatacacccttttcgtttggatggaaagtttctaagtttatccagaggtaaagcccattgtgtgtctgtgtcatgtaaaaatgttttcacccgagttgcatgtaacgctctgaggccagccagctgtcttctcctggatgagacagactccagagggtaaggagctagcgccatggtggcctgcagtatgcagagccccgcaggacccagcgtgggcgcccttccaagcttcctctagctttgggcctatgctgtcccctgcaggccctagggaagccacttgcaactatgcggccttcagacttcctcctcagccacctggccactgagacagcatagcctgggtaacggaacagccacctaaggcaagaatggaacggacacaccttgctcctttctgagcccgtttcccaaaaccccccttccaggtgcttctaatgggtgttgccatagcagacgctgctaatgcatcacagcattctttgaaatggaaccagacacagcctgcctctcaatcctcagctgggggctcctagcagcctcttgtatttactcagagttgacacatcacacagatcctgtttggcattcctaccttacggacgtctcaggggtgacaggaccagggcagagccccggtacaaacagacaaggctgcagtcaaatgggagggtccaggtgtccgtgttggagggctgggatcttgtagggcctgtgcgtcctggctgaggatcaaaccacatatgttattgggagaaacgatttctgttgacgtagatattgaaagaataatgaaggcagaagagaaaaacgaagtgtggaatttggggttgtcctgtgtaaattacacaataaagcaaaagtcagttattgt

SEQ ID NO: 320472 - DNA, 483 bp, Artificial Sequence
  derived and/or modified sequence
atggccgagatccacaccccctacagcagcctgaagaagctgctgagcctgctgaacggcttcgtggccgtgagcggcatcatcctggtgggcctgggcatcggcggcaagtgcggcggcgccagcctgaccaacgtgctgggcctgagcagcgcctacctgctgcacgtgggcaacctgtgcctggtgatgggctgcatcaccgtgctgctgggctgcgccggctggtacggcgccaccaaggagagcagaggcaccctgctgttctgcatcctgagcatggtgatcgtgctgatcatggaggtgaccgccgccaccgtggtgctgctgttcttccccatcgtgggcgacgtggccctggagcacaccttcgtgaccctgagaaagaactacagaggctacaacgagcccgacgactacagcacccagtggaacctggtgatggagaagggcctgagcaagtacttcttcagcagcctgtag

SEQ ID NO: 320473 - DNA, 483 bp, Artificial Sequence
  derived and/or modified sequence
atggctgagatccatacaccatactcatcactgaagaagctactgtcacttctaaacggattcgtggcagtgagcggcataattctggtgggactgggcataggcggcaaatgtggcggcgctagtttgactaatgtcctcggcctttccagcgcctacttactgcacgtcggcaatctgtgtctcgtaatgggttgcataacagtccttcttggatgcgctggttggtatggtgcaacgaaggagtccaggggcaccttgctgttctgcattctgagcatggttattgtgttgataatggaagttaccgccgcaaccgtggtgttgctgtttttccccatagttggagacgttgcacttgagcacacctttgttacactgaggaaaaattatcggggatacaacgagcccgatgattatagtacacaatggaatctagtgatggaaaaaggcctttctaagtattttttcagctcactctag

SEQ ID NO: 320474 - DNA, 483 bp, Artificial Sequence
  derived and/or modified sequence
atggccgagatccacaccccctacagcagcctgaagaagctgctgagcctgctgaatggatttgtggccgtgtctggcatcatcctggtgggcctgggcatcggcggcaaatgtggcggggccagcctgaccaacgtgctgggcctgagcagcgcctacctgctgcacgtgggcaacctgtgcctggtgatgggctgcatcaccgtgctgctgggctgtgccggctggtatggagccaccaaggagagccggggcaccctgctcttctgcatcctgtccatggtgattgtgctgatcatggaggtgacagctgccaccgtggtgctgctcttcttccccatcgtgggagatgtggccctggagcacacctttgtgaccctgaggaagaactaccggggctacaatgaaccagatgactacagcacccagtggaacctggtgatggagaagggcctgagcaagtacttcttcagcagcctgtag

SEQ ID NO: 320475 - DNA, 483 bp, Artificial Sequence
  derived and/or modified sequence
atggccgagatccacaccccctacagcagcctgaagaagctgctgagtctgctgaacggcttcgtcgcagtgtccggaatcatcttagtaggacttgggattggtggaaagtgtggtggagctagcctgacaaacgtcctggggctgtctagcgcatacctgctgcatgtgggtaatttgtgtctggttatgggctgcattacagtactcctcgggtgcgccggttggtacggcgccacaaaggaaagccgcggcaccctcctgttttgtatcctgtctatggtaatcgtgctgatcatggaggtgacagctgcgaccgtagtgctgctattctttcccattgtcggcgacgtcgcattggaacatacctttgtgaccctgcggaagaactaccgggggtacaatgagcccgacgattattccactcagtggaacctcgttatggagaagggtctgtctaaatacttctttagctccctatag

SEQ ID NO: 320476 - DNA, 483 bp, Artificial Sequence
  derived and/or modified sequence
atggccgaaatacacacaccttatagctcacttaagaaactcctcagcctcctgaacgggtttgtcgccgtgagtggaattatacttgtaggcctcggaattggcggaaaatgtgggggagcgagccttaccaatgtcttaggtttatcttccgcatacctgcttcatgtgggcaacctctgcctggtaatgggatgcatcacagtcctcctcggctgtgccggatggtatggcgctacaaaggagagcagaggcactctcttgttttgcatcctgtcaatggtcatagtgctcatcatggaggtgactgccgcaactgtcgtcctgctgtttttcccaattgtgggcgacgttgccctggaacacacctttgtgaccctgaggaagaattatcgaggttacaatgagcccgacgattacagcacccaatggaacctggtgatggaaaagggattgtctaagtacttcttctcatctctgtag

SEQ ID NO: 320477 - DNA, 405 bp, Artificial Sequence
  derived and/or modified sequence
atgatccccgtgcggggcctgtggtactgctacctgcaggtgaagaaggtgcgcttaagagaagccgaacggctgggaccaaagtcacagtgcccagccgagtgtggggccgccagctggatctcttgggtattgcagcaccagcagctgcttgcttcagagtgggctacgaaggacggcagagggacttggggatccaagccttcttgtactgtgcctgcactctcagccacgtctcagctgctccagctaggtcgcttgaattcagatctgcagttcgtgcgacagcgtgctaaaaaaagcgtaagctcccctagtttgctacagttctggtgttgtcttagccgcctgtcatttcatgcactgaatcagaagattaacagcacgaatataaatatcacttag

SEQ ID NO: 320478 - protein, 320 aa, Artificial Sequence
  derived and/or modified sequence
METGNQTHAQEFLLLGFSATSEIQFILFGLFLSMYLVTFTGNLLIILAICSDSHLHTPMYFFLSNLSFADLCFTSTTVPKMLLNILTQNKFITYAGCLSQIFFFTSFGCLDNLLLTVMAYDRFVAVCHPLHYTVIMNPQLCGLLVLGSWCISVMGSLLETLTVLRLSFCTEMEIPHFFCDLLEVLKLACSDTFINNVVIYFATGVLGVISFTGIFFSYYKIVFSILRISSAGRKHKAFSTCGSHLSVVTLFYGTGFGVYLSSAATPSSRTSLVASVMYTMVTPMLNPFIYSLRNTDMKRALGRLLSRATFFNGDITAGLS

SEQ ID NO: 320479 - DNA, 1066 bp, Artificial Sequence
  derived and/or modified sequence
ccaaatttccatgttgccagtgtgttgataattgactgttgcttttttctctcttgtggcagttattttatccccatggaaacaggaaatcaaacacatgcccaagaatttctcctcctgggattttcagcaacgtcagagattcagttcattctctttgggctgttcctctccatgtacctagtcactttcaccgggaacctgctcatcatcctggccatatgctcagactcccacctccacacccccatgtacttcttcctctccaacctgtcttttgctgacctctgttttacctccacgactgtcccaaagatgttactgaatatactgacacagaacaaattcataacatatgcaggctgtctcagtcagattttttttttcacttcatttggatgcctggacaatttactcttgaccgtgatggcctatgaccgcttcgtggccgtctgtcaccccctgcactatacggtcatcatgaacccccagctctgtggactgctggttctggggtcctggtgcatcagtgtcatgggttccctgctcgagaccttgactgttttgaggctgtccttctgcaccgaaatggaaattccacactttttttgtgatctacttgaagtcctgaagctcgcctgttctgacaccttcattaataacgtggtgatatactttgcaactggcgtcctgggtgtgatttccttcactggaatatttttctcttactataaaattgttttctctatactgaggatttcctcagctgggagaaagcacaaagcgttttccacctgtggttcccacctctcagtggtcaccttgttctatggcacgggctttggggtctatctcagttctgcagccacaccatcttctaggacaagtctggtggcctcagtgatgtacaccatggtcacccccatgctgaaccccttcatctacagcctgaggaacacggacatgaagagggccctggggagactcctcagtagggcaacattttttaatggtgacatcactgcaggactttcataagtagcaaggcttggaccattgggaggca

SEQ ID NO: 320480 - protein, 503 aa, Artificial Sequence
  derived and/or modified sequence
MSGALLWPLLPLLLLLLSARDGVRAAQPQAPGYLIAAPSVFRAGVEEVISVTIFNSPREVTVQAQLVAQGEPVVQSQGAILDKGTIKLKVPTGLRGQALLKVWGRGWQAEEGPLFHNQTSVTVDGRGASVFIQTDKPVYRPQHRVLISIFTVSPNLRPVNEKLEAYILDPRGSRMIEWRHLKPFCCGITNMSFPLSDQPVLGEWFIFVEMQGHAYNKSFEVQKYVLPKFELLIDPPRYIQDLDACETGTVRARYTFGKPVAGALMINMTVNGVGYYSHEVGRPVLRTTKILGSRDFDICVRDMIPADVPEHFRGRVSIWAMVTSVDGSQQVAFDDSTPVQRQLVDIRYSKDTRKQFKPGLAYVGKVELSYPDGSPAEGVTVQIKAELTPKDNIYTSEVVSQRGLVGFEIPSIPTSAQHVWLEVFQELEDYDVSDSFGVSREDGPFWWAGLTAQRRRRSSVFPWPWGITKDSGFAFTVRRGNGTGGDDRPSEPEPPAGRWPLHR

SEQ ID NO: 320481 - DNA, 1512 bp, Artificial Sequence
  derived and/or modified sequence
atgtctggagcgttactttggcccttacttccgctacttctactcctgctgtccgcgagggatggagtgagagccgcacagccgcaggctccaggctacctcatcgcggctccaagtgtattccgcgcaggagttgaggaagtcattagtgtgaccatatttaatagtccccgtgaggtcaccgtgcaggcgcagttagtggctcagggtgaacctgtggtgcaatctcagggggctatcttggacaagggaacgatcaagctgaaagtacccactggtctccgtgggcaagcactcctgaaggtatggggtagaggttggcaggccgaagaagggcctctgtttcacaatcagacctcggtgactgtggatggtcgcggagcctctgtgtttatccagacagacaaaccagtatacagaccccagcacagagttttgatctccattttcaccgtaagccccaacctgcgccctgtgaatgagaagctcgaggcctatattctggatcctcgaggttcccgcatgatcgagtggaggcacctcaaacctttctgctgcggtattacaaacatgtccttcccactttccgaccagcccgtcctaggggagtggtttatcttcgtagaaatgcaggggcacgcctacaataagagctttgaagtgcaaaaatatgtgctccctaaattcgaactgctaatcgacccccctcgctatattcaggatctggacgcgtgtgagactggtaccgtccgcgctaggtataccttcgggaagccagtggccggtgccctcatgattaacatgactgtcaacggagtgggctactacagccatgaggtgggccgaccagtgctgagaactacgaaaatcctcggctccagggattttgacatctgcgtgcgggatatgatcccggcagatgtgcctgagcattttcggggtagagtttcaatatgggcgatggtcacttcagtggacggctctcagcaggtggccttcgacgacagcacccctgttcagcgacagcttgtggatataaggtactctaaagatacacgaaaacagtttaagccaggcctggcttatgttgggaaagtagaattgagctacccagatggttctcctgcagagggggtcaccgtgcaaataaaggccgaactaacccctaaggataatatctacacatcagaggtggtctcccagagagggcttgtgggcttcgagattccctctatccctacttccgcccaacatgtgtggctggaggtgttccaggaactcgaggactatgacgtcagtgattcgtttggtgtgagtcgggaagatggcccattctggtgggccggattaaccgcccagcgacggagacgcagtagtgtctttccatggccatgggggatcaccaaggacagtggattcgctttcaccgtgcgtcgtggaaacgggacaggtggggacgatcgaccaagcgaacctgagcctccagctggtaggtggcctttacaccgatag

SEQ ID NO: 320482 - DNA, 1512 bp, Artificial Sequence
  derived and/or modified sequence
atgagcggggcactcctttggcctttgctgccactgctattgttacttctgagtgcaagggacggggttagggcagcacagccccaggccccgggataccttatcgcagcaccctctgtcttccgagccggtgtagaggaagtgatctcggtgactatatttaatagtccacgtgaggtgaccgtacaagcacaactggtggcacagggggaacccgtcgtgcagagccaaggtgccattctagacaaaggaactatcaaactcaaggtgccaacaggactccgcggacaagcactgctgaaagtatggggaagggggtggcaggcagaagaaggtcccctgttccataaccagacgtcagtgacagtcgacggaagaggcgccagcgtttttatccagacagataagccggtatacagaccccagcatcgagtgctcatctctatcttcaccgtgtcccccaacctccggcctgtcaacgaaaaactggaagcatacatcttggacccaagagggagcagaatgatcgagtggaggcacttgaagcccttctgctgcggcatcacaaatatgagttttccactgtcagaccaaccagttctgggcgaatggttcatttttgtggagatgcaaggtcacgcctacaacaaatccttcgaagtgcaaaaatacgtgctgccaaagttcgaattgctgatagacccacctcgctacattcaggacctggatgcatgcgaaactggcacagtacgcgccaggtacacgttcggcaaacctgtggctggcgctctaatgatcaacatgaccgtcaatggtgtgggatattactcacacgaggtaggcaggccggtgctgaggactactaaaattcttggaagtcgtgatttcgacatctgcgtgagggacatgatcccggccgacgttcccgagcattttagaggaagagtgagcatctgggccatggtgacatcagtggacggaagccagcaggtcgctttcgacgactctactccggttcaaaggcagctcgtggacattcgttactctaaggatacaaggaaacagtttaagcccggcctggcttatgtgggtaaagtcgaattgtcgtaccccgatggatccccagctgaaggcgtcacggtccagattaaggctgaattgactcccaaggataacatttacacttcagaagtggtgagccagcgcggtttagtgggctttgagatcccaagcatccccacttccgctcagcacgtttggctcgaggttttccaagagctcgaggattatgacgtgtcggactctttcggggttagtcgggaagacggacctttttggtgggctggtttaacagcccagcggcggagacgatcaagtgtattcccttggccgtggggtatcactaaggattcagggtttgctttcactgtgcgcagaggcaatgggaccggtggtgatgatagaccaagtgaacctgaaccccctgctggccgatggcccctgcaccgatag

SEQ ID NO: 320483 - DNA, 1512 bp, Artificial Sequence
  derived and/or modified sequence
atgtcaggcgctctgctctggcctcttttgccgcttctgttacttctgttaagtgcgcgtgatggagtccgggccgcccagccccaagcccctggatatctgatcgcagctcccagcgtgtttagagctggcgtcgaggaagttattagtgttacaatctttaatagtcctcgcgaagtgacagtgcaagcccagttagtcgctcagggcgagcccgtagtgcagagtcagggtgctattctcgataaagggactattaaacttaaagtgcccactggcttgcgtggacaagcactcctgaaggtctggggacgtggatggcaggctgaggagggtcccttgttccataaccagacctcagtcacagtggacgggagaggagccagcgttttcatccagacagataaaccagtgtaccggcctcagcacagggtgctcatatctatctttaccgtgtccccaaacttaagaccagtgaacgaaaagcttgaagcatacatcctggatccaaggggctcgcgcatgattgagtggagacatctgaagcctttctgttgcggaataactaatatgtcattccctctaagtgatcagcctgttctgggtgagtggtttatctttgtcgagatgcagggtcacgcctataacaagagttttgaggtccagaaatatgttctccctaagtttgagttgcttatcgatcctcctcgctacattcaggatttggacgcatgcgaaaccggaactgtgagggctcggtatacatttggaaagcccgtagctggtgctctgatgattaacatgactgtgaatggagtgggttattatagtcacgaggtcggacggcctgtgttgagaaccaccaagatactcggaagtcgcgactttgatatctgtgtccgggatatgattccagcggacgtgcctgagcatttcagaggaagggtcagtatttgggcgatggtgacaagtgtggatggaagtcaacaggttgcttttgatgattctacaccggtccagcgacagctcgtggatatccggtacagcaaagacactaggaagcagttcaagccaggattagcatatgtgggtaaggtggagttgtcctacccagatggaagccccgctgaaggtgtaacggtccaaatcaaagccgagcttaccccaaaagacaacatctacacaagtgaagtcgtctcccagagagggctggtgggcttcgagataccaagcatccccacaagtgctcaacacgtctggctcgaggtgtttcaagaattggaggattatgacgtaagtgacagtttcggggtcagccgcgaggatgggccattttggtgggcaggtctcacagcccagagaagacgacggagctcagtctttccctggccatgggggatcactaaagattctggattcgcttttaccgtgcgaaggggaaatggcactggaggtgatgaccggcctagtgaaccagaaccacccgctggtcgttggcctttgcataggtag

SEQ ID NO: 320484 - DNA, 1512 bp, Artificial Sequence
  derived and/or modified sequence
atgagcggcgccctgctgtggcccctgctgcccctgctgctgctgctgctgagcgccagagacggcgtgagagccgcccagccccaggcccccggctacctgatcgccgcccccagcgtgttcagagccggcgtggaggaggtgatcagcgtgaccatcttcaacagccccagagaggtgaccgtgcaggcccagctggtggcccagggcgagcccgtggtgcagagccagggcgccatcctggacaagggcaccatcaagctgaaggtgcccaccggcctgagaggccaggccctgctgaaggtgtggggcagaggctggcaggccgaggagggccccctgttccacaaccagaccagcgtgaccgtggacggcagaggcgccagcgtgttcatccagaccgacaagcccgtgtacagaccccagcacagagtgctgatcagcatcttcaccgtgagccccaacctgagacccgtgaacgagaagctggaggcctacatcctggaccccagaggcagcagaatgatcgagtggagacacctgaagcccttctgctgcggcatcaccaacatgagcttccccctgagcgaccagcccgtgctgggcgagtggttcatcttcgtggagatgcagggccacgcctacaacaagagcttcgaggtgcagaagtacgtgctgcccaagttcgagctgctgatcgacccccccagatacatccaggacctggacgcctgcgagaccggcaccgtgagagccagatacaccttcggcaagcccgtggccggcgccctgatgatcaacatgaccgtgaacggcgtgggctactacagccacgaggtgggcagacccgtgctgagaaccaccaagatcctgggcagcagagacttcgacatctgcgtgagagacatgatccccgccgacgtgcccgagcacttcagaggcagagtgagcatctgggccatggtgaccagcgtggacggcagccagcaggtggccttcgacgacagcacccccgtgcagagacagctggtggacatcagatacagcaaggacaccagaaagcagttcaagcccggcctggcctacgtgggcaaggtggagctgagctaccccgacggcagccccgccgagggcgtgaccgtgcagatcaaggccgagctgacccccaaggacaacatctacaccagcgaggtggtgagccagagaggcctggtgggcttcgagatccccagcatccccaccagcgcccagcacgtgtggctggaggtgttccaggagctggaggactacgacgtgagcgacagcttcggcgtgagcagagaggacggccccttctggtgggccggcctgaccgcccagagaagaagaagaagcagcgtgttcccctggccctggggcatcaccaaggacagcggcttcgccttcaccgtgagaagaggcaacggcaccggcggcgacgacagacccagcgagcccgagccccccgccggcagatggcccctgcacagatag

SEQ ID NO: 320485 - DNA, 1512 bp, Artificial Sequence
  derived and/or modified sequence
atgtctggtgctctactgtggcctctcctgcctcttctgctgctccttctttcagcccgggatggggtgagggcagcccaacctcaagctccaggctatcttatagcggctccgtcagtattcagggccggtgtagaggaagtaattagcgtgaccatctttaattctcctagagaagtgacagtccaggcccaactggtggcccagggtgagccggtagtgcagtcacagggagcaattctggataaaggaacgatcaagctgaaagtgccaacgggcctgcgtggacaggcactactgaaggtgtgggggcgaggctggcaggccgaagaaggacccctattccataatcagactagtgtgacagtagacgggcgaggagccagcgtttttattcagaccgacaagccggtgtataggccccagcatcgagtgttgatttccatctttacggtttcaccaaatctaaggccagtgaacgaaaaactcgaggcctacatacttgatccccgaggctcccgcatgattgagtggaggcatctcaagcctttttgctgcggcatcaccaacatgtcttttcctctgtcagaccagccagtcctgggtgagtggttcatttttgtcgaaatgcagggccatgcttacaataagtcctttgaggtacaaaaatatgtcctgcccaagtttgagctgctcatcgatcccccacgctatatacaagatctagatgcctgcgagacagggacagtgagggcccgctatacttttgggaagcccgttgctggcgcgctgatgataaacatgacggtcaatggggtaggctactacagccatgaggttgggcggccagtgctcagaaccaccaagattcttggctctagggatttcgacatttgcgttcgggatatgattccagcggacgtgcccgagcattttcggggccgtgtctcaatatgggccatggtgacaagcgtcgatggctcccagcaagtcgccttcgacgattctacccccgtgcaaagacagttggttgatatccgctacagtaaggatacgcgtaagcaattcaagcctgggttggcctacgtggggaaggtggaactgtcctatccagatggctccccagccgagggagtgaccgttcagataaaggccgagctcacccccaaagacaatatctacacctccgaagttgtgtcccagcgtggactcgtggggttcgagattcccagtatcccgacgtcggcccagcatgtatggctggaggtgttccaagagctggaagactacgacgtctcagatagtttcggcgtgtcgcgggaggatggaccattttggtgggcgggcctcaccgcccagaggagacggcggagtagtgtgttcccttggccatggggcataacgaaagattccgggttcgcgttcacagtcaggcggggtaacggaacggggggcgacgatagaccctcagagccggaaccccccgctggtcgatggcccctccatcgctag

SEQ ID NO: 320486 - DNA, 1512 bp, Artificial Sequence
  derived and/or modified sequence
atgtctggggccctgctgtggcccctgctgcccctgctgctgctgctgctgagcgccagagatggagtgcgggccgcccagccccaggcccctggctacctgattgctgcccccagcgtcttccgggccggcgtggaggaggtgatctctgtgaccatcttcaacagcccccgggaggtgacagtgcaggcccagctggtggcccagggcgagcctgtggtgcagagccagggcgccatcctggacaagggcaccatcaagctgaaggtgcccaccggcctgcggggccaggccctgctgaaggtgtggggccggggctggcaggccgaggagggccccctcttccacaaccagacctctgtgacagtggatggccgcggggcctctgtgttcatccagacagacaagcctgtgtaccggccccagcaccgggtgctgatcagcatcttcaccgtgagccccaacctgcggcctgtgaatgagaagctggaggcctacatcctggacccccggggcagcaggatgattgagtggaggcacctgaagcccttctgctgcggcatcaccaacatgtccttccccctgagtgaccagcctgtgctgggggagtggttcatctttgtggagatgcagggccacgcctacaacaagagctttgaggtgcagaagtatgtgctgcccaagtttgagctgctgattgatcctccccgctacatccaggacctggatgcctgtgaaacaggaacagtgcgggcccgctacaccttcggcaagcctgtggccggggccctgatgatcaacatgacagtgaatggagtgggctactacagccatgaggtgggccggcctgtgctgcggaccaccaagatcctgggcagccgggactttgacatctgtgtgcgggacatgatcccagcagatgtgcctgagcacttccggggccgggtgtccatctgggccatggtgacctctgtggatggcagccagcaggtggcctttgatgacagcacccctgtgcagaggcagctggtggacatccgctacagcaaggacaccaggaagcagttcaagccaggcctggcctacgtgggcaaggtggagctgagctacccagatggcagccctgctgagggcgtgacagtgcagatcaaggccgagctgacccccaaggacaacatctacaccagcgaggtggtgtcccagaggggcctggtgggctttgagatccccagcatccccaccagcgcccagcacgtgtggctggaggtgttccaggagctggaggactatgatgtgtctgacagctttggagtgtccagagaagatggccccttctggtgggccggcctgacagcccagaggagaagaagaagctctgtgttcccctggccctggggcatcaccaaggacagcggctttgccttcaccgtgagaagaggaaatggaactggaggagatgaccggcccagcgagcctgagcccccagctggccgctggcccctgcacaggtag

SEQ ID NO: 320487 - DNA, 1512 bp, Artificial Sequence
  derived and/or modified sequence
atgagcggcgccctgctgtggcccctgctgcccctgctgctgctgctcctgagcgcaagagacggcgtgagggcggcccagccccaagcgccagggtacctgattgccgccccaagcgtgttcagggcaggtgtcgaggaggtcatcagtgtgaccatctttaatagcccacgtgaagtgacggtgcaggctcaactggtagcccagggcgaaccagtcgtgcagtcccaaggtgcgatcctggacaagggaaccattaaattaaaagttccaacagggctgagggggcaagcactacttaaggtctggggccgcgggtggcaggccgaggagggtccattgttccacaatcagacctcagtgaccgtggatggcagaggagccagtgtttttattcagactgataagcccgtctatagaccacagcatcgggtactgatcagcattttcaccgtcagcccaaatctgcgtccagttaatgaaaagcttgaagcctacatactagacccaaggggatctcgtatgattgaatggcgacaccttaagccattttgttgcgggataaccaatatgtcgtttccgctgtctgatcagccggtcctgggagaatggtttatttttgtggagatgcaaggtcacgcttacaataagagttttgaggtgcaaaaatacgtattgcccaaatttgaactactcatagacccaccccgttacatccaggatctggatgcttgtgaaacaggtactgttcgggcccggtatacgtttggcaagccagtcgccggtgcgctgatgattaatatgactgttaatggagtgggctactattcacatgaggtgggcaggccagtcctgaggaccacgaaaatcctgggttctcgcgatttcgacatatgtgttagggatatgatacccgccgacgtgccagaacatttccgcggccgcgtatccatttgggcaatggtcacatctgttgacgggagccagcaggtggctttcgatgactctacccccgtgcaacgtcaactagtggatataaggtattcgaaggacaccagaaaacagtttaaaccaggtttggcttatgttggaaaggtggagttgtcctaccctgacggcagccctgccgagggcgttactgtgcagatcaaggctgaactcactcccaaagataacatctacactagcgaggtggtgtcccaaagaggacttgttggttttgagatccccagcattccaaccagtgcccagcacgtgtggctggaggtttttcaggaactggaggattacgatgtatcggacagcttcggggtgtcaagggaggatggtcctttttggtgggcaggcctgaccgctcagaggcgacggaggtcttctgtgttcccttggccgtggggaataactaaggatagcgggttcgcttttacagttaggcgagggaatggaactggcggcgatgaccggccttccgaacctgagcccccggcggggcggtggcctctgcaccgctag

SEQ ID NO: 320488 - DNA, 2120 bp, Artificial Sequence
  derived and/or modified sequence
gccccagcttggccgggcgcggagcggggcgcatggcgccgggcgcactgcgcgggggctgcgaacaaagggcccccggcggcggcgcgaggacggccgcgctcggaccctggccctggcccagccctggcccggccccctccccaggcgcggcgccccccaggagccgaaaaatgagcggcgccctgctctggccgttgctcccgctcctgctcctgctgctgtcggcgcgggacggcgtgcgcgccgcgcagcctcaggccccgggttacttgattgcagctccctctgtttttcgcgcgggcgtggaggaagtcatcagcgtgaccatctttaactctccaagggaagtcacggtccaggctcagctggtggcccagggtgagccggtggtgcagagccagggagccatcctggataaagggacaatcaaactcaaggtgcccacgggcctccggggccaagcgcttctgaaagtgtggggccgcggctggcaggcggaggaggggcccctctttcacaaccagacctcggtgaccgtggacggccggggcgcttctgtattcatccagacggacaagcctgtgtacagaccccagcaccgagtgctcataagcatcttcaccgtctctccaaatctgaggcctgtcaacgagaagctggaagcctacatcctggacccccgaggctctcggatgatagagtggagacacttaaagccgttctgctgcggcatcaccaacatgagcttccccttgtccgaccagcctgtgttgggagaatggttcatttttgttgaaatgcaaggccacgcgtacaacaagtcttttgaagttcagaagtatgtgttgcccaagtttgagcttctgattgacccgccccggtatatccaagacctggacgcctgtgagacaggcactgtgcgggccaggtatacctttgggaaacctgtggctggtgccttaatgatcaacatgactgttaatggtgtagggtactacagccacgaggtgggacgccctgtcctcagaacaaccaagatcctcggctcccgggacttcgacatctgcgtgagggacatgatcccagcggacgtccctgagcacttccggggcagggtcagcatctgggccatggtgaccagtgtggacgggagccagcaggtcgcgttcgatgactccacccccgtgcagaggcagctggtggacatccggtactccaaggacacgaggaagcagttcaagccgggcctggcctacgtggggaaggtggagctatcctaccccgatggcagcccagctgagggggtgacggtccagattaaggcagagctgacaccaaaggataacatctacaccagtgaagttgtgtcccagcgtggactagtggggtttgaaatcccctccatccccacgtcagcccagcacgtgtggctggaggttttccaggaactggaagattatgatgtttctgattcctttggcgtgtccagggaggatggtcctttttggtgggctgggctgacggcacaacgacgccggcgctcctctgtcttcccgtggccttggggcatcaccaaggactctgggtttgccttcaccgtaaggagaggaaacgggactggtggtgatgaccgaccgagtgagcctgaaccaccggcaggacggtggcctctacaccgatgaggctgtccccgctttccagccccacacagggagcctggtggcagtggctccttccaggcacccccccagaacagagaagagaaaaaggactttcttccccgaaacatggatttggcattgtctcaacatcaggtacattaagatttcttttctgcgctgactttgccggttgagtgaaagacactcatgcgggtccagagagcctccggtgagatgggcaggcctgataccaacatctgagcaagacactgtgcatctttttctaacacacaaaacttcaagccatgaagccagccttgagtcccgctgcacatttggacgtttgcctgtgaaatatgaaatgcaagggctttgtgcctcttataactccctcttggggttactctatctgctctgtttgtataacgagctcattaaaatgattacagttccctg

SEQ ID NO: 320489 - RNA, 1512 nt, Artificial Sequence
  derived and/or modified sequence
augagcggggcacuccuuuggccuuugcugccacugcuauuguuacuucugagugcaagggacgggguuagggcagcacagccccaggccccgggauaccuuaucgcagcacccucugucuuccgagccgguguagaggaagugaucucggugacuauauuuaauaguccacgugaggugaccguacaagcacaacugguggcacagggggaacccgucgugcagagccaaggugccauucuagacaaaggaacuaucaaacucaaggugccaacaggacuccgcggacaagcacugcugaaaguauggggaaggggguggcaggcagaagaagguccccuguuccauaaccagacgucagugacagucgacggaagaggcgccagcguuuuuauccagacagauaagccgguauacagaccccagcaucgagugcucaucucuaucuucaccgugucccccaaccuccggccugucaacgaaaaacuggaagcauacaucuuggacccaagagggagcagaaugaucgaguggaggcacuugaagcccuucugcugcggcaucacaaauaugaguuuuccacugucagaccaaccaguucugggcgaaugguucauuuuuguggagaugcaaggucacgccuacaacaaauccuucgaagugcaaaaauacgugcugccaaaguucgaauugcugauagacccaccucgcuacauucaggaccuggaugcaugcgaaacuggcacaguacgcgccagguacacguucggcaaaccuguggcuggcgcucuaaugaucaacaugaccgucaauggugugggauauuacucacacgagguaggcaggccggugcugaggacuacuaaaauucuuggaagucgugauuucgacaucugcgugagggacaugaucccggccgacguucccgagcauuuuagaggaagagugagcaucugggccauggugacaucaguggacggaagccagcaggucgcuuucgacgacucuacuccgguucaaaggcagcucguggacauucguuacucuaaggauacaaggaaacaguuuaagcccggccuggcuuauguggguaaagucgaauugucguaccccgauggauccccagcugaaggcgucacgguccagauuaaggcugaauugacucccaaggauaacauuuacacuucagaaguggugagccagcgcgguuuagugggcuuugagaucccaagcauccccacuuccgcucagcacguuuggcucgagguuuuccaagagcucgaggauuaugacgugucggacucuuucgggguuagucgggaagacggaccuuuuuggugggcugguuuaacagcccagcggcggagacgaucaaguguauucccuuggccgugggguaucacuaaggauucaggguuugcuuucacugugcgcagaggcaaugggaccgguggugaugauagaccaagugaaccugaacccccugcuggccgauggccccugcaccgauag

SEQ ID NO: 320490 - RNA, 1512 nt, Artificial Sequence
  derived and/or modified sequence
augucaggcgcucugcucuggccucuuuugccgcuucuguuacuucuguuaagugcgcgugauggaguccgggccgcccagccccaagccccuggauaucugaucgcagcucccagcguguuuagagcuggcgucgaggaaguuauuaguguuacaaucuuuaauaguccucgcgaagugacagugcaagcccaguuagucgcucagggcgagcccguagugcagagucagggugcuauucucgauaaagggacuauuaaacuuaaagugcccacuggcuugcguggacaagcacuccugaaggucuggggacguggauggcaggcugaggagggucccuuguuccauaaccagaccucagucacaguggacgggagaggagccagcguuuucauccagacagauaaaccaguguaccggccucagcacagggugcucauaucuaucuuuaccguguccccaaacuuaagaccagugaacgaaaagcuugaagcauacauccuggauccaaggggcucgcgcaugauugaguggagacaucugaagccuuucuguugcggaauaacuaauaugucauucccucuaagugaucagccuguucugggugagugguuuaucuuugucgagaugcagggucacgccuauaacaagaguuuugagguccagaaauauguucucccuaaguuugaguugcuuaucgauccuccucgcuacauucaggauuuggacgcaugcgaaaccggaacugugagggcucgguauacauuuggaaagcccguagcuggugcucugaugauuaacaugacugugaauggaguggguuauuauagucacgaggucggacggccuguguugagaaccaccaagauacucggaagucgcgacuuugauaucuguguccgggauaugauuccagcggacgugccugagcauuucagaggaagggucaguauuugggcgauggugacaaguguggauggaagucaacagguugcuuuugaugauucuacaccgguccagcgacagcucguggauauccgguacagcaaagacacuaggaagcaguucaagccaggauuagcauauguggguaagguggaguuguccuacccagauggaagccccgcugaagguguaacgguccaaaucaaagccgagcuuaccccaaaagacaacaucuacacaagugaagucgucucccagagagggcuggugggcuucgagauaccaagcauccccacaagugcucaacacgucuggcucgagguguuucaagaauuggaggauuaugacguaagugacaguuucggggucagccgcgaggaugggccauuuuggugggcaggucucacagcccagagaagacgacggagcucagucuuucccuggccaugggggaucacuaaagauucuggauucgcuuuuaccgugcgaaggggaaauggcacuggaggugaugaccggccuagugaaccagaaccacccgcuggucguuggccuuugcauagguag

SEQ ID NO: 320491 - DNA, 1647 bp, Artificial Sequence
  derived and/or modified sequence
aatcctcccactagacactcccgcatggtagctggagcagcaaacaactgcttagggatttgaagccaggtgtcctaacttcctccatgggcgctcagcctggggaacctcagaacacttgctctaggatccagacactgtttaggagggtcaagaccttactcatcaaagccccgcctcccccccaacctccgcctccacccccatcctggaaccctggctgtacacacgtgtatgggtacgcgtttggccacatgcatgacaacaaccttgaacatctcccgtcacagcaggtactggacacaggagagcagctgatggtccccgtggaagtcctggaagtggataacaaggaggccttgtggaagtttctactctcaggagctatggccggggcggtgtctcgcacgggcacggcacctctggacagagccaaggtgtacatgcagctactcgggaggctgaggcaggagaatcgcctgaacctgggaggcggaggttgcagtgagccgagatcccccgaccgcactccagcctgggcgacagagtctactcctccaagacgaacttcaccaacctgctgggggggctacagagcatggtccaggagggcggcttccgctccctgtggcggggcaacggcatcaacgtgctcaagattgctcctgagtatgccatcaagttctccgtattcgagcagtgcaagaattacttctgtggaatacaagggtccccgcccttccaggagcgtctccttgctggctccctggctgtggccatctcccagaccctcatcaaccccatggaggtgctgaagacgcggttgaccttgcgtcggacgggccagtacaaggggctgctggactgcgccaggcagatcttgcagcgagagggcacccgcgccctttaccgcggctacctgcccaatatgctcggcatcatcccctatgcctgcaccgacctggctgtctatgagatgctccagtgcttctgggtgaagtcaggcagggatatgggggaccccagtggcctggtcagtctgtcgtctgtgacgctatccacgacctgtggccagatggccagctacccactgactctggtgcgcaccaggatgcaggcccaagataccgtggagggctcaaatcccaccatgcgcggagtcctccagcggatcctggcccagcagggctggctagggctgtaccgaggcatgacccccacgctactgaaggtcttaccagcaggtggcatcagctatgtggtgtacgaagccatgaagaaaaccctgggcatataggctgtgagctggacgacacagcctaggcagaaatgggacaggaggacctgatgacccctggccccaaagagccctcgaggcctcaaggttcaggccctggggcagtttttggtggcaaaagcaggctgggggtgggggtggggctctgggtcagaagattcctgaagctggggttggtggtgggtggaggggggcagtgctgggtcagaaaactcctgggactccctccccagggtgcagcctgagacaagaaacgtggactccagtctggccccttgtgggtcgtcctggctccagggcgaaatggtgaacatgtcacacaacaaggaataaagagatggtttttgctg

SEQ ID NO: 320492 - DNA, 6162 bp, Artificial Sequence
  derived and/or modified sequence
tggatgcagagagggaagccctgcagagcactgcctaccctgaagtgccagaccttctgccagaggcacggcttgatgtttgaggtcgttgatctgaggtggggtattcggaacattgaagccactgaccacttgaccacagaactctgcttggaggaggttgaccggtgttggaaaacatccatagggccagcttttgttgagaaatgtgctgatccctgtcctggacagtaaagagggaaaaagtaaagaaaagtaccatggccaggccctcatcggtgatcagtacggcccctgtctgattccctcgcggatcgatgagaaggagtgggaggtattgagggaccatctgactgccaggccaagtgacctggagctggtggcacgatacttccagagggacgagaatgcgtttcctcccacctacgtcctgcaggcaccaggtactggggaggcctgtgaaccagaggaggccaccttaacttctgtcctacgctctggagcccaggaggcccggaggctggggctcatcacccaggagcagtggcagcactaccaccggtcagtcattgagtgggagatagagcggagcctgctgagctcagaggaccgggaacagggagccaccgtcttccttagagagatccaagacctccacaaacacatccttgaagactgcgcccttaggatggtggaccggctcgcggatggctgcctggacgctgatgcccagaaccttctcagcagcctcaaaagtcacatcactgacatgcacccaggggtcctcaagacccaccgcctgccgtggagccgcgacttggtgaaccccaagaacaagactcacgcctgctacctgaaggagctgggtgagcagtttgtggtgagggccaatcaccaggtcctcacacgcctccgtgagctggatacggccggacaggagttggcgtggctctaccaagagatccgccaccacctttggcagagctcggaggtcattcagaccttctgcggacgccaggaactcctggcccggcttgggcagcagctcaggcacgatgacagcaagcagcacacccccctggtactctttgggcccccaggcattggaaagacagccctgatgtgcaagctggctgagcagatgccaaggctgctggggcacaagacagtgaccgtcctgcggctgctggggacgtcacaaatgagctcagatgcccgtggcctgctgaagagcatctgcttccaggtgtgcctggcctatgggctgcccttgccccctgcccaggttctggacgcccacaccagggtggtccagtttttccataccctcctccacactgtctcttgcagaaacttcgagtctctcgtgctcctgctggatgctatggatgacctggactctgtccgccatgctcggagggttccctggctgcctctcaactgccccccgagggtgcacctcatcctctcagcttgctcgggggcactgggggttttggacaccttgcagcgggtgctcctggacccggaggcctactgggaggtgaagcccctttccggaaaccaaggccagcagatgatccaactcctgctggcagctgcaaggaggacgctgagcccggtgcacacagatttgctctgggccagcctcccagagtgtgggaacccagggcggctgaggctggcgtttgaggaagcccggaaatgggcctctttcaccgtgcctgtcccgctggccaccaccgcagaggaagccacgcaccaactctgcacccgcctggagcagacacacgggcagctcctcgtggcccacgtgctgggctacattgtgtcttcccgacacggtctctcggaggcggagctgaaggatgttttgtccctggacgacgaggtcctgcaggatgtgtaccgagattggaccccgcccagcaaggagctgctgcgcttcccgcccctgctgtgggtgcggcttcgtcgggatctgggatactacttggcccggcggcccgtggatggcttcaccctcctggccattgcccacagacagctggtcgaggtggtccgtgagcgctacctgtcaggatccgagagagccaagaggcatggcgtcctggccgacttcttctcagggacctggagccagggtaccaagaagctcatcactctgccacttgtggggaaaccactgaacttggaccgaaaggtggccccgcagcctctgtggttctcacatacggttgcaaacctgcggaagctgaaggagttgccctatcacctgcttcactcgggccgcctggaggagctgaaacaggaggttctgggcagcatgagctggatttcctgccggggcatctctgggggcattgaagacctgctggatgactttgacctgtgtgcccctcacctggactcccctgaggttggcctggtccgtgaagccctccagctctgccgccctgctgtggagctccgaggcatggagaggagcctcctgtacacagaactgctggccagactccatttcttcgccacctcacatccagcactggtgggacagctatgccaacaggcccagagctggttccagttgtgcgcacaccctgtgctggtgcccctcggaggattcctccagcccccgggaggacccctccgggcaactctcagcggctgtcacaaaggcatcaccgccatggcatggggtgtggaggagaagctgctggtgattggcacccaggatggcatcatggctgtgtgggacatggaagagcagcatgtgatccacatgctaactggacacacaggagaggtgaggtgtgtgaaaatatttgccaaagggaccctcgccaactctgcttcaaaggattacacgctgcacttgtggaacttactctctggccaggagaaatttaccatttgggatggaggctcaaaaaatcccgctgaacctcagatctggaaccttcatgtggatgaggcacacaaagttgtgtattcagcatctggctcaaagatcaatgcttggaatctggaaactgcagagccggtattccatatcctgggagatgcctctgatccttggatgtgcatggccgtgctggcctcccaggccacactgctgacagtgtccagggatggtgtggtcagtctgtggagctcagctacgggaaaacttcaggggaagcaacatatgtccagcatcaaagaagaaacacctacctgtgccgtctcagtccagaagcaaggaaagcttgttaccgggtttagcaatggctccatctctttggtttcctccaaaggggacagattgctggagaagcttccagatgctgtgaggttcctggtggtctctgaagatgagtccctcctcgccgcaggctttggaagatcggtgcggatattcttggcggactcgaggggctttcgccgattcatggccatggatctggaacatgaagacatggtggagacggctgtttttggtactgagaacaacctgatcatcacggggtcccttgatgcgctcattcaggtgtggagtctgtcagaacaggggacccttctggacatcctggaaggcgtcggggcccccgtgagcctgctggcccgcggcggggctttggtggcatctgcttccccacagtcctcatctttcaaggtctgggatctcagcgatgctcataggtcccgggtgcctgcaccatttctggaccgcaccggcctcaccgcagtgtcccacaatggaagctacgtctacttccccaaaattggggacaaaaacaaagtcactatttgggacttggcagaaggcgaggaacaagattccctggacacctccagtgagatcaggtgtctggaggttgctgagcagcgcaagctcctatttacgggcctcgtgtcgggggtcgtccttgtgttccccctgaattccaggcaggacgtgatatgcattccccctcccgaggcccggaaagcaatcaactgcatgtccctgagcaagtgcgaggaccgcctggccatcgcctatgacaacatcgtcctggtgctggacatcacctccggggacccctgcccggtcatcgatgggccaagatacaccttttacactcagctgcccgagaccctctccagcgtggccattctgacggactaccgcgtggtctacagcatgaccaatggggacctctttctttacgagtgtgcaacttccaaagcgtttcccttggagacccacaggagccgagttgcctgtgtggaggtcagccacaaggagcagctggtggtcagcgggtctgaggatgccctgctgtgtctctgggacctgcaggcacgcaagtggaaattcgagatgagctacacgagttcttactgcagaggggtccaatgtgcttgcttctccaaggatgacaagtatgtgtacgtgggcttaaaggatcgctctatacttgtttggagtgtgctggatggcaccctgctgacagtccagtttgtccatgctgtggtaaacagaatcatcccaaccaccagtggcttcattgcccccaccaggcatggttatctgatccgagagaatttccagtgcctttcagcaaaagcctcaccgcaggaccctcttaagaacttcaagaaggcaatgtggatggtcaaatccaggcagagagaggagctagttgcagctgcaggagctccccaggacttggagtcagaaagtgcccagggaaatgaaaccaaatcaaacaaatgctcacaagtgtgcctgatagtgtaaaaaaataaaaataaaaaaaccctgtgggggtatggggctccagtgagttagccccatttaatctagttaaagcaaaaagaatacgtttgctggtgtatatctggacccatggcttcagattatggcttcagaccttgtctcttctcatctttccattattctttcctctttttcattttcattctcagacttgccacccccaggttagcaacatggtggccaatatgctgctgtctccaatttcaatagaaaagagagcttctctttcccaacagtcctagcctcaactctactggtcccaattggcccatacgcctagccctaaaccaattattatatctgggagaatgcagagctctaatcggctagactgatccaatgtccaccactgggactgagaatagaagagattactcctgagatgcaaactggagttctggtaccagatgaagggggaacggatgaatgtgagatacagcaaatcactgatgtggaccacagaacctcacagtttataaagctgtaggtgctgtcatctgatcctcatcacaactcatactttagggagggcaggagtttctgtatctattttacagatgaggaaactgagccttgcggaagtagttataatttgattcaggtcacaagtccaaggtgcaagagctctgagagtgagccttctgtcccattcctgttagacctcactccaatttcagtctgcagagcacaaccatctcttccacaggcaccacactcaaatgctcacaggagctagtgactaatctagacacttccatgcacctgggtgagcagcagggagagacagagactggacatgtggaaggcagagattgtgtctagggtgggtatgagcagcctgactgtagcccagaatcaccatggccaaacaagcccactgctgtcagtgcttccagttgtaataagcaaagccagaaatccagacttttatgcaaaaatgttctgacttttaaagttggcgattggttgaatttatatctatagtgcatttggcatgtgcgtctttggttaatgagctgacttcaggactcacgctggcagtaaaacaatcaacatgttatagttcatccctctctattccttggctcccaaacttttgggataaagatgtgggtttttaatcttaaaaactggaggctcttggaagtagaaagagctgctgatctctccctgctttgcttttgaactgtctgccttgtgcaagttcaacagtcaaactgttttcattccacttaagtggatctttcttctttgcccacagccttctaaaagcccttctcagtcttctcaggcttttactttaatgctaggatagtctaaatcttcaaggtggctatcccttctcccctccgtggaat

SEQ ID NO: 320493 - protein, 812 aa, Artificial Sequence
  derived and/or modified sequence
MGGRVFLVFLAFCVWLTLPGAETQDSRGCARWCPQDSSCVNATACRCNPGFSSFSEIITTPMETCDDINECATLSKVSCGKFSDCWNTEGSYDCVCSPGYEPVSGAKTFKNESENTCQDVDECQQNPRLCKSYGTCVNTLGSYTCQCLPGFKLKPEDPKLCTDVNECTSGQNPCHSSTHCLNNVGSYQCRCRPGWQPIPGSPNGPNNTVCEDVDECSSGQHQCDSSTVCFNTVGSYSCRCRPGWKPRHGIPNNQKDTVCEDMTFSTWTPPPGVHSQTLSRFFDKVQDLGRDYKPGLANNTIQSILQALDELLEAPGDLETLPRLQQHCVASHLLDGLEDVLRGLSKNLSNGLLNFSYPAGTELSLEVQKQVDRSVTLRQNQAVMQLDWNQAQKSGDPGMGKLLAEAPLVLEPEKQMLLHETHQGLLQDGSPILLSDVISAFLSNNDTQNLSSPVTFTFSHRSVIPRQKVLCVFWEHGQNGCGHWATTGCSTIGTRDTSTICRCTHLSSFAVLMAHYDVQEEDPVLTVITYMGLSVSLLCLLLAALTFLLCKAIQNTSTSLHLQLSLCLFLAHLLFLVAIDQTGHKVLCSIIAGTLHYLYLATLTWMLLEALYLFLTARNLTVVNYSSINRFMKKLMFPVGYGVPAVTVAISAASRPHLYGTPSRCWLQPEKGFIWGFLGPVCAIFSVNLVLFLVTLWILKNRLSSLNSEVSTLRNTRMLAFKATAQLFILGCTWCLGILQVGPAARVMAYLFTIINSLQGVFIFLVYCLLSQQVREQYGKWSKGIRKLKTESEMHTLSSSAKADTSKPSTVN

SEQ ID NO: 320494 - DNA, 2439 bp, Artificial Sequence
  derived and/or modified sequence
atgggcggcagagtgttcctggtgttcctggccttctgcgtgtggctgaccctgcccggcgccgagacccaggacagcagaggctgcgccagatggtgcccccaggacagcagctgcgtgaacgccaccgcctgcagatgcaaccccggcttcagcagcttcagcgagatcatcaccacccccatggagacctgcgacgacatcaacgagtgcgccaccctgagcaaggtgagctgcggcaagttcagcgactgctggaacaccgagggcagctacgactgcgtgtgcagccccggctacgagcccgtgagcggcgccaagaccttcaagaacgagagcgagaacacctgccaggacgtggacgagtgccagcagaaccccagactgtgcaagagctacggcacctgcgtgaacaccctgggcagctacacctgccagtgcctgcccggcttcaagctgaagcccgaggaccccaagctgtgcaccgacgtgaacgagtgcaccagcggccagaacccctgccacagcagcacccactgcctgaacaacgtgggcagctaccagtgcagatgcagacccggctggcagcccatccccggcagccccaacggccccaacaacaccgtgtgcgaggacgtggacgagtgcagcagcggccagcaccagtgcgacagcagcaccgtgtgcttcaacaccgtgggcagctacagctgcagatgcagacccggctggaagcccagacacggcatccccaacaaccagaaggacaccgtgtgcgaggacatgaccttcagcacctggacccccccccccggcgtgcacagccagaccctgagcagattcttcgacaaggtgcaggacctgggcagagactacaagcccggcctggccaacaacaccatccagagcatcctgcaggccctggacgagctgctggaggcccccggcgacctggagaccctgcccagactgcagcagcactgcgtggccagccacctgctggacggcctggaggacgtgctgagaggcctgagcaagaacctgagcaacggcctgctgaacttcagctaccccgccggcaccgagctgagcctggaggtgcagaagcaggtggacagaagcgtgaccctgagacagaaccaggccgtgatgcagctggactggaaccaggcccagaagagcggcgaccccggcatgggcaagctgctggccgaggcccccctggtgctggagcccgagaagcagatgctgctgcacgagacccaccagggcctgctgcaggacggcagccccatcctgctgagcgacgtgatcagcgccttcctgagcaacaacgacacccagaacctgagcagccccgtgaccttcaccttcagccacagaagcgtgatccccagacagaaggtgctgtgcgtgttctgggagcacggccagaacggctgcggccactgggccaccaccggctgcagcaccatcggcaccagagacaccagcaccatctgcagatgcacccacctgagcagcttcgccgtgctgatggcccactacgacgtgcaggaggaggaccccgtgctgaccgtgatcacctacatgggcctgagcgtgagcctgctgtgcctgctgctggccgccctgaccttcctgctgtgcaaggccatccagaacaccagcaccagcctgcacctgcagctgagcctgtgcctgttcctggcccacctgctgttcctggtggccatcgaccagaccggccacaaggtgctgtgcagcatcatcgccggcaccctgcactacctgtacctggccaccctgacctggatgctgctggaggccctgtacctgttcctgaccgccagaaacctgaccgtggtgaactacagcagcatcaacagattcatgaagaagctgatgttccccgtgggctacggcgtgcccgccgtgaccgtggccatcagcgccgccagcagaccccacctgtacggcacccccagcagatgctggctgcagcccgagaagggcttcatctggggcttcctgggccccgtgtgcgccatcttcagcgtgaacctggtgctgttcctggtgaccctgtggatcctgaagaacagactgagcagcctgaacagcgaggtgagcaccctgagaaacaccagaatgctggccttcaaggccaccgcccagctgttcatcctgggctgcacctggtgcctgggcatcctgcaggtgggccccgccgccagagtgatggcctacctgttcaccatcatcaacagcctgcagggcgtgttcatcttcctggtgtactgcctgctgagccagcaggtgagagagcagtacggcaagtggagcaagggcatcagaaagctgaagaccgagagcgagatgcacaccctgagcagcagcgccaaggccgacaccagcaagcccagcaccgtgaactag

SEQ ID NO: 320495 - DNA, 6738 bp, Artificial Sequence
  derived and/or modified sequence
ggggggtctgctctgtgcggtgaagcttctcttcttggcacctgcctggcatcggaagagggccccttctccctccctgggcttttatgtggacactgtaatgcctcagttttctttctttctttttgtttttgacacagggtctcactctatcacccaagctggagtgcagtggcaccatcttagctcaccgcagcctcaaactccccagctcgggtgattcttcctgcctcagcctcctgagtagtagcagctgggaccacagacgtctgccaccaagcccagctgcaccgccagttccggggagggccctgggccagcggctgtccgccccccctcctttataaagtcctggcctcgggacagcccgcacagctgcccagcctgcggagacgggacagccctgtcccactcactctttcccctgctgctcctgccggcagctcagctggaaccatgggaggccgcgtctttctcgtctttctcgcattctgtgtctggctgactctgccgggagctgaaacccaggactccaggggctgtgcccggtggtgccctcaggactcctcgtgtgtcaatgccaccgcctgtcgctgcaatccagggttcagctctttttctgagatcatcaccacccccatggagacttgtgacgacatcaacgagtgtgcaacactgtcgaaagtgtcatgcggaaaattctcggactgctggaacacagaggggagctacgactgcgtgtgcagcccaggatatgagcctgtttctggggcaaaaacattcaagaatgagagcgagaacacgtgtcaagatgtggacgaatgtcagcagaacccaaggctctgtaaaagctacggcacctgcgtcaacaccctcggcagctacacgtgccagtgcctgcctggcttcaagctcaaacctgaggacccgaagctctgcacagatgtgaatgaatgcacctccggacaaaacccatgccacagctccacccactgcctcaacaacgtgggcagctatcagtgccgctgccgcccgggctggcaaccgattccggggtcccccaatggcccaaacaataccgtctgtgaagatgtggacgagtgcagctccgggcagcatcagtgtgacagctccaccgtctgcttcaacaccgtgggttcatacagctgccgctgccgcccaggctggaagcccagacacggaatcccgaataaccaaaaggacactgtctgtgaagatatgactttctccacctggaccccgccccctggagtccacagccagacgctttcccgattcttcgacaaagtccaggacctgggcagagactacaagccaggcttggccaataacaccatccagagcatcttacaggcgctggatgagctgctggaggcccctggggacctggagaccctgccccgcttacagcagcactgtgtggccagtcacctgctggatggcctagaggatgtcctcagaggcctgagcaagaacctttccaatgggctgttgaacttcagttatcctgcaggcacagaattgtccctggaggtgcagaagcaagtagacaggagtgtcaccttgagacagaatcaggcagtgatgcagctcgactggaatcaggcacagaaatctggtgacccagggatgggcaagttgctggctgaggcccctctggtcctggaacctgagaagcagatgcttctgcatgagacacaccagggcttgctgcaggacggctcccccatcctgctctcagatgtgatctctgcctttctgagcaacaacgacacccaaaacctcagctccccagttaccttcaccttctcccaccgttcagtgatcccgagacagaaggtgctctgtgtcttctgggagcatggccagaatggatgtggtcactgggccaccacaggctgcagcacaataggcaccagagacaccagcaccatctgccgttgcacccacctgagcagctttgccgtcctcatggcccactacgatgtgcaggaggaggatcccgtgctgactgtcatcacctacatggggctgagcgtctctctgctgtgcctcctcctggcggccctcacttttctcctgtgtaaagccatccagaacaccagcacctcactgcatctgcagctctcgctctgcctcttcctggcccacctcctcttcctcgtggcaattgatcaaaccggacacaaggtgctgtgctccatcatcgccggtaccttgcactatctctacctggccaccttgacctggatgctgctggaggccctgtacctcttcctcactgcacggaacctgacggtggtcaactactcaagcatcaacagattcatgaagaagctcatgttccctgtgggctacggagtcccagctgtgacagtggccatttctgcagcctccaggcctcacctttatggaacaccttcccgctgctggctccaaccagaaaagggatttatatggggcttccttggacctgtctgcgccatcttctctgtgaatttagttctctttctggtgactctctggattttgaaaaacagactctcctccctcaatagtgaagtgtccaccctccggaacacaaggatgctggcatttaaagcgacagctcagctgttcatcctgggctgcacgtggtgtctgggcatcttgcaggtgggtccggctgcccgggtcatggcctacctcttcaccatcatcaacagcctgcagggtgtcttcatcttcctggtgtactgcctcctcagccagcaggtccgggagcaatatgggaaatggtccaaagggatcaggaaattgaaaactgagtctgagatgcacacactctccagcagtgctaaggctgacacctccaaacccagcacggttaactagaaaaatcttctgaataagatcttccctctttgcccgtggaaaatctgaacaatctttgagccatctagaggggaaagaaaagactttgttctgtgtgtttcaagaaattcaccatgtcagcaatatgaaggatgttatggaaggcgtgctaggcattcaattcctgcagaaaccggaaatcttccatgccctgcaatgtgctcatcaaactctcagcatatggacggccagctgtggcccatatcttggtcactctgaagcacaatatttatgaagctatagaacgttaagacctctttcacagcctctccttcctacaaagactcctccaaatcttaaaatgaagcaggaaaacgagcctaagaggactttcataccgacaacatctgaaaggactagaatgttcacaccacgatctggatttcttaattttttgtttttgtttttgttgttctctagttctacgggtttgattatttagtcatgtgaaaaatattgattactcacacatagatcaagagagacacggctcctgccttcatggagcttttaggggaaaatgaagtggctcttgcagctagagttgactcagaagccgaaattcctagaaatcaggtttctactgctaggcaattgaagtataaactattttataaacactgtcttctttcgtcttcacaccaacatgcagaaaagtttctaatctcagatcggggatgtgcaacaaattccatttcaaaggaatgacctgcaaaactcctaaatattccaagcaaatgcccttaaccctgtctgttatctgctttccttgaacagaaattctacatgaccataaaacctcgaagatgggtatggcacagttcatgccctgtaatcctagcactttgggagggtgaggcaggaggatggctcaagcccaggagtttgagaccagtgtgggcaacagagtgagaaccatctctacccaaaaaaaaaattaaaaattagccaagcatggtgatgatataggagttaaggagaaatcatttaggcaaatagcaagggtaggaagtcctcagtaaggttttccatttaatgaaaagcagcccccaaaatcattttcttttctaacaaagaacagcctgtaaaatcgagctgcagacatagacaagcaagctggaagcttccacgggtgaatgccggcagctgtgccaataggaaaaagctacctagactaggcatgtccaaaatggcggctccaagttcccttctctttgccagccatgtgtacagtaaaaagcaggcaacatagtgtcagccaaagctcatttgcataataagattagggtggggtggccagctcacataggggtaggccctaggtaaatcagacaccgccttctcaagcctgtctataaaatctggtacactatgacgagggtcagatttcccattcagacgcccctctcccatgcaagagaaagagctgttctcctttctctttcttttgcctattaaacctctgctcctggccaggcacagtggctcacgcctataatcccagcactttgggaggctgaggtggtcagatcacctaaggtcaggagttcaagaccagcctggtcaacatggtgaaatcttgtctctagtaaaaatacaaaaatatatgaaatctcacatagatgataatattaagttccaaaagcaactcaacctggtagattctaattttttttgaggcagggtcttgctttgtcacccatgctggagtacaatggcacaaacactgctcactgcagcctcgacctcccaaggcctaagcaatcctcctgcctcagtccccctccaggtatttgaaactacaggtgtgtaccaccacaccgggctaatttttgtattttttgtagagacgtgggtctcactatgctgcccaggctcaggtcttaatctcctgagctcaggcaatccgcaggcctcagcctccctaagtgcggggattacaggcttgagccactgcacctagcctctatttgttttacaaaagagaaattgagatcctgaatgttaagtgacttgcctgaggccatcccactaacaggagccagggttaggattcaaaccccatccaactggtcccagagctggagcttcttgcactgccctacactacctaccatctccatcctctgggcacctttttataagaaccaaaacattacagagcattgctttgtcaactcagctgggaacatttcccagtgcaactcacatttttcactgctctgtgcctgtccgtataagctcaatgagtattgatttaggggctttggagaactttgaatgctaccccccaagtaaccattgttggcaacctggtacctctacttttagccatttctccttctctataaatagtgcagaagtaacccacttggtaacaggcatccttgccaagcctccaccactaggtcagtgtaagaattaaagaaagaggaaagaaacacaaaaagtggcttgatggttaagacaggtttattttagagaaaacacacctgagaggggctgctggctgaattaggttagagtcttttctacagactaagagtgtttaaggatttagggtgggagagtttcttagaggcttggactgcttctgtgttttttttgttgtgcttatatgggagggagagtggtgtgtttgcttttatacatttttctgcagctgtaggcataccccccaagtctgcttttagcttccctattttagtgcacctggagggaaaggaatgtgcttattaaggcccactgttttactggggcccattgtatgagggtgaagtttggcagttacccaagagacttttcctccaccttcctctgtgcccgagctgttttatctgcattttactgtctgctttttttggctgcttatagtttttaaaaaagtaatttccttaaatccagaaggctaaaaatgaagctgaaacttaaagtggcggtgtttgtccaaaataacggggctcctgctctgccagtcagtaccctcaagtcactcctgatcctcaacctccatgcctaaggctggttcaagagaccacataatatctgccttttattacatacatgatgggtgcatgggattctgcgtgccctttgcttgatatagactgctaaggtgagatggggaatatcagagtcagctgctgcttgaggaagcagaacacacagctggaggcttggaacatgtgggtccctatgagtgtagagcccatatccccatagagtctacctagagcaggggtcgccaaatgttttcttaaagagcctgatagtgtatatgttaggctttgtgagccaggtatttacagcaactcaattctaccactgtggtatgaaaacagctatagacaatcataaatgaatgatcatggctatgttttaataaaactttacagacactgaacttgaacttccattgtgatatgaaaacagctatagacaatcataaatgaatgatcatggctatgttttaataaaactttatggacactgagcttgaacttcatatatcagtcatgtgacacaaaatatcattcttctttttatttgttttcacccatttgaaaaatgtaaaaactattcttagctgtacagaaacagatggtgggtcagatttgactcactgcccatagtttccagaccatgatgttcaggttcatggaagcacttcactctacactaatttattcatccattcatcacatatgtgatgagcacatacagacacacctcagagatattgcaggctccactccagatcaccacaataatgtgaatattgcaataaagcaagtcatacacatt

SEQ ID NO: 320496 - DNA, 2439 bp, Artificial Sequence
  derived and/or modified sequence
atgggcgggcgagtgtttctagttttcttggccttctgcgtgtggctgacactgcctggggccgaaacacaggactctagaggatgtgcgagatggtgtccacaggattccagttgtgttaacgccaccgcctgtagatgcaaccccggcttctccagcttcagcgagatcattacaacgcctatggagacttgtgatgacatcaacgaatgtgccacactgtccaaggtttcatgtgggaaattttctgattgttggaataccgaaggaagttatgactgtgtgtgttctcccggctacgaacccgtgagcggagcgaaaacatttaagaatgagagcgaaaatacatgtcaagacgtggatgagtgccagcaaaatccgaggctttgtaaatcctatggtacctgtgttaacactctaggtagttatacgtgtcagtgtctgcccgggtttaagcttaagcctgaagaccctaaattgtgtactgacgtgaacgagtgcacctccggacaaaacccatgccatagttctacccactgcctgaataatgtaggaagctaccaatgtagatgccgtcccggctggcagccaattcctgggtctccgaatggacctaataacaccgtctgtgaggatgtcgatgagtgcagctcagggcagcatcaatgtgatagttccactgtgtgttttaacactgtgggctcatacagttgtcgatgcagacctggttggaagccccgacacggcattccaaacaaccagaaggatacagtctgtgaggacatgacctttagcacttggacaccaccccctggcgtacactctcagactcttagcaggttctttgacaaagttcaagatctgggacgggactacaagcccggcctcgcaaacaatactattcagagcatcttgcaagctctggatgagttgctggaagcgccgggggatctggaaaccctgcctcggctccagcagcattgcgtcgcttcacacctgttagatggattggaggacgtacttcggggattgtctaagaacctgtctaatggactcttgaacttcagctacccggccgggacagagctgagtcttgaagttcagaagcaggtcgacagatcagtcaccctcaggcagaatcaagccgtcatgcagctagactggaaccaggctcagaagtctggagacccaggaatggggaaacttttggctgaagcgccgctggtcctggaacctgagaagcaaatgctgctgcacgagacccaccaaggactcctacaggacggcagtcccatcctcctttccgacgtgatttctgccttccttagtaacaacgatacccagaacctttctagccccgtgacgttcaccttttctcatcggtcggtcattcccaggcagaaggtgctgtgtgtattttgggagcatggccagaatggttgcggacactgggcaaccaccgggtgctcaacaattggcactagggatacgagcaccatctgtaggtgtacgcacctgtcgagcttcgcagtgttgatggcgcactatgatgtacaggaggaggaccctgtactcaccgtcataacttacatgggactcagtgttagcctgctgtgcctactgcttgctgctttgacattccttttgtgtaaggcaatccagaacactagcacaagcctgcatctccagctgtccttgtgcctctttctcgcacacctcttgtttctggttgcaatcgaccagacggggcataaggttctgtgttccataattgccggaaccctccattatctgtatctcgccaccctgacttggatgttgctcgaagctctgtacttgttcctcacagcaaggaacctgactgttgttaattattcaagtattaatagattcatgaaaaagctgatgttccccgtgggttatggggtgcctgcagttacagtagctatttcagctgcctcccgcccccatttatatggcactccaagtcgttgctggctccagccagagaagggcttcatatgggggtttctagggcccgtatgtgctatctttagtgttaacctggtcctgttcctagtgactttatggatcctgaagaataggttgtcgtccctcaattccgaagtaagtactctgaggaatacacggatgctggcctttaaggccacagctcagctgtttatcctgggctgtacttggtgtctcggcatcctgcaggtggggcccgccgcaagggtgatggcatacctcttcacaatcataaattccctccaaggagtgtttatcttcttagtttactgcctcctcagccagcaggttagagagcaatatgggaagtggtcaaaggggatacggaaactgaagacggagagcgagatgcatacgttgtcatctagtgcgaaagccgatacatccaagccctcaacggtgaactag

SEQ ID NO: 320497 - DNA, 2439 bp, Artificial Sequence
  derived and/or modified sequence
atgggcggccgggtcttcctggtgttcctggccttctgtgtgtggctgaccctgcctggagctgagacccaggacagccggggctgtgcccgctggtgcccccaggacagcagctgtgtgaatgccacagcctgccgctgcaaccctggcttcagcagcttcagcgagatcatcaccacccccatggagacctgtgatgacatcaatgaatgtgccaccctgagcaaggtgtcctgtgggaagttcagtgactgctggaacacagagggcagctatgactgtgtgtgcagccctggctatgagcctgtgtctggggccaagaccttcaagaatgaaagtgagaacacctgccaggatgtggatgagtgccagcagaacccccggctgtgcaagagctatggcacctgtgtgaacaccctgggcagctacacctgccagtgcctgcccggcttcaagctgaagccagaggaccccaagctgtgcacagatgtgaatgaatgtaccagcggccagaacccctgccacagcagcacccactgcctgaacaacgtgggcagctaccagtgccgctgcaggcctggctggcagcccatccctggcagccccaacggccccaacaacacagtgtgtgaagatgtggatgaatgtagcagcggccagcaccagtgtgacagcagcacagtgtgcttcaacacagtgggcagctacagctgccgctgccggcccggctggaagcccaggcatggcatccccaacaaccagaaggacacagtgtgtgaggacatgaccttcagcacctggaccccacctcctggggtgcacagccagaccctgagccgcttctttgacaaggtgcaggacctgggccgggactacaagccaggcctggccaacaacaccatccagagcatcctgcaggccctggatgagctgctggaggcccctggggacctggagaccctgccccggctgcagcagcactgtgtggccagccacctgctggatggcctggaggatgtgctgcggggcctgagcaagaacctgagcaatggcctgctgaacttctcctacccagctggaacagagctgagcctggaggtgcagaagcaggtggacagatctgtgaccctgcggcagaaccaggccgtgatgcagctggactggaaccaggcccagaagagcggggaccccggcatgggcaagctgctggccgaggcccccctggtgctggagcctgagaagcagatgctgctgcacgagacccaccagggcctgctgcaggacggcagccccatcctgctgagtgatgtgatcagcgccttcctgagcaacaatgacacccagaacctgagcagccctgtgaccttcaccttcagccacaggagcgtcatcccccggcagaaggtgctgtgtgtgttctgggagcacggccagaatggctgcggccactgggccaccaccggctgcagcaccatcggcacccgggacaccagcaccatctgccgctgcacccacctgagcagctttgctgtgctgatggcccactatgatgtgcaggaggaggaccctgtgctgaccgtcatcacctacatgggcctgtctgtgtccctgctgtgcctgctgctggccgccctgaccttcctgctgtgcaaggccatccagaacaccagcaccagcctgcacctgcagctgagcctgtgcctcttcctggcccacctgctcttcctggtggccatcgaccagacaggccacaaggtgctgtgcagcatcatcgccggcaccctgcactacctgtacctggccaccctgacctggatgctgctggaggccctgtacctgttcctgacagccaggaacctgactgtggtgaactacagcagcatcaaccgcttcatgaagaagctgatgtttcctgtgggctatggagtgcctgctgtgacagtggccatctctgctgccagccggccccacctgtatggcacccccagccgctgctggctgcagcctgagaagggcttcatctggggcttcctgggccctgtgtgtgccatcttctctgtgaacctggtgctcttcctggtgaccctgtggatcctgaagaaccggctgagcagcctgaacagcgaggtgtccaccctgaggaacaccaggatgctggccttcaaggccacagcccagctgttcatcctgggctgcacctggtgcctgggcatcctgcaggtgggccctgctgcccgggtgatggcctacctgttcaccatcatcaacagcctgcagggcgtcttcatcttcctggtgtactgcctgctgagccagcaggtgcgggagcagtatggcaagtggagcaagggcatcaggaagctgaagacagagagcgagatgcacaccctgagcagcagcgccaaggctgacaccagcaagcccagcacagtgaactag

SEQ ID NO: 320498 - DNA, 2439 bp, Artificial Sequence
  derived and/or modified sequence
atgggcggccgggtgttcctggtgttcctggccttctgcgtgtggctcaccttacctggcgctgaaacccaggactccaggggatgcgctagatggtgccctcaagacagctcttgcgtcaacgcaaccgcatgcagatgcaatccaggtttctcaagttttagcgaaatcattactaccccaatggaaacatgtgacgacattaatgagtgtgcaacgctctctaaggtgagttgtggtaagtttagcgattgttggaataccgaggggtcttacgactgtgtctgctcgccaggctacgaaccagtttcaggagcaaagacttttaagaatgagagtgagaatacctgccaagacgtggacgaatgtcagcagaacccccgcctgtgtaaatcatatggaacttgtgtcaacaccctcggcagctatacctgccagtgccttccaggcttcaagcttaaacctgaggacccgaagttatgcacggacgtgaacgaatgcacatctggacaaaatccttgtcacagttctacccactgcctcaacaatgtcggatcttatcagtgccggtgccgccctggatggcaacctatccctggcagccccaacggcccaaacaacaccgtgtgcgaagatgtggacgagtgctcaagtggccagcaccaatgcgactcctctaccgtgtgctttaataccgttggaagttactcatgcagatgccgacccggctggaagcctagacacggaatccccaataaccagaaggacacagtttgcgaggatatgaccttttccacctggactcctccaccaggcgtccattcacagaccctttcccggtttttcgataaggtacaggacctgggccgggactataagccaggcctggccaataatacaatccaatcaatccttcaggcactggacgagctgcttgaagcgccaggggacttagaaactctgccacgacttcaacagcattgcgtcgcctcccaccttctcgacggcctggaggacgtgttgaggggcctgtccaaaaacctctctaacgggttgcttaacttctcatacccagccggcactgagctgtctcttgaagtccaaaaacaagtcgacagaagcgtgaccctgagacagaaccaggctgtcatgcaactcgattggaaccaggcacaaaaatcgggggacccagggatgggtaaactgctggcggaagcgcccctagtgttggagccggagaaacagatgttgcttcatgagactcatcagggcctactgcaggacggcagtccgattctgctctcggacgtcattagcgcattcctaagcaacaacgacacccagaacctgagctcacctgtgacatttacattcagccaccgttccgtgataccccgtcagaaggtgctgtgtgtcttttgggaacacggccaaaatgggtgcggccattgggccaccacagggtgctcaactatcgggactagggacactagcacaatttgtaggtgcacccatctatcaagtttcgccgtgcttatggctcattatgacgtgcaagaggaagaccctgtgttaaccgtgatcacatacatggggttgagcgtttccctgctgtgccttcttctggccgccttaacatttcttctgtgcaaggccattcagaatacaagcaccagcctgcatctccagctatctttgtgccttttcctggcccatcttctgtttttggttgccattgatcaaactgggcataaggtgttgtgttcaattattgcaggaaccttgcactatttgtatcttgccacgctcacatggatgctcctggaggccctctaccttttcctgaccgctcgcaacctaaccgtggtcaattattcatctattaacagattcatgaagaagctaatgtttccagttgggtatggcgtgcccgctgtcactgtggccatttccgcagccagcagacctcatctctatggtaccccatcccgttgttggttgcagcccgagaaggggtttatttggggtttcttagggcccgtctgcgccatcttctccgtaaatctcgtactcttcttagtgacactatggatccttaagaatcgcctgagctccctcaattccgaagtgtcgactctgcgtaatactaggatgttggccttcaaggccaccgcccagctgttcattcttgggtgtacctggtgtcttggtatcctgcaggtgggtcctgcagctagggtcatggcatacctcttcaccattatcaatagcctgcagggtgtgttcatattcctggtgtattgtttactgtctcaacaagtgcgggaacagtacggtaaatggagcaagggaatccggaagttgaagacagagtctgaaatgcacaccttgagctcctccgccaaagctgatacatcaaagccttcaacggttaactag

SEQ ID NO: 320499 - DNA, 2439 bp, Artificial Sequence
  derived and/or modified sequence
atgggcggtagagtgttcctggtcttcctggctttttgtgtctggttgacgctgcccggtgcagagacacaggatagccgcggatgcgcaaggtggtgcccacaggattccagctgcgtcaatgccacggcttgcaggtgtaatcctgggttttcctcctttagtgagatcattaccaccccaatggagacctgcgatgatattaatgagtgtgcaacattgagcaaagtgtcttgtggcaagttttccgactgttggaacactgaaggcagttatgattgcgtgtgttctccaggctacgagcctgtatccggggctaagactttcaagaacgagtcagagaatacctgtcaggacgtggatgagtgccagcagaatcccagactgtgcaagtcttacggaacgtgcgtgaataccctcgggagttacacgtgccagtgtctgccagggttcaaactgaagccagaggatcccaagttgtgcacagatgtgaatgagtgcacaagcggccagaacccatgccattctagtacccattgtctgaataacgtcgggtcttaccagtgtcggtgtcgccctggctggcaacccatccccggttcccccaatggaccgaacaacacagtttgtgaagacgtagacgagtgcagctccggacagcatcagtgtgactccagcaccgtttgtttcaatacagtcggctcttactcctgtcgctgccggccaggttggaaaccgcgtcacggcattcccaacaatcagaaggataccgtgtgcgaggacatgacctttagtacttggacacctccccctggtgttcactcccagacactgtctcggttcttcgacaaggtgcaggacctggggagagactacaagcctggactggcaaataacacaatccagagcatcctccaagcccttgacgaactccttgaggcacctggagacctggagactctgcctcgcctgcagcagcactgcgtcgcctctcatttactggacggtctggaggatgtgctgagaggactgagtaagaacctatcaaacggactgttgaatttcagttacccggctggaaccgaattgagtctggaagttcagaagcaggttgaccgcagcgtgaccctccggcaaaatcaagccgtcatgcagttagactggaatcaggctcaaaagagtggtgaccccggaatgggcaaattactggccgaggccccattggtgcttgaaccggagaagcagatgctgttgcatgaaacccatcagggtctgctgcaagatggatcccccatcttactcagcgatgtcatttccgctttcttgtctaataacgacactcagaacctcagctcaccagtgacctttacttttagccataggtccgtgatccccaggcaaaaagtcctttgtgtattctgggagcatggtcagaacggctgcgggcattgggccactaccgggtgctctacaattggaacacgcgatacgtccactatctgccgatgcactcacttatcatctttcgcagtgctcatggcacattatgacgtgcaggaggaggacccagtgctgacagtcatcacttacatgggcctgtctgtaagtctactgtgcctcctgctggcagcgttgacattccttctctgcaaagccattcagaatactagcactagtctgcatttacaattgtcactttgcctcttcctcgctcacctgctatttctagtggcaatcgatcagacaggacataaggtactgtgtagtataattgccggaacccttcattatctgtacttggccacactcacctggatgctattggaggctctttatctgttcttgactgccagaaatctcactgtggtcaactattctagtataaatcgttttatgaaaaagcttatgttccccgtgggttatggggtcccggctgtgacagtcgcaatcagtgccgctagcagaccccatttgtacggcaccccgtcccgttgctggcttcagcccgaaaaggggttcatatgggggttcctcggtcctgtgtgcgccatcttctccgtgaatcttgtgctttttctggtgacgctctggattctgaagaaccgcctctcgtcccttaattcagaggttagcaccctgagaaatacaaggatgctggcatttaaggccactgcccagttatttatcctggggtgtacctggtgcttgggcatccttcaggtcggtcctgccgctcgcgtcatggcatatttattcaccatcataaattctttacagggcgtcttcatctttctcgtctactgtttgctttcacagcaggtccgcgagcagtatgggaaatggtctaaagggattcgcaaacttaagacagaatccgagatgcacaccctttctagttcagcaaaggcggataccagtaaaccttcaacggtgaactag

SEQ ID NO: 320500 - protein, 774 aa, Artificial Sequence
  derived and/or modified sequence
MGGRVFLVFLAFCVWLTLPGAETQDSRGCARWCPQDSSCVNATACRCNPGFSSFSEIITTPMETCDDINECATLSKVSCGKFSDCWNTEGSYDCVCSPGYEPVSGAKTFKNESENTCQDVDECQQNPRLCKSYGTCVNTLGSYTCQCLPGFKLKPEDPKLCTDVDECSSGQHQCDSSTVCFNTVGSYSCRCRPGWKPRHGIPNNQKDTVCEDMTFSTWTPPPGVHSQTLSRFFDKVQDLGRDYKPGLANNTIQSILQALDELLEAPGDLETLPRLQQHCVASHLLDGLEDVLRGLSKNLSNGLLNFSYPAGTELSLEVQKQVDRSVTLRQNQAVMQLDWNQAQKSGDPGPSVVGLVSIPGMGKLLAEAPLVLEPEKQMLLHETHQGLLQDGSPILLSDVISAFLSNNDTQNLSSPVTFTFSHRSVIPRQKVLCVFWEHGQNGCGHWATTGCSTIGTRDTSTICRCTHLSSFAVLMAHYDVQEEDPVLTVITYMGLSVSLLCLLLAALTFLLCKAIQNTSTSLHLQLSLCLFLAHLLFLVAIDQTGHKVLCSIIAGTLHYLYLATLTWMLLEALYLFLTARNLTVVNYSSINRFMKKLMFPVGYGVPAVTVAISAASRPHLYGTPSRCWLQPEKGFIWGFLGPVCAIFSVNLVLFLVTLWILKNRLSSLNSEVSTLRNTRMLAFKATAQLFILGCTWCLGILQVGPAARVMAYLFTIINSLQGVFIFLVYCLLSQQVREQYGKWSKGIRKLKTESEMHTLSSSAKADTSKPSTVN

SEQ ID NO: 320501 - protein, 379 aa, Artificial Sequence
  derived and/or modified sequence
MGGRVFLVFLAFCVWLTLPGAETQDSRGCARWCPQDSSCVNATACRCNPGFSSFSEIITTPMETCDDINECATLSKVSCGKFSDCWNTEGSYDCVCSPGYEPVSGAKTFKNESENTCQDVDECQQNPRLCKSYGTCVNTLGSYTCQCLPGFKLKPEDPKLCTDVDECSSGQHQCDSSTVCFNTVGSYSCRCRPGWKPRHGIPNNQKDTVCEDMTFSTWTPPPGVHSQTLSRFFDKVQDLGRDYKPGLANNTIQSILQALDELLEAPGDLETLPRLQQHCVASHLLDGLEDVLRGLSKNLSNGLLNFSYPAGTELSLEVQKQVDRSVTLRQNQAVMQLDWNQAQKSGDPGGGSRADCHHLHGAERLSAVPPPGGPHFSPV

SEQ ID NO: 320502 - DNA, 2325 bp, Artificial Sequence
  derived and/or modified sequence
atgggcggcagagtgttcctggtgttcctggccttctgcgtgtggctgaccctgcccggcgccgagacccaggacagcagaggctgcgccagatggtgcccccaggacagcagctgcgtgaacgccaccgcctgcagatgcaaccccggcttcagcagcttcagcgagatcatcaccacccccatggagacctgcgacgacatcaacgagtgcgccaccctgagcaaggtgagctgcggcaagttcagcgactgctggaacaccgagggcagctacgactgcgtgtgcagccccggctacgagcccgtgagcggcgccaagaccttcaagaacgagagcgagaacacctgccaggacgtggacgagtgccagcagaaccccagactgtgcaagagctacggcacctgcgtgaacaccctgggcagctacacctgccagtgcctgcccggcttcaagctgaagcccgaggaccccaagctgtgcaccgacgtggacgagtgcagcagcggccagcaccagtgcgacagcagcaccgtgtgcttcaacaccgtgggcagctacagctgcagatgcagacccggctggaagcccagacacggcatccccaacaaccagaaggacaccgtgtgcgaggacatgaccttcagcacctggacccccccccccggcgtgcacagccagaccctgagcagattcttcgacaaggtgcaggacctgggcagagactacaagcccggcctggccaacaacaccatccagagcatcctgcaggccctggacgagctgctggaggcccccggcgacctggagaccctgcccagactgcagcagcactgcgtggccagccacctgctggacggcctggaggacgtgctgagaggcctgagcaagaacctgagcaacggcctgctgaacttcagctaccccgccggcaccgagctgagcctggaggtgcagaagcaggtggacagaagcgtgaccctgagacagaaccaggccgtgatgcagctggactggaaccaggcccagaagagcggcgaccccggccccagcgtggtgggcctggtgagcatccccggcatgggcaagctgctggccgaggcccccctggtgctggagcccgagaagcagatgctgctgcacgagacccaccagggcctgctgcaggacggcagccccatcctgctgagcgacgtgatcagcgccttcctgagcaacaacgacacccagaacctgagcagccccgtgaccttcaccttcagccacagaagcgtgatccccagacagaaggtgctgtgcgtgttctgggagcacggccagaacggctgcggccactgggccaccaccggctgcagcaccatcggcaccagagacaccagcaccatctgcagatgcacccacctgagcagcttcgccgtgctgatggcccactacgacgtgcaggaggaggaccccgtgctgaccgtgatcacctacatgggcctgagcgtgagcctgctgtgcctgctgctggccgccctgaccttcctgctgtgcaaggccatccagaacaccagcaccagcctgcacctgcagctgagcctgtgcctgttcctggcccacctgctgttcctggtggccatcgaccagaccggccacaaggtgctgtgcagcatcatcgccggcaccctgcactacctgtacctggccaccctgacctggatgctgctggaggccctgtacctgttcctgaccgccagaaacctgaccgtggtgaactacagcagcatcaacagattcatgaagaagctgatgttccccgtgggctacggcgtgcccgccgtgaccgtggccatcagcgccgccagcagaccccacctgtacggcacccccagcagatgctggctgcagcccgagaagggcttcatctggggcttcctgggccccgtgtgcgccatcttcagcgtgaacctggtgctgttcctggtgaccctgtggatcctgaagaacagactgagcagcctgaacagcgaggtgagcaccctgagaaacaccagaatgctggccttcaaggccaccgcccagctgttcatcctgggctgcacctggtgcctgggcatcctgcaggtgggccccgccgccagagtgatggcctacctgttcaccatcatcaacagcctgcagggcgtgttcatcttcctggtgtactgcctgctgagccagcaggtgagagagcagtacggcaagtggagcaagggcatcagaaagctgaagaccgagagcgagatgcacaccctgagcagcagcgccaaggccgacaccagcaagcccagcaccgtgaactag

SEQ ID NO: 320503 - DNA, 1140 bp, Artificial Sequence
  derived and/or modified sequence
atgggcggcagagtgttcctggtgttcctggccttctgcgtgtggctgaccctgcccggcgccgagacccaggacagcagaggctgcgccagatggtgcccccaggacagcagctgcgtgaacgccaccgcctgcagatgcaaccccggcttcagcagcttcagcgagatcatcaccacccccatggagacctgcgacgacatcaacgagtgcgccaccctgagcaaggtgagctgcggcaagttcagcgactgctggaacaccgagggcagctacgactgcgtgtgcagccccggctacgagcccgtgagcggcgccaagaccttcaagaacgagagcgagaacacctgccaggacgtggacgagtgccagcagaaccccagactgtgcaagagctacggcacctgcgtgaacaccctgggcagctacacctgccagtgcctgcccggcttcaagctgaagcccgaggaccccaagctgtgcaccgacgtggacgagtgcagcagcggccagcaccagtgcgacagcagcaccgtgtgcttcaacaccgtgggcagctacagctgcagatgcagacccggctggaagcccagacacggcatccccaacaaccagaaggacaccgtgtgcgaggacatgaccttcagcacctggacccccccccccggcgtgcacagccagaccctgagcagattcttcgacaaggtgcaggacctgggcagagactacaagcccggcctggccaacaacaccatccagagcatcctgcaggccctggacgagctgctggaggcccccggcgacctggagaccctgcccagactgcagcagcactgcgtggccagccacctgctggacggcctggaggacgtgctgagaggcctgagcaagaacctgagcaacggcctgctgaacttcagctaccccgccggcaccgagctgagcctggaggtgcagaagcaggtggacagaagcgtgaccctgagacagaaccaggccgtgatgcagctggactggaaccaggcccagaagagcggcgaccccggcggcggcagcagagccgactgccaccacctgcacggcgccgagagactgagcgccgtgcccccccccggcggcccccacttcagccccgtgtag

SEQ ID NO: 320504 - DNA, 6624 bp, Artificial Sequence
  derived and/or modified sequence
ggggggtctgctctgtgcggtgaagcttctcttcttggcacctgcctggcatcggaagagggccccttctccctccctgggcttttatgtggacactgtaatgcctcagttttctttctttctttttgtttttgacacagggtctcactctatcacccaagctggagtgcagtggcaccatcttagctcaccgcagcctcaaactccccagctcgggtgattcttcctgcctcagcctcctgagtagtagcagctgggaccacagacgtctgccaccaagcccagctgcaccgccagttccggggagggccctgggccagcggctgtccgccccccctcctttataaagtcctggcctcgggacagcccgcacagctgcccagcctgcggagacgggacagccctgtcccactcactctttcccctgctgctcctgccggcagctcagctggaaccatgggaggccgcgtctttctcgtctttctcgcattctgtgtctggctgactctgccgggagctgaaacccaggactccaggggctgtgcccggtggtgccctcaggactcctcgtgtgtcaatgccaccgcctgtcgctgcaatccagggttcagctctttttctgagatcatcaccacccccatggagacttgtgacgacatcaacgagtgtgcaacactgtcgaaagtgtcatgcggaaaattctcggactgctggaacacagaggggagctacgactgcgtgtgcagcccaggatatgagcctgtttctggggcaaaaacattcaagaatgagagcgagaacacgtgtcaagatgtggacgaatgtcagcagaacccaaggctctgtaaaagctacggcacctgcgtcaacaccctcggcagctacacgtgccagtgcctgcctggcttcaagctcaaacctgaggacccgaagctctgcacagatgtggacgagtgcagctccgggcagcatcagtgtgacagctccaccgtctgcttcaacaccgtgggttcatacagctgccgctgccgcccaggctggaagcccagacacggaatcccgaataaccaaaaggacactgtctgtgaagatatgactttctccacctggaccccgccccctggagtccacagccagacgctttcccgattcttcgacaaagtccaggacctgggcagagactacaagccaggcttggccaataacaccatccagagcatcttacaggcgctggatgagctgctggaggcccctggggacctggagaccctgccccgcttacagcagcactgtgtggccagtcacctgctggatggcctagaggatgtcctcagaggcctgagcaagaacctttccaatgggctgttgaacttcagttatcctgcaggcacagaattgtccctggaggtgcagaagcaagtagacaggagtgtcaccttgagacagaatcaggcagtgatgcagctcgactggaatcaggcacagaaatctggtgacccaggcccttctgtggtgggccttgtctccattccagggatgggcaagttgctggctgaggcccctctggtcctggaacctgagaagcagatgcttctgcatgagacacaccagggcttgctgcaggacggctcccccatcctgctctcagatgtgatctctgcctttctgagcaacaacgacacccaaaacctcagctccccagttaccttcaccttctcccaccgttcagtgatcccgagacagaaggtgctctgtgtcttctgggagcatggccagaatggatgtggtcactgggccaccacaggctgcagcacaataggcaccagagacaccagcaccatctgccgttgcacccacctgagcagctttgccgtcctcatggcccactacgatgtgcaggaggaggatcccgtgctgactgtcatcacctacatggggctgagcgtctctctgctgtgcctcctcctggcggccctcacttttctcctgtgtaaagccatccagaacaccagcacctcactgcatctgcagctctcgctctgcctcttcctggcccacctcctcttcctcgtggcaattgatcaaaccggacacaaggtgctgtgctccatcatcgccggtaccttgcactatctctacctggccaccttgacctggatgctgctggaggccctgtacctcttcctcactgcacggaacctgacggtggtcaactactcaagcatcaacagattcatgaagaagctcatgttccctgtgggctacggagtcccagctgtgacagtggccatttctgcagcctccaggcctcacctttatggaacaccttcccgctgctggctccaaccagaaaagggatttatatggggcttccttggacctgtctgcgccatcttctctgtgaatttagttctctttctggtgactctctggattttgaaaaacagactctcctccctcaatagtgaagtgtccaccctccggaacacaaggatgctggcatttaaagcgacagctcagctgttcatcctgggctgcacgtggtgtctgggcatcttgcaggtgggtccggctgcccgggtcatggcctacctcttcaccatcatcaacagcctgcagggtgtcttcatcttcctggtgtactgcctcctcagccagcaggtccgggagcaatatgggaaatggtccaaagggatcaggaaattgaaaactgagtctgagatgcacacactctccagcagtgctaaggctgacacctccaaacccagcacggttaactagaaaaatcttctgaataagatcttccctctttgcccgtggaaaatctgaacaatctttgagccatctagaggggaaagaaaagactttgttctgtgtgtttcaagaaattcaccatgtcagcaatatgaaggatgttatggaaggcgtgctaggcattcaattcctgcagaaaccggaaatcttccatgccctgcaatgtgctcatcaaactctcagcatatggacggccagctgtggcccatatcttggtcactctgaagcacaatatttatgaagctatagaacgttaagacctctttcacagcctctccttcctacaaagactcctccaaatcttaaaatgaagcaggaaaacgagcctaagaggactttcataccgacaacatctgaaaggactagaatgttcacaccacgatctggatttcttaattttttgtttttgtttttgttgttctctagttctacgggtttgattatttagtcatgtgaaaaatattgattactcacacatagatcaagagagacacggctcctgccttcatggagcttttaggggaaaatgaagtggctcttgcagctagagttgactcagaagccgaaattcctagaaatcaggtttctactgctaggcaattgaagtataaactattttataaacactgtcttctttcgtcttcacaccaacatgcagaaaagtttctaatctcagatcggggatgtgcaacaaattccatttcaaaggaatgacctgcaaaactcctaaatattccaagcaaatgcccttaaccctgtctgttatctgctttccttgaacagaaattctacatgaccataaaacctcgaagatgggtatggcacagttcatgccctgtaatcctagcactttgggagggtgaggcaggaggatggctcaagcccaggagtttgagaccagtgtgggcaacagagtgagaaccatctctacccaaaaaaaaaattaaaaattagccaagcatggtgatgatataggagttaaggagaaatcatttaggcaaatagcaagggtaggaagtcctcagtaaggttttccatttaatgaaaagcagcccccaaaatcattttcttttctaacaaagaacagcctgtaaaatcgagctgcagacatagacaagcaagctggaagcttccacgggtgaatgccggcagctgtgccaataggaaaaagctacctagactaggcatgtccaaaatggcggctccaagttcccttctctttgccagccatgtgtacagtaaaaagcaggcaacatagtgtcagccaaagctcatttgcataataagattagggtggggtggccagctcacataggggtaggccctaggtaaatcagacaccgccttctcaagcctgtctataaaatctggtacactatgacgagggtcagatttcccattcagacgcccctctcccatgcaagagaaagagctgttctcctttctctttcttttgcctattaaacctctgctcctggccaggcacagtggctcacgcctataatcccagcactttgggaggctgaggtggtcagatcacctaaggtcaggagttcaagaccagcctggtcaacatggtgaaatcttgtctctagtaaaaatacaaaaatatatgaaatctcacatagatgataatattaagttccaaaagcaactcaacctggtagattctaattttttttgaggcagggtcttgctttgtcacccatgctggagtacaatggcacaaacactgctcactgcagcctcgacctcccaaggcctaagcaatcctcctgcctcagtccccctccaggtatttgaaactacaggtgtgtaccaccacaccgggctaatttttgtattttttgtagagacgtgggtctcactatgctgcccaggctcaggtcttaatctcctgagctcaggcaatccgcaggcctcagcctccctaagtgcggggattacaggcttgagccactgcacctagcctctatttgttttacaaaagagaaattgagatcctgaatgttaagtgacttgcctgaggccatcccactaacaggagccagggttaggattcaaaccccatccaactggtcccagagctggagcttcttgcactgccctacactacctaccatctccatcctctgggcacctttttataagaaccaaaacattacagagcattgctttgtcaactcagctgggaacatttcccagtgcaactcacatttttcactgctctgtgcctgtccgtataagctcaatgagtattgatttaggggctttggagaactttgaatgctaccccccaagtaaccattgttggcaacctggtacctctacttttagccatttctccttctctataaatagtgcagaagtaacccacttggtaacaggcatccttgccaagcctccaccactaggtcagtgtaagaattaaagaaagaggaaagaaacacaaaaagtggcttgatggttaagacaggtttattttagagaaaacacacctgagaggggctgctggctgaattaggttagagtcttttctacagactaagagtgtttaaggatttagggtgggagagtttcttagaggcttggactgcttctgtgttttttttgttgtgcttatatgggagggagagtggtgtgtttgcttttatacatttttctgcagctgtaggcataccccccaagtctgcttttagcttccctattttagtgcacctggagggaaaggaatgtgcttattaaggcccactgttttactggggcccattgtatgagggtgaagtttggcagttacccaagagacttttcctccaccttcctctgtgcccgagctgttttatctgcattttactgtctgctttttttggctgcttatagtttttaaaaaagtaatttccttaaatccagaaggctaaaaatgaagctgaaacttaaagtggcggtgtttgtccaaaataacggggctcctgctctgccagtcagtaccctcaagtcactcctgatcctcaacctccatgcctaaggctggttcaagagaccacataatatctgccttttattacatacatgatgggtgcatgggattctgcgtgccctttgcttgatatagactgctaaggtgagatggggaatatcagagtcagctgctgcttgaggaagcagaacacacagctggaggcttggaacatgtgggtccctatgagtgtagagcccatatccccatagagtctacctagagcaggggtcgccaaatgttttcttaaagagcctgatagtgtatatgttaggctttgtgagccaggtatttacagcaactcaattctaccactgtggtatgaaaacagctatagacaatcataaatgaatgatcatggctatgttttaataaaactttacagacactgaacttgaacttccattgtgatatgaaaacagctatagacaatcataaatgaatgatcatggctatgttttaataaaactttatggacactgagcttgaacttcatatatcagtcatgtgacacaaaatatcattcttctttttatttgttttcacccatttgaaaaatgtaaaaactattcttagctgtacagaaacagatggtgggtcagatttgactcactgcccatagtttccagaccatgatgttcaggttcatggaagcacttcactctacactaatttattcatccattcatcacatatgtgatgagcacatacagacacacctcagagatattgcaggctccactccagatcaccacaataatgtgaatattgcaataaagcaagtcatacacatt

SEQ ID NO: 320505 - DNA, 1497 bp, Artificial Sequence
  derived and/or modified sequence
acagctgcccagcctgcggagacgggacagccctgtcccactcactctttcccctgctgctcctgccggcagctcagctggaaccatgggaggccgcgtctttctcgtctttctcgcattctgtgtctggctgactctgccgggagctgaaacccaggactccaggggctgtgcccggtggtgccctcaggactcctcgtgtgtcaatgccaccgcctgtcgctgcaatccagggttcagctctttttctgagatcatcaccacccccatggagacttgtgacgacatcaacgagtgtgcaacactgtcgaaagtgtcatgcggaaaattctcggactgctggaacacagaggggagctacgactgcgtgtgcagcccaggatatgagcctgtttctggggcaaaaacattcaagaatgagagcgagaacacgtgtcaagatgtggacgaatgtcagcagaacccaaggctctgtaaaagctacggcacctgcgtcaacaccctcggcagctacacgtgccagtgcctgcctggcttcaagctcaaacctgaggacccgaagctctgcacagatgtggacgagtgcagctccgggcagcatcagtgtgacagctccaccgtctgcttcaacaccgtgggttcatacagctgccgctgccgcccaggctggaagcccagacacggaatcccgaataaccaaaaggacactgtctgtgaagatatgactttctccacctggaccccgccccctggagtccacagccagacgctttcccgattcttcgacaaagtccaggacctgggcagagactacaagccaggcttggccaataacaccatccagagcatcttacaggcgctggatgagctgctggaggcccctggggacctggagaccctgccccgcttacagcagcactgtgtggccagtcacctgctggatggcctagaggatgtcctcagaggcctgagcaagaacctttccaatgggctgttgaacttcagttatcctgcaggcacagaattgtccctggaggtgcagaagcaagtagacaggagtgtcaccttgagacagaatcaggcagtgatgcagctcgactggaatcaggcacagaaatctggtgacccaggaggaggatcccgtgctgactgtcatcacctacatggggctgagcgtctctctgctgtgcctcctcctggcggccctcacttttctcctgtgtaaagccatccagaacaccagcacctcactgcatctgcagctctcgctctgcctcttcctggcccacctcctcttcctcgtggcaattgatcaaaccggacacaaggtgctgtgctccatcatcgccggtaccttgcactatctctacctggccaccttgacctggatgctgctggaggccctgtacctcttcctcactgcacggaacctgacggtggtcaactactcaagcatcaacagattcatgaagaagctcatgttccctgtgggctacg

SEQ ID NO: 320506 - DNA, 1511 bp, Artificial Sequence
  derived and/or modified sequence
cattcaagaatgagagcgagaacacgtgtcaagatgtggacgaatgtcagcagaacccaaggctctgtaaaagctacggcacctgcgtcaacaccctcggcagctacacgtgccagtgcctgcctggcttcaagctcaaacctgaggacccgaagctctgcacagatgtggacgagtgcagctccgggcagcatcagtgtgacagctccaccgtctgcttcaacaccgtgggttcatacagctgccgctgccgcccaggctggaagcccagacacggaatcccgaataaccaaaaggacactgtctgtgaagatatgactttctccacctggaccccgccccctggagtccacagccagacgctttcccgattcttcgacaaagtccaggacctgggcagagactacaagccaggcttggccaataacaccatccagagcatcttacaggcgctggatgagctgctggaggcccctggggacctggagaccctgccccgcttacagcagcactgtgtggccagtcacctgctggatggcctagaggatgtcctcagaggcctgagcaagaacctttccaatgggctgttgaacttcagttatcctgcaggcacagaattgtccctggaggtgcagaagcaagtagacaggagtgtcaccttgagacagaatcaggcagtgatgcagctcgactggaatcaggcacagaaatctggtgacccagtcagtgatcccgagacagaaggtgctctgtgtcttctgggagcatggccagaatggatgtggtcactgggccaccacaggctgcagcacaataggcaccagagacaccagcaccatctgccgttgcacccacctgagcagctttgccgtcctcatggcccactacgatgtgcaggaggaggatcccgtgctgactgtcatcacctacatggggctgagcgtctctctgctgtgcctcctcctggcggccctcacttttctcctgtgtaaagccatccagaacaccagcacctcactgcatctgcagctctcgctctgcctcttcctggcccacctcctcttcctcgtggcaattgatcaaaccggacacaaggtgctgtgctccatcatcgccggtaccttgcactatctctacctggccaccttgacctggatgctgctggaggccctgtacctcttcctcactgcacggaacctgacggtggtcaactactcaagcatcaacagattcatgaagaagctcatgttccctgtgggctacggagtcccagctgtgacagtggccatttctgcagcctccaggcctcacctttatggaacaccttcccgctgctggctccaaccagaaaagggatttatatggggcttccttggacctgtctgcgccatcttctctgtgaatttagttctctttctggtgactctctggattttgaaaaacagactctcctccctcaatagtgaagtgtccaccctccggaacacaaggatgctggcatttaaagcgac

SEQ ID NO: 320507 - DNA, 2325 bp, Artificial Sequence
  derived and/or modified sequence
atgggggggcgagtgtttctcgtattcctggctttctgcgtctggctcacattaccgggtgcagagacccaggactctcgcggctgtgcccgctggtgcccacaggacagcagttgcgtaaacgccactgcttgtaggtgcaaccctgggttcagttcattctccgaaattattacgacacccatggaaacctgcgatgatattaacgagtgcgccactctgtctaaggtgtcttgcgggaagtttagcgactgctggaacactgaaggtagttacgactgtgtttgttctcctggatacgaaccagtcagcggggcaaagaccttcaaaaacgaaagcgaaaacacttgtcaggatgtggatgagtgccaacagaatcccagactctgcaaatcctacggcacctgcgttaatacactgggctcctatacctgccagtgcctgcccggctttaaattgaaacccgaggatcctaaactgtgcacagacgttgacgaatgcagtagcggccaacaccaatgcgactcctcaaccgtgtgttttaacactgtcggatcctacagttgcagatgtcgtcccggttggaagccaaggcacggaatacccaataatcagaaagatacggtgtgcgaagacatgactttcagcacatggaccccaccacccggggtccactcacagaccctgtcacggttttttgataaagttcaggacctggggagagactacaagccgggcctcgccaacaacacgattcagtcaatcctgcaagctctggacgagctgcttgaggcgcccggtgacctggagaccctaccacgacttcaacagcactgtgtcgcatcccacttgctggatggtttggaggacgtgttacgtggcctaagtaagaacctgagcaatggattgctgaatttttcataccctgctggcaccgaattgagtttggaagtgcagaaacaggtggacaggagcgtaacactgagacagaatcaagccgttatgcaactggattggaatcaagcccagaagtccggcgatcctggcccgtcggttgttggactggtcagcatcccaggcatggggaagcttctggctgaggcccctttggtactcgagccagagaagcagatgttgcttcacgagacccatcagggcttattgcaggacggcagtcctatcctcctttcggatgttatttccgcattcctatccaataatgacacccagaatctctcaagcccggtgacgttcacatttagtcaccgctcggtgattcctcgccagaaggtgctatgtgtgttttgggagcacggccagaatggttgtggacactgggctacaaccggatgcagcaccatcggaacccgagacaccagtacaatatgccggtgtacccatctgtcaagctttgccgttctgatggcccattatgatgtgcaagaggaagatccagtgctgaccgtgataacttacatgggcctctccgtgtctctactttgcctcctactggctgcactaacattcttgctgtgcaaggccatccagaataccagcacaagcctgcatttgcaactgtccctgtgtctgttcctggctcatctgctgtttctggtcgctatcgatcaaaccggccacaaagtgctgtgtagcattattgccgggacactgcattatctgtatcttgccacgttaacctggatgctgcttgaagcactgtacttgtttctgacggctaggaatttaactgtggtaaactattccagcatcaacagattcatgaagaaactaatgttccccgtcggatacggcgttcccgccgtgacggtggctataagcgctgcctcacgaccccacctgtacggcacaccatcgaggtgctggctgcagcctgaaaagggctttatctggggcttcctggggccagtttgtgccatttttagcgtgaatttagtgctattcctagtgaccctgtggatactgaaaaatcgtttaagtagcctcaattctgaggtgagcaccctgcggaacacaaggatgcttgcattcaaagcaactgctcaactctttatactggggtgcacatggtgtctgggaatcttgcaggtcggtcccgccgccagagtcatggcctaccttttcacaataatcaatagtctccagggcgtcttcattttcttagtctactgcctcctgagccagcaggttcgtgagcaatacggcaagtggagcaagggcattcgaaaattaaagaccgaaagcgagatgcacactctgagttcttctgccaaggcggatacgtctaagcccagtactgtgaattag

SEQ ID NO: 320508 - DNA, 1140 bp, Artificial Sequence
  derived and/or modified sequence
atgggaggcagagtgttcctggtcttcttggccttttgtgtttggttgacactgcctggggcagagacccaggactcacgcggttgcgcccgctggtgccctcaggatagttcttgtgtcaatgccacagcgtgtcggtgtaacccagggttcagcagcttctcggaaattataaccacaccaatggagacttgtgacgatattaatgagtgtgctacactgtctaaagtgtcttgtggaaaattcagtgattgttggaataccgaggggagctacgattgtgtgtgttcccccggatatgaaccagtgtcaggggctaagacctttaaaaacgaatctgaaaatacatgccaggacgttgacgagtgccagcaaaaccccaggctgtgcaaatcgtacggaacctgcgtgaataccttgggctcgtacacctgtcagtgcctgccagggtttaagctgaagcccgaggatccaaagctttgcaccgacgtcgacgagtgcagctctggccagcaccagtgtgacagttccactgtttgtttcaataccgttggtagctatagttgccgatgtcggccagggtggaagccgcgccacggcatccctaataaccaaaaggataccgtgtgtgaagacatgacattttctacatggactcccccacctggcgttcactctcagaccctgagtcgcttttttgataaggtacaagatctcgggcgggactataaaccgggactggcgaataatactattcagagtattctgcaggccctcgatgaactgctggaggcgcctggcgatctggaaacgctccctaggctccagcagcattgcgttgccagccatctgcttgacggactcgaagacgtactgagaggattgagcaagaatttgtcaaatggcctgcttaacttctcttaccctgcggggactgagttatcccttgaggtccagaagcaagtagatcgcagcgttactctgagacagaatcaagccgttatgcagttggattggaatcaggcccagaagagcggagacccgggtggtggatctcgcgctgattgccaccacttgcacggtgccgagaggctgtccgcagtccctcccccggggggacctcatttctcccccgtctag

SEQ ID NO: 320509 - DNA, 2325 bp, Artificial Sequence
  derived and/or modified sequence
atgggcggccgggtcttcctggtgttcctggccttctgtgtgtggctgaccctgcctggagctgagacccaggacagccggggctgtgcccgctggtgcccccaggacagcagctgtgtgaatgccacagcctgccgctgcaaccctggcttcagcagcttcagcgagatcatcaccacccccatggagacctgtgatgacatcaatgaatgtgccaccctgagcaaggtgtcctgtgggaagttcagtgactgctggaacacagagggcagctatgactgtgtgtgcagccctggctatgagcctgtgtctggggccaagaccttcaagaatgaaagtgagaacacctgccaggatgtggatgagtgccagcagaacccccggctgtgcaagagctatggcacctgtgtgaacaccctgggcagctacacctgccagtgcctgcccggcttcaagctgaagccagaggaccccaagctgtgcacagatgtggatgagtgcagcagcggccagcaccagtgtgacagcagcacagtgtgcttcaacacagtgggcagctacagctgccgctgcaggcctggctggaagcccaggcatggcatccccaacaaccagaaggacacagtgtgtgaggacatgaccttcagcacctggaccccacctcctggggtgcacagccagaccctgagccgcttctttgacaaggtgcaggacctgggccgggactacaagccaggcctggccaacaacaccatccagagcatcctgcaggccctggatgagctgctggaggcccctggggacctggagaccctgccccggctgcagcagcactgtgtggccagccacctgctggatggcctggaggatgtgctgcggggcctgagcaagaacctgagcaatggcctgctgaacttctcctacccagctggaacagagctgagcctggaggtgcagaagcaggtggacagatctgtgaccctgcggcagaaccaggccgtgatgcagctggactggaaccaggcccagaagagcggggaccccggccccagcgtggtgggcctggtgtccatccctggcatgggcaagctgctggccgaggcccccctggtgctggagcctgagaagcagatgctgctgcacgagacccaccagggcctgctgcaggacggcagccccatcctgctgagtgatgtgatcagcgccttcctgagcaacaatgacacccagaacctgagcagccctgtgaccttcaccttcagccacaggagcgtcatcccccggcagaaggtgctgtgtgtgttctgggagcacggccagaatggctgcggccactgggccaccaccggctgcagcaccatcggcacccgggacaccagcaccatctgccgctgcacccacctgagcagctttgctgtgctgatggcccactatgatgtgcaggaggaggaccctgtgctgaccgtcatcacctacatgggcctgtctgtgtccctgctgtgcctgctgctggccgccctgaccttcctgctgtgcaaggccatccagaacaccagcaccagcctgcacctgcagctgagcctgtgcctcttcctggcccacctgctcttcctggtggccatcgaccagacaggccacaaggtgctgtgcagcatcatcgccggcaccctgcactacctgtacctggccaccctgacctggatgctgctggaggccctgtacctgttcctgacagccaggaacctgactgtggtgaactacagcagcatcaaccgcttcatgaagaagctgatgtttcctgtgggctatggagtgcctgctgtgacagtggccatctctgctgccagccggccccacctgtatggcacccccagccgctgctggctgcagcctgagaagggcttcatctggggcttcctgggccctgtgtgtgccatcttctctgtgaacctggtgctcttcctggtgaccctgtggatcctgaagaaccggctgagcagcctgaacagcgaggtgtccaccctgaggaacaccaggatgctggccttcaaggccacagcccagctgttcatcctgggctgcacctggtgcctgggcatcctgcaggtgggccctgctgcccgggtgatggcctacctgttcaccatcatcaacagcctgcagggcgtcttcatcttcctggtgtactgcctgctgagccagcaggtgcgggagcagtatggcaagtggagcaagggcatcaggaagctgaagacagagagcgagatgcacaccctgagcagcagcgccaaggctgacaccagcaagcccagcacagtgaactag

SEQ ID NO: 320510 - DNA, 1140 bp, Artificial Sequence
  derived and/or modified sequence
atgggcggccgggtcttcctggtgttcctggccttctgtgtgtggctgaccctgcctggagctgagacccaggacagccggggctgtgcccgctggtgcccccaggacagcagctgtgtgaatgccacagcctgccgctgcaaccctggcttcagcagcttcagcgagatcatcaccacccccatggagacctgtgatgacatcaatgaatgtgccaccctgagcaaggtgtcctgtgggaagttcagtgactgctggaacacagagggcagctatgactgtgtgtgcagccctggctatgagcctgtgtctggggccaagaccttcaagaatgaaagtgagaacacctgccaggatgtggatgagtgccagcagaacccccggctgtgcaagagctatggcacctgtgtgaacaccctgggcagctacacctgccagtgcctgcccggcttcaagctgaagccagaggaccccaagctgtgcacagatgtggatgagtgcagcagcggccagcaccagtgtgacagcagcacagtgtgcttcaacacagtgggcagctacagctgccgctgcaggcctggctggaagcccaggcatggcatccccaacaaccagaaggacacagtgtgtgaggacatgaccttcagcacctggaccccacctcctggggtgcacagccagaccctgagccgcttctttgacaaggtgcaggacctgggccgggactacaagccaggcctggccaacaacaccatccagagcatcctgcaggccctggatgagctgctggaggcccctggggacctggagaccctgccccggctgcagcagcactgtgtggccagccacctgctggatggcctggaggatgtgctgcggggcctgagcaagaacctgagcaatggcctgctgaacttctcctacccagctggaacagagctgagcctggaggtgcagaagcaggtggacagatctgtgaccctgcggcagaaccaggccgtgatgcagctggactggaaccaggcccagaagagcggggaccccggcggcggcagcagagctgactgccaccacctgcacggggctgagcggctgtctgctgtgcccccacctgggggcccccacttcagccctgtgtag

SEQ ID NO: 320511 - DNA, 2325 bp, Artificial Sequence
  derived and/or modified sequence
atgggcggccgggtgttcctggtgttcctggccttctgcgtgtggctgaccctccctggcgcggaaactcaggactcccgcggctgtgctcgctggtgccctcaagactcctcttgtgtgaacgctacagcgtgtcggtgcaaccctggtttttctagtttttcggagatcatcacaacccctatggaaacttgcgacgatattaatgaatgtgcaacactgagtaaggtgagttgcggcaaattctccgactgttggaatactgagggcagctacgactgtgtctgcagtcctggttatgaacccgtttcaggtgccaagacatttaaaaatgaaagcgagaatacttgccaggatgtggacgaatgtcagcaaaatccccgactgtgtaaatcttacgggacttgcgttaatactctgggctcgtatacctgccagtgtctcccagggtttaaactcaagcccgaagatccaaagctttgtacagatgtggatgagtgctctagcgggcagcatcaatgtgacagtagcactgtttgcttcaacacagtgggcagttactcttgcaggtgtcgcccaggttggaaaccacgtcatggtattcctaacaaccagaaagataccgtttgcgaggacatgacttttagcacgtggacacccccccctggtgtccactcacagacgctgagccggtttttcgacaaggtccaggatctgggcagagactacaagcctgggttggccaacaataccattcagtccatactgcaggcgctcgatgagctgttagaagcccccggagaccttgagacactccccagactccagcagcactgtgtggccagccatctgctcgacggcctggaagatgtgctgcggggcctctccaaaaatcttagtaacggcttgttgaattttagctatcccgccgggaccgaactgagtctggaggtgcagaagcaagtcgatcggtcggtgactctcagacagaatcaagcggtcatgcagctggactggaatcaggctcaaaagagcggcgacccaggtccatctgtggttggtctggtgtctatcccggggatgggtaagctgctagcagaggccccccttgtgttggaacccgagaagcagatgttgctccacgagacgcatcaagggctgttgcaggacggaagccctattctgctgtctgacgtcatttcagcattcctgtccaataatgatactcagaatctttcgtccccagtcacctttactttctcccacagatcagtaatcccaagacagaaggtcctgtgtgttttctgggagcatggtcagaacggctgtgggcactgggctacaactggatgttccaccataggcacccgcgacactagcacaatatgcaggtgcacccatctttcctcgtttgccgtcttgatggctcattacgacgtgcaggaagaagaccctgtgctaacagtaataacctatatgggcttgagcgtgtcgttgctctgcttactgctcgccgccctcacgttcctgctctgcaaagccatacagaacaccagtaccagtctgcatttgcagctctccttgtgccttttcctggcccatctactcttcctggttgcaatcgaccaaactggccacaaggtgttgtgtagtattatcgcgggtacattgcattatctctacttggccacactgacatggatgctgctggaagccctgtatctcttcttgacagcccgaaacctgacagtcgtgaactattcctcaatcaatagatttatgaaaaagcttatgtttcctgtcggctatggcgtcccagccgtcacggtcgcgatcagtgccgcctcccgtcctcacctgtatggaactccatcgcgctgttggctgcaaccagagaaaggtttcatctggggtttcttaggaccagtatgtgccatcttttctgtcaacctcgtgctgttcttagtcactttgtggattctcaagaacagactgagtagtcttaattcggaagtatcaactctgcgcaacacccggatgctggccttcaaagctacggctcagctgtttatcctgggctgcacctggtgcctagggatcctgcaggttggccctgcagcaagggtgatggcctacctttttactattattaactctctgcagggtgtcttcatctttcttgtttactgcctgcttagccaacaggtgcgtgaacagtacggcaaatggtctaagggcataaggaagctcaagaccgagtctgagatgcacacattgagcagtagcgccaaagctgacacctccaagcctagcacagtaaactag

SEQ ID NO: 320512 - DNA, 1140 bp, Artificial Sequence
  derived and/or modified sequence
atgggcggccgggtgttcctggtgttcctggccttctgcgtgtggttaaccctgcccggagctgagacccaagacagccgcggctgcgctaggtggtgccctcaagatagcagctgcgtgaacgccacagcatgtagatgcaacccaggatttagttcattctccgagatcatcacaacacccatggagacatgtgatgatatcaacgaatgtgcaactctgtccaaggtgagctgtggaaaattctccgattgctggaatacagaggggtcctacgactgtgtttgcagccccgggtacgagccagtgtcaggagcaaaaacattcaagaatgaatctgagaatacttgtcaggacgttgacgagtgccaacaaaacccaaggttgtgcaagagctatggcacatgcgtcaataccctgggctcctatacctgtcaatgccttcctggttttaaactcaagccggaagatcccaagttgtgcaccgacgtggacgagtgttctagcggccagcaccagtgcgactccagtactgtttgttttaatactgtggggtcgtacagctgtcgatgcaggcctggatggaagccgagacacggtataccaaacaaccagaaagacacagtgtgtgaggatatgacattttccacatggacgccaccacctggggtgcattctcagacattatcacgtttttttgacaaagttcaggacctgggacgtgactataaacccggactggccaacaacacaattcagagcatcctgcaggccctggacgaactgttggaggccccaggcgatttggagactcttccgcgcctgcaacaacactgcgttgcctcccatctcctggatggcctggaggatgtgctacggggtctgagcaagaacctaagcaacggcctgctcaactttagctaccccgctggcaccgaactcagcctagaagtgcaaaagcaggttgatagatccgtcacactacggcagaatcaggccgtcatgcagctggattggaatcaggctcaaaagtcaggagatcctggcggcgggagtcgggctgactgtcaccatctgcatggcgccgaacggctttcagccgtgcctccccctggtggacctcatttttccccagtctag

SEQ ID NO: 320513 - DNA, 2325 bp, Artificial Sequence
  derived and/or modified sequence
atgggcggaagggtttttctggtgttcctggctttttgcgtgtggctgacgctgccaggggctgaaacgcaagattctcggggatgcgctagatggtgcccgcaggactcctcctgcgtgaacgccactgcatgccgctgcaaccccggtttcagctccttttccgagataattaccacaccaatggagacttgcgacgatatcaatgagtgtgcaactctctctaaggtgagctgcggcaagttctccgactgctggaataccgagggatcatatgactgcgtttgcagccccggttatgagcctgtgagtggagctaagaccttcaagaacgaatctgagaatacatgtcaggacgtggatgagtgccaacagaaccccaggctgtgtaagtcatacggtacttgtgtgaacaccctgggaagctatacctgccagtgtttacccggtttcaaactaaagccagaggatcccaagctgtgtacggatgttgacgagtgcagctcgggacagcaccagtgcgacagttccactgtttgttttaacacagtgggttcatactcgtgtaggtgtagacctgggtggaaacctagacacgggattcctaataatcagaaggacactgtgtgcgaagacatgacattctccacttggactcctccgcctggcgtccacagccagaccctgtcgcgtttctttgataaagtccaggacctcgggagagattacaagcctgggctcgccaacaatacaatacagtcaatcctccaggccctcgacgaactgcttgaggccccaggcgatcttgagaccctccctagactgcagcagcactgcgtcgccagccatctcctagacggactggaggatgtgttacggggattaagtaaaaaccttagcaatggattgctcaatttttcgtatccggctggaaccgagctgtcattagaagtccaaaagcaggtcgatcgatcagtaactctgcgccaaaaccaggcggtgatgcagctagattggaatcaggctcaaaaaagcggagaccctggccctagcgtggtgggcctcgtttcaattcccggtatgggcaaattgttggctgaggctcctctggtgttagaacccgaaaagcaaatgctcctgcatgaaacccaccagggactgttacaggatggatccccgatactgcttagtgacgtgatctcagctttcctttcaaataacgatacccaaaatctgagcagccccgtgacctttaccttcagccaccggagcgtgatcccacggcagaaggtgctctgcgtcttctgggaacatggacaaaacgggtgcggccattgggccaccacaggttgttctactataggcacccgggatacaagcaccatttgcaggtgcactcacctgagtagctttgctgtgctcatggcgcactacgatgtgcaggaggaggaccctgttctgacagtgattacatacatgggcctgtccgtgagtctgctatgtctgctcctggcggctttgacattccttttgtgcaaggcaatacagaatacatccacatcgcttcacctacagttaagcctctgtctctttctcgcgcacctattgttcctagtggccattgatcagaccggacacaaggtgttgtgtagcatcatcgctggcaccctgcattacctgtacttggctaccttaacctggatgctcctcgaggcactatacctcttcctgactgcaagaaatctgaccgttgtgaattacagtagcataaatcgcttcatgaagaagctcatgtttcccgtgggttatggggtgcctgccgtaactgtagcaattagtgcagctagccggccacacttgtatgggactccctcacgttgctggctgcagcctgagaaggggtttatctggggtttcttgggacctgtgtgtgccatcttttcagtgaatttggtcttgttcttagtgaccctgtggattctgaagaatcgccttagttcactgaactcagaagtcagcacactgcgtaacacacggatgctggctttcaaggctacagctcagttattcattctcggctgtacatggtgcctcggcatcttgcaggtaggcccagctgctcgggtaatggcctatctcttcactatcatcaacagcttgcagggcgtgtttattttcctggtgtactgtctcttgagccagcaggtcagggagcagtacgggaagtggtctaagggtattaggaagctcaagactgaatccgaaatgcacaccctctcctcctcggctaaagccgacacttctaaaccctccacggttaattag

SEQ ID NO: 320514 - DNA, 1140 bp, Artificial Sequence
  derived and/or modified sequence
atggggggtcgcgtgttcctggtgtttctggccttctgcgtgtggctcacattgcctggcgcagagactcaagactcccgcggttgtgccaggtggtgcccacaagattcttcctgcgtcaacgctaccgcttgtaggtgcaaccctgggtttagctccttttctgaaatcatcacaaccccgatggaaacttgcgacgatatcaatgaatgtgctacgctcagcaaagtgagctgtggtaaattttccgactgttggaatacggagggttcctacgactgtgtctgcagccctggatacgaacccgtgagcggggctaagacgttcaaaaatgagagcgagaatacatgtcaagacgtggacgagtgtcagcagaatcccagactgtgcaagagctatggaacttgcgtcaatacattgggaagttatacatgtcagtgcttgcctggatttaagcttaagcccgaggatcctaagctgtgcaccgatgttgacgagtgctcctcaggacagcaccagtgcgacagtagcactgtttgtttcaatactgtggggtcctattcatgcagatgtcggcctgggtggaaacctaggcatggcatccccaacaatcagaaggacacagtttgcgaggatatgacattctccacatggacaccgccacctggtgtgcacagtcaaacgttgtcaagattctttgacaaggtgcaggatctgggtcgggactataaaccagggctggctaataacacgatacagtccattttgcaagccctggatgaactgctggaagctcccggtgaccttgaaactttgcctaggcttcagcagcattgcgtggcttctcatctgcttgatggactggaggacgtcttgaggggcctatccaagaacctgtcaaacggcctgctgaatttctcttatcctgctggcactgaactgagtcttgaggtgcagaaacaggtagaccgtagtgtcaccctgagacagaatcaagcagtgatgcagctagactggaaccaggcccagaaaagtggcgaccccggaggaggaagtcgcgcagactgccaccacctccatggcgcagaacggctctcagccgtgcctccgccagggggaccccacttctctccagtctag

SEQ ID NO: 320515 - protein, 239 aa, Artificial Sequence
  derived and/or modified sequence
MGGRVFLVFLAFCVWLTLPGAETQDSRGCARWCPQDSSCVNATACRCNPGFSSFSEIITTPMETCDDINECATLSKVSCGKFSDCWNTEGSYDCVCSPGYEPVSGAKTFKNESENTCQDVDECQQNPRLCKSYGTCVNTLGSYTCQCLPGFKLKPEDPKLCTDVNECTSGQNPCHSSTHCLNNVGSYQCRCRPGWQPIPGSPNGPNNTVCEGRELRSHVPRDPQTSDHMFNGAHTNQAE

SEQ ID NO: 320516 - protein, 681 aa, Artificial Sequence
  derived and/or modified sequence
MGGRVFLVFLAFCVWLTLPGAETQDSRGCARWCPQDSSCVNATACRCNPGFSSFSEIITTPMETCDDINECATLSKVSCGKFSDCWNTEGSYDCVCSPGYEPVSGAKTFKNESENTCQDMTFSTWTPPPGVHSQTLSRFFDKVQDLGRDYKPGLANNTIQSILQALDELLEAPGDLETLPRLQQHCVASHLLDGLEDVLRGLSKNLSNGLLNFSYPAGTELSLEVQKQVDRSVTLRQNQAVMQLDWNQAQKSGDPGPSVVGLVSIPGMGKLLAEAPLVLEPEKQMLLHETHQGLLQDGSPILLSDVISAFLSNNDTQNLSSPVTFTFSHRSVIPRQKVLCVFWEHGQNGCGHWATTGCSTIGTRDTSTICRCTHLSSFAVLMAHYDVQEEDPVLTVITYMGLSVSLLCLLLAALTFLLCKAIQNTSTSLHLQLSLCLFLAHLLFLVAIDQTGHKVLCSIIAGTLHYLYLATLTWMLLEALYLFLTARNLTVVNYSSINRFMKKLMFPVGYGVPAVTVAISAASRPHLYGTPSRCWLQPEKGFIWGFLGPVCAIFSVNLVLFLVTLWILKNRLSSLNSEVSTLRNTRMLAFKATAQLFILGCTWCLGILQVGPAARVMAYLFTIINSLQGVFIFLVYCLLSQQVREQYGKWSKGIRKLKTESEMHTLSSSAKADTSKPSTVN

SEQ ID NO: 320517 - protein, 730 aa, Artificial Sequence
  derived and/or modified sequence
MGGRVFLVFLAFCVWLTLPGAETQDSRGCARWCPQDSSCVNATACRCNPGFSSFSEIITTPMETCDDINECATLSKVSCGKFSDCWNTEGSYDCVCSPGYEPVSGAKTFKNESENTCQDVDECSSGQHQCDSSTVCFNTVGSYSCRCRPGWKPRHGIPNNQKDTVCEDMTFSTWTPPPGVHSQTLSRFFDKVQDLGRDYKPGLANNTIQSILQALDELLEAPGDLETLPRLQQHCVASHLLDGLEDVLRGLSKNLSNGLLNFSYPAGTELSLEVQKQVDRSVTLRQNQAVMQLDWNQAQKSGDPGPSVVGLVSIPGMGKLLAEAPLVLEPEKQMLLHETHQGLLQDGSPILLSDVISAFLSNNDTQNLSSPVTFTFSHRSVIPRQKVLCVFWEHGQNGCGHWATTGCSTIGTRDTSTICRCTHLSSFAVLMAHYDVQEEDPVLTVITYMGLSVSLLCLLLAALTFLLCKAIQNTSTSLHLQLSLCLFLAHLLFLVAIDQTGHKVLCSIIAGTLHYLYLATLTWMLLEALYLFLTARNLTVVNYSSINRFMKKLMFPVGYGVPAVTVAISAASRPHLYGTPSRCWLQPEKGFIWGFLGPVCAIFSVNLVLFLVTLWILKNRLSSLNSEVSTLRNTRMLAFKATAQLFILGCTWCLGILQVGPAARVMAYLFTIINSLQGVFIFLVYCLLSQQVREQYGKWSKGIRKLKTESEMHTLSSSAKADTSKPSTVN

SEQ ID NO: 320518 - protein, 225 aa, Artificial Sequence
  derived and/or modified sequence
MTFSTWTPPPGVHSQTLSRFFDKVQDLGRDYKPGLANNTIQSILQALDELLEAPGDLETLPRLQQHCVASHLLDGLEDVLRGLSKNLSNGLLNFSYPAGTELSLEVQKQVDRSVTLRQNQAVMQLDWNQAQKSGDPVSDPETEGALCLLGAWPEWMWSLGHHRLQHNRHQRHQHHLPLHPPEQLCRPHGPLRCAGGGSRADCHHLHGAERLSAVPPPGGPHFSPV

SEQ ID NO: 320519 - DNA, 2046 bp, Artificial Sequence
  derived and/or modified sequence
atgggcggcagagtgttcctggtgttcctggccttctgcgtgtggctgaccctgcccggcgccgagacccaggacagcagaggctgcgccagatggtgcccccaggacagcagctgcgtgaacgccaccgcctgcagatgcaaccccggcttcagcagcttcagcgagatcatcaccacccccatggagacctgcgacgacatcaacgagtgcgccaccctgagcaaggtgagctgcggcaagttcagcgactgctggaacaccgagggcagctacgactgcgtgtgcagccccggctacgagcccgtgagcggcgccaagaccttcaagaacgagagcgagaacacctgccaggacatgaccttcagcacctggacccccccccccggcgtgcacagccagaccctgagcagattcttcgacaaggtgcaggacctgggcagagactacaagcccggcctggccaacaacaccatccagagcatcctgcaggccctggacgagctgctggaggcccccggcgacctggagaccctgcccagactgcagcagcactgcgtggccagccacctgctggacggcctggaggacgtgctgagaggcctgagcaagaacctgagcaacggcctgctgaacttcagctaccccgccggcaccgagctgagcctggaggtgcagaagcaggtggacagaagcgtgaccctgagacagaaccaggccgtgatgcagctggactggaaccaggcccagaagagcggcgaccccggccccagcgtggtgggcctggtgagcatccccggcatgggcaagctgctggccgaggcccccctggtgctggagcccgagaagcagatgctgctgcacgagacccaccagggcctgctgcaggacggcagccccatcctgctgagcgacgtgatcagcgccttcctgagcaacaacgacacccagaacctgagcagccccgtgaccttcaccttcagccacagaagcgtgatccccagacagaaggtgctgtgcgtgttctgggagcacggccagaacggctgcggccactgggccaccaccggctgcagcaccatcggcaccagagacaccagcaccatctgcagatgcacccacctgagcagcttcgccgtgctgatggcccactacgacgtgcaggaggaggaccccgtgctgaccgtgatcacctacatgggcctgagcgtgagcctgctgtgcctgctgctggccgccctgaccttcctgctgtgcaaggccatccagaacaccagcaccagcctgcacctgcagctgagcctgtgcctgttcctggcccacctgctgttcctggtggccatcgaccagaccggccacaaggtgctgtgcagcatcatcgccggcaccctgcactacctgtacctggccaccctgacctggatgctgctggaggccctgtacctgttcctgaccgccagaaacctgaccgtggtgaactacagcagcatcaacagattcatgaagaagctgatgttccccgtgggctacggcgtgcccgccgtgaccgtggccatcagcgccgccagcagaccccacctgtacggcacccccagcagatgctggctgcagcccgagaagggcttcatctggggcttcctgggccccgtgtgcgccatcttcagcgtgaacctggtgctgttcctggtgaccctgtggatcctgaagaacagactgagcagcctgaacagcgaggtgagcaccctgagaaacaccagaatgctggccttcaaggccaccgcccagctgttcatcctgggctgcacctggtgcctgggcatcctgcaggtgggccccgccgccagagtgatggcctacctgttcaccatcatcaacagcctgcagggcgtgttcatcttcctggtgtactgcctgctgagccagcaggtgagagagcagtacggcaagtggagcaagggcatcagaaagctgaagaccgagagcgagatgcacaccctgagcagcagcgccaaggccgacaccagcaagcccagcaccgtgaactag

SEQ ID NO: 320520 - DNA, 2193 bp, Artificial Sequence
  derived and/or modified sequence
atgggcggcagagtgttcctggtgttcctggccttctgcgtgtggctgaccctgcccggcgccgagacccaggacagcagaggctgcgccagatggtgcccccaggacagcagctgcgtgaacgccaccgcctgcagatgcaaccccggcttcagcagcttcagcgagatcatcaccacccccatggagacctgcgacgacatcaacgagtgcgccaccctgagcaaggtgagctgcggcaagttcagcgactgctggaacaccgagggcagctacgactgcgtgtgcagccccggctacgagcccgtgagcggcgccaagaccttcaagaacgagagcgagaacacctgccaggacgtggacgagtgcagcagcggccagcaccagtgcgacagcagcaccgtgtgcttcaacaccgtgggcagctacagctgcagatgcagacccggctggaagcccagacacggcatccccaacaaccagaaggacaccgtgtgcgaggacatgaccttcagcacctggacccccccccccggcgtgcacagccagaccctgagcagattcttcgacaaggtgcaggacctgggcagagactacaagcccggcctggccaacaacaccatccagagcatcctgcaggccctggacgagctgctggaggcccccggcgacctggagaccctgcccagactgcagcagcactgcgtggccagccacctgctggacggcctggaggacgtgctgagaggcctgagcaagaacctgagcaacggcctgctgaacttcagctaccccgccggcaccgagctgagcctggaggtgcagaagcaggtggacagaagcgtgaccctgagacagaaccaggccgtgatgcagctggactggaaccaggcccagaagagcggcgaccccggccccagcgtggtgggcctggtgagcatccccggcatgggcaagctgctggccgaggcccccctggtgctggagcccgagaagcagatgctgctgcacgagacccaccagggcctgctgcaggacggcagccccatcctgctgagcgacgtgatcagcgccttcctgagcaacaacgacacccagaacctgagcagccccgtgaccttcaccttcagccacagaagcgtgatccccagacagaaggtgctgtgcgtgttctgggagcacggccagaacggctgcggccactgggccaccaccggctgcagcaccatcggcaccagagacaccagcaccatctgcagatgcacccacctgagcagcttcgccgtgctgatggcccactacgacgtgcaggaggaggaccccgtgctgaccgtgatcacctacatgggcctgagcgtgagcctgctgtgcctgctgctggccgccctgaccttcctgctgtgcaaggccatccagaacaccagcaccagcctgcacctgcagctgagcctgtgcctgttcctggcccacctgctgttcctggtggccatcgaccagaccggccacaaggtgctgtgcagcatcatcgccggcaccctgcactacctgtacctggccaccctgacctggatgctgctggaggccctgtacctgttcctgaccgccagaaacctgaccgtggtgaactacagcagcatcaacagattcatgaagaagctgatgttccccgtgggctacggcgtgcccgccgtgaccgtggccatcagcgccgccagcagaccccacctgtacggcacccccagcagatgctggctgcagcccgagaagggcttcatctggggcttcctgggccccgtgtgcgccatcttcagcgtgaacctggtgctgttcctggtgaccctgtggatcctgaagaacagactgagcagcctgaacagcgaggtgagcaccctgagaaacaccagaatgctggccttcaaggccaccgcccagctgttcatcctgggctgcacctggtgcctgggcatcctgcaggtgggccccgccgccagagtgatggcctacctgttcaccatcatcaacagcctgcagggcgtgttcatcttcctggtgtactgcctgctgagccagcaggtgagagagcagtacggcaagtggagcaagggcatcagaaagctgaagaccgagagcgagatgcacaccctgagcagcagcgccaaggccgacaccagcaagcccagcaccgtgaactag

SEQ ID NO: 320521 - DNA, 6345 bp, Artificial Sequence
  derived and/or modified sequence
ggggggtctgctctgtgcggtgaagcttctcttcttggcacctgcctggcatcggaagagggccccttctccctccctgggcttttatgtggacactgtaatgcctcagttttctttctttctttttgtttttgacacagggtctcactctatcacccaagctggagtgcagtggcaccatcttagctcaccgcagcctcaaactccccagctcgggtgattcttcctgcctcagcctcctgagtagtagcagctgggaccacagacgtctgccaccaagcccagctgcaccgccagttccggggagggccctgggccagcggctgtccgccccccctcctttataaagtcctggcctcgggacagcccgcacagctgcccagcctgcggagacgggacagccctgtcccactcactctttcccctgctgctcctgccggcagctcagctggaaccatgggaggccgcgtctttctcgtctttctcgcattctgtgtctggctgactctgccgggagctgaaacccaggactccaggggctgtgcccggtggtgccctcaggactcctcgtgtgtcaatgccaccgcctgtcgctgcaatccagggttcagctctttttctgagatcatcaccacccccatggagacttgtgacgacatcaacgagtgtgcaacactgtcgaaagtgtcatgcggaaaattctcggactgctggaacacagaggggagctacgactgcgtgtgcagcccaggatatgagcctgtttctggggcaaaaacattcaagaatgagagcgagaacacgtgtcaagatatgactttctccacctggaccccgccccctggagtccacagccagacgctttcccgattcttcgacaaagtccaggacctgggcagagactacaagccaggcttggccaataacaccatccagagcatcttacaggcgctggatgagctgctggaggcccctggggacctggagaccctgccccgcttacagcagcactgtgtggccagtcacctgctggatggcctagaggatgtcctcagaggcctgagcaagaacctttccaatgggctgttgaacttcagttatcctgcaggcacagaattgtccctggaggtgcagaagcaagtagacaggagtgtcaccttgagacagaatcaggcagtgatgcagctcgactggaatcaggcacagaaatctggtgacccaggcccttctgtggtgggccttgtctccattccagggatgggcaagttgctggctgaggcccctctggtcctggaacctgagaagcagatgcttctgcatgagacacaccagggcttgctgcaggacggctcccccatcctgctctcagatgtgatctctgcctttctgagcaacaacgacacccaaaacctcagctccccagttaccttcaccttctcccaccgttcagtgatcccgagacagaaggtgctctgtgtcttctgggagcatggccagaatggatgtggtcactgggccaccacaggctgcagcacaataggcaccagagacaccagcaccatctgccgttgcacccacctgagcagctttgccgtcctcatggcccactacgatgtgcaggaggaggatcccgtgctgactgtcatcacctacatggggctgagcgtctctctgctgtgcctcctcctggcggccctcacttttctcctgtgtaaagccatccagaacaccagcacctcactgcatctgcagctctcgctctgcctcttcctggcccacctcctcttcctcgtggcaattgatcaaaccggacacaaggtgctgtgctccatcatcgccggtaccttgcactatctctacctggccaccttgacctggatgctgctggaggccctgtacctcttcctcactgcacggaacctgacggtggtcaactactcaagcatcaacagattcatgaagaagctcatgttccctgtgggctacggagtcccagctgtgacagtggccatttctgcagcctccaggcctcacctttatggaacaccttcccgctgctggctccaaccagaaaagggatttatatggggcttccttggacctgtctgcgccatcttctctgtgaatttagttctctttctggtgactctctggattttgaaaaacagactctcctccctcaatagtgaagtgtccaccctccggaacacaaggatgctggcatttaaagcgacagctcagctgttcatcctgggctgcacgtggtgtctgggcatcttgcaggtgggtccggctgcccgggtcatggcctacctcttcaccatcatcaacagcctgcagggtgtcttcatcttcctggtgtactgcctcctcagccagcaggtccgggagcaatatgggaaatggtccaaagggatcaggaaattgaaaactgagtctgagatgcacacactctccagcagtgctaaggctgacacctccaaacccagcacggttaactagaaaaatcttctgaataagatcttccctctttgcccgtggaaaatctgaacaatctttgagccatctagaggggaaagaaaagactttgttctgtgtgtttcaagaaattcaccatgtcagcaatatgaaggatgttatggaaggcgtgctaggcattcaattcctgcagaaaccggaaatcttccatgccctgcaatgtgctcatcaaactctcagcatatggacggccagctgtggcccatatcttggtcactctgaagcacaatatttatgaagctatagaacgttaagacctctttcacagcctctccttcctacaaagactcctccaaatcttaaaatgaagcaggaaaacgagcctaagaggactttcataccgacaacatctgaaaggactagaatgttcacaccacgatctggatttcttaattttttgtttttgtttttgttgttctctagttctacgggtttgattatttagtcatgtgaaaaatattgattactcacacatagatcaagagagacacggctcctgccttcatggagcttttaggggaaaatgaagtggctcttgcagctagagttgactcagaagccgaaattcctagaaatcaggtttctactgctaggcaattgaagtataaactattttataaacactgtcttctttcgtcttcacaccaacatgcagaaaagtttctaatctcagatcggggatgtgcaacaaattccatttcaaaggaatgacctgcaaaactcctaaatattccaagcaaatgcccttaaccctgtctgttatctgctttccttgaacagaaattctacatgaccataaaacctcgaagatgggtatggcacagttcatgccctgtaatcctagcactttgggagggtgaggcaggaggatggctcaagcccaggagtttgagaccagtgtgggcaacagagtgagaaccatctctacccaaaaaaaaaattaaaaattagccaagcatggtgatgatataggagttaaggagaaatcatttaggcaaatagcaagggtaggaagtcctcagtaaggttttccatttaatgaaaagcagcccccaaaatcattttcttttctaacaaagaacagcctgtaaaatcgagctgcagacatagacaagcaagctggaagcttccacgggtgaatgccggcagctgtgccaataggaaaaagctacctagactaggcatgtccaaaatggcggctccaagttcccttctctttgccagccatgtgtacagtaaaaagcaggcaacatagtgtcagccaaagctcatttgcataataagattagggtggggtggccagctcacataggggtaggccctaggtaaatcagacaccgccttctcaagcctgtctataaaatctggtacactatgacgagggtcagatttcccattcagacgcccctctcccatgcaagagaaagagctgttctcctttctctttcttttgcctattaaacctctgctcctggccaggcacagtggctcacgcctataatcccagcactttgggaggctgaggtggtcagatcacctaaggtcaggagttcaagaccagcctggtcaacatggtgaaatcttgtctctagtaaaaatacaaaaatatatgaaatctcacatagatgataatattaagttccaaaagcaactcaacctggtagattctaattttttttgaggcagggtcttgctttgtcacccatgctggagtacaatggcacaaacactgctcactgcagcctcgacctcccaaggcctaagcaatcctcctgcctcagtccccctccaggtatttgaaactacaggtgtgtaccaccacaccgggctaatttttgtattttttgtagagacgtgggtctcactatgctgcccaggctcaggtcttaatctcctgagctcaggcaatccgcaggcctcagcctccctaagtgcggggattacaggcttgagccactgcacctagcctctatttgttttacaaaagagaaattgagatcctgaatgttaagtgacttgcctgaggccatcccactaacaggagccagggttaggattcaaaccccatccaactggtcccagagctggagcttcttgcactgccctacactacctaccatctccatcctctgggcacctttttataagaaccaaaacattacagagcattgctttgtcaactcagctgggaacatttcccagtgcaactcacatttttcactgctctgtgcctgtccgtataagctcaatgagtattgatttaggggctttggagaactttgaatgctaccccccaagtaaccattgttggcaacctggtacctctacttttagccatttctccttctctataaatagtgcagaagtaacccacttggtaacaggcatccttgccaagcctccaccactaggtcagtgtaagaattaaagaaagaggaaagaaacacaaaaagtggcttgatggttaagacaggtttattttagagaaaacacacctgagaggggctgctggctgaattaggttagagtcttttctacagactaagagtgtttaaggatttagggtgggagagtttcttagaggcttggactgcttctgtgttttttttgttgtgcttatatgggagggagagtggtgtgtttgcttttatacatttttctgcagctgtaggcataccccccaagtctgcttttagcttccctattttagtgcacctggagggaaaggaatgtgcttattaaggcccactgttttactggggcccattgtatgagggtgaagtttggcagttacccaagagacttttcctccaccttcctctgtgcccgagctgttttatctgcattttactgtctgctttttttggctgcttatagtttttaaaaaagtaatttccttaaatccagaaggctaaaaatgaagctgaaacttaaagtggcggtgtttgtccaaaataacggggctcctgctctgccagtcagtaccctcaagtcactcctgatcctcaacctccatgcctaaggctggttcaagagaccacataatatctgccttttattacatacatgatgggtgcatgggattctgcgtgccctttgcttgatatagactgctaaggtgagatggggaatatcagagtcagctgctgcttgaggaagcagaacacacagctggaggcttggaacatgtgggtccctatgagtgtagagcccatatccccatagagtctacctagagcaggggtcgccaaatgttttcttaaagagcctgatagtgtatatgttaggctttgtgagccaggtatttacagcaactcaattctaccactgtggtatgaaaacagctatagacaatcataaatgaatgatcatggctatgttttaataaaactttacagacactgaacttgaacttccattgtgatatgaaaacagctatagacaatcataaatgaatgatcatggctatgttttaataaaactttatggacactgagcttgaacttcatatatcagtcatgtgacacaaaatatcattcttctttttatttgttttcacccatttgaaaaatgtaaaaactattcttagctgtacagaaacagatggtgggtcagatttgactcactgcccatagtttccagaccatgatgttcaggttcatggaagcacttcactctacactaatttattcatccattcatcacatatgtgatgagcacatacagacacacctcagagatattgcaggctccactccagatcaccacaataatgtgaatattgcaataaagcaagtcatacacatt

SEQ ID NO: 320522 - DNA, 6492 bp, Artificial Sequence
  derived and/or modified sequence
ggggggtctgctctgtgcggtgaagcttctcttcttggcacctgcctggcatcggaagagggccccttctccctccctgggcttttatgtggacactgtaatgcctcagttttctttctttctttttgtttttgacacagggtctcactctatcacccaagctggagtgcagtggcaccatcttagctcaccgcagcctcaaactccccagctcgggtgattcttcctgcctcagcctcctgagtagtagcagctgggaccacagacgtctgccaccaagcccagctgcaccgccagttccggggagggccctgggccagcggctgtccgccccccctcctttataaagtcctggcctcgggacagcccgcacagctgcccagcctgcggagacgggacagccctgtcccactcactctttcccctgctgctcctgccggcagctcagctggaaccatgggaggccgcgtctttctcgtctttctcgcattctgtgtctggctgactctgccgggagctgaaacccaggactccaggggctgtgcccggtggtgccctcaggactcctcgtgtgtcaatgccaccgcctgtcgctgcaatccagggttcagctctttttctgagatcatcaccacccccatggagacttgtgacgacatcaacgagtgtgcaacactgtcgaaagtgtcatgcggaaaattctcggactgctggaacacagaggggagctacgactgcgtgtgcagcccaggatatgagcctgtttctggggcaaaaacattcaagaatgagagcgagaacacgtgtcaagatgtggacgagtgcagctccgggcagcatcagtgtgacagctccaccgtctgcttcaacaccgtgggttcatacagctgccgctgccgcccaggctggaagcccagacacggaatcccgaataaccaaaaggacactgtctgtgaagatatgactttctccacctggaccccgccccctggagtccacagccagacgctttcccgattcttcgacaaagtccaggacctgggcagagactacaagccaggcttggccaataacaccatccagagcatcttacaggcgctggatgagctgctggaggcccctggggacctggagaccctgccccgcttacagcagcactgtgtggccagtcacctgctggatggcctagaggatgtcctcagaggcctgagcaagaacctttccaatgggctgttgaacttcagttatcctgcaggcacagaattgtccctggaggtgcagaagcaagtagacaggagtgtcaccttgagacagaatcaggcagtgatgcagctcgactggaatcaggcacagaaatctggtgacccaggcccttctgtggtgggccttgtctccattccagggatgggcaagttgctggctgaggcccctctggtcctggaacctgagaagcagatgcttctgcatgagacacaccagggcttgctgcaggacggctcccccatcctgctctcagatgtgatctctgcctttctgagcaacaacgacacccaaaacctcagctccccagttaccttcaccttctcccaccgttcagtgatcccgagacagaaggtgctctgtgtcttctgggagcatggccagaatggatgtggtcactgggccaccacaggctgcagcacaataggcaccagagacaccagcaccatctgccgttgcacccacctgagcagctttgccgtcctcatggcccactacgatgtgcaggaggaggatcccgtgctgactgtcatcacctacatggggctgagcgtctctctgctgtgcctcctcctggcggccctcacttttctcctgtgtaaagccatccagaacaccagcacctcactgcatctgcagctctcgctctgcctcttcctggcccacctcctcttcctcgtggcaattgatcaaaccggacacaaggtgctgtgctccatcatcgccggtaccttgcactatctctacctggccaccttgacctggatgctgctggaggccctgtacctcttcctcactgcacggaacctgacggtggtcaactactcaagcatcaacagattcatgaagaagctcatgttccctgtgggctacggagtcccagctgtgacagtggccatttctgcagcctccaggcctcacctttatggaacaccttcccgctgctggctccaaccagaaaagggatttatatggggcttccttggacctgtctgcgccatcttctctgtgaatttagttctctttctggtgactctctggattttgaaaaacagactctcctccctcaatagtgaagtgtccaccctccggaacacaaggatgctggcatttaaagcgacagctcagctgttcatcctgggctgcacgtggtgtctgggcatcttgcaggtgggtccggctgcccgggtcatggcctacctcttcaccatcatcaacagcctgcagggtgtcttcatcttcctggtgtactgcctcctcagccagcaggtccgggagcaatatgggaaatggtccaaagggatcaggaaattgaaaactgagtctgagatgcacacactctccagcagtgctaaggctgacacctccaaacccagcacggttaactagaaaaatcttctgaataagatcttccctctttgcccgtggaaaatctgaacaatctttgagccatctagaggggaaagaaaagactttgttctgtgtgtttcaagaaattcaccatgtcagcaatatgaaggatgttatggaaggcgtgctaggcattcaattcctgcagaaaccggaaatcttccatgccctgcaatgtgctcatcaaactctcagcatatggacggccagctgtggcccatatcttggtcactctgaagcacaatatttatgaagctatagaacgttaagacctctttcacagcctctccttcctacaaagactcctccaaatcttaaaatgaagcaggaaaacgagcctaagaggactttcataccgacaacatctgaaaggactagaatgttcacaccacgatctggatttcttaattttttgtttttgtttttgttgttctctagttctacgggtttgattatttagtcatgtgaaaaatattgattactcacacatagatcaagagagacacggctcctgccttcatggagcttttaggggaaaatgaagtggctcttgcagctagagttgactcagaagccgaaattcctagaaatcaggtttctactgctaggcaattgaagtataaactattttataaacactgtcttctttcgtcttcacaccaacatgcagaaaagtttctaatctcagatcggggatgtgcaacaaattccatttcaaaggaatgacctgcaaaactcctaaatattccaagcaaatgcccttaaccctgtctgttatctgctttccttgaacagaaattctacatgaccataaaacctcgaagatgggtatggcacagttcatgccctgtaatcctagcactttgggagggtgaggcaggaggatggctcaagcccaggagtttgagaccagtgtgggcaacagagtgagaaccatctctacccaaaaaaaaaattaaaaattagccaagcatggtgatgatataggagttaaggagaaatcatttaggcaaatagcaagggtaggaagtcctcagtaaggttttccatttaatgaaaagcagcccccaaaatcattttcttttctaacaaagaacagcctgtaaaatcgagctgcagacatagacaagcaagctggaagcttccacgggtgaatgccggcagctgtgccaataggaaaaagctacctagactaggcatgtccaaaatggcggctccaagttcccttctctttgccagccatgtgtacagtaaaaagcaggcaacatagtgtcagccaaagctcatttgcataataagattagggtggggtggccagctcacataggggtaggccctaggtaaatcagacaccgccttctcaagcctgtctataaaatctggtacactatgacgagggtcagatttcccattcagacgcccctctcccatgcaagagaaagagctgttctcctttctctttcttttgcctattaaacctctgctcctggccaggcacagtggctcacgcctataatcccagcactttgggaggctgaggtggtcagatcacctaaggtcaggagttcaagaccagcctggtcaacatggtgaaatcttgtctctagtaaaaatacaaaaatatatgaaatctcacatagatgataatattaagttccaaaagcaactcaacctggtagattctaattttttttgaggcagggtcttgctttgtcacccatgctggagtacaatggcacaaacactgctcactgcagcctcgacctcccaaggcctaagcaatcctcctgcctcagtccccctccaggtatttgaaactacaggtgtgtaccaccacaccgggctaatttttgtattttttgtagagacgtgggtctcactatgctgcccaggctcaggtcttaatctcctgagctcaggcaatccgcaggcctcagcctccctaagtgcggggattacaggcttgagccactgcacctagcctctatttgttttacaaaagagaaattgagatcctgaatgttaagtgacttgcctgaggccatcccactaacaggagccagggttaggattcaaaccccatccaactggtcccagagctggagcttcttgcactgccctacactacctaccatctccatcctctgggcacctttttataagaaccaaaacattacagagcattgctttgtcaactcagctgggaacatttcccagtgcaactcacatttttcactgctctgtgcctgtccgtataagctcaatgagtattgatttaggggctttggagaactttgaatgctaccccccaagtaaccattgttggcaacctggtacctctacttttagccatttctccttctctataaatagtgcagaagtaacccacttggtaacaggcatccttgccaagcctccaccactaggtcagtgtaagaattaaagaaagaggaaagaaacacaaaaagtggcttgatggttaagacaggtttattttagagaaaacacacctgagaggggctgctggctgaattaggttagagtcttttctacagactaagagtgtttaaggatttagggtgggagagtttcttagaggcttggactgcttctgtgttttttttgttgtgcttatatgggagggagagtggtgtgtttgcttttatacatttttctgcagctgtaggcataccccccaagtctgcttttagcttccctattttagtgcacctggagggaaaggaatgtgcttattaaggcccactgttttactggggcccattgtatgagggtgaagtttggcagttacccaagagacttttcctccaccttcctctgtgcccgagctgttttatctgcattttactgtctgctttttttggctgcttatagtttttaaaaaagtaatttccttaaatccagaaggctaaaaatgaagctgaaacttaaagtggcggtgtttgtccaaaataacggggctcctgctctgccagtcagtaccctcaagtcactcctgatcctcaacctccatgcctaaggctggttcaagagaccacataatatctgccttttattacatacatgatgggtgcatgggattctgcgtgccctttgcttgatatagactgctaaggtgagatggggaatatcagagtcagctgctgcttgaggaagcagaacacacagctggaggcttggaacatgtgggtccctatgagtgtagagcccatatccccatagagtctacctagagcaggggtcgccaaatgttttcttaaagagcctgatagtgtatatgttaggctttgtgagccaggtatttacagcaactcaattctaccactgtggtatgaaaacagctatagacaatcataaatgaatgatcatggctatgttttaataaaactttacagacactgaacttgaacttccattgtgatatgaaaacagctatagacaatcataaatgaatgatcatggctatgttttaataaaactttatggacactgagcttgaacttcatatatcagtcatgtgacacaaaatatcattcttctttttatttgttttcacccatttgaaaaatgtaaaaactattcttagctgtacagaaacagatggtgggtcagatttgactcactgcccatagtttccagaccatgatgttcaggttcatggaagcacttcactctacactaatttattcatccattcatcacatatgtgatgagcacatacagacacacctcagagatattgcaggctccactccagatcaccacaataatgtgaatattgcaataaagcaagtcatacacatt

SEQ ID NO: 320523 - DNA, 2046 bp, Artificial Sequence
  derived and/or modified sequence
atgggcggtcgagtatttctcgttttcttggctttctgcgtatggctgactctgccaggtgcagagacccaggactctaggggctgtgccaggtggtgccctcaagattcatcttgcgtcaatgcaactgcttgccgatgtaatccaggcttttcaagcttttcggaaatcatcacaactcctatggagacttgcgacgacatcaacgaatgtgcaacgctcagcaaagtgtcttgtggtaaattttctgactgttggaatacggagggaagctacgattgcgtgtgctctccgggatacgagccggtgagtggcgcaaaaaccttcaaaaatgagtcagagaatacatgccaagacatgaccttcagcacttggacaccccccccaggcgttcacagccaaacactgtctagattctttgacaaggttcaagatcttggtagagactacaagccaggtttggcaaataatacaatccagagtatcctccaagctttagatgaacttttggaagcacctggcgacctcgagaccctaccgcggcttcagcagcattgtgtcgcctcacatctgctcgatgggctggaggacgtactgaggggtttgtccaagaatctgtcgaatggcctgcttaatttctcctacccggccggcacagagctgtctttagaagttcagaagcaggttgaccgaagtgtcaccttgcggcagaatcaggctgtcatgcagctggactggaaccaggctcagaagtctggcgacccagggccctccgtcgtggggctcgtgagcattccaggtatgggtaagctgttagctgaggctccgcttgtgcttgagcctgagaaacagatgctgttacacgaaactcaccagggactcctgcaggatggttcccccatcttgctgtccgacgtgataagcgccttcctgtctaacaatgacacacaaaatctatctagccctgtcacgttcaccttttctcacagatccgtcataccccggcaaaaagttctgtgtgtcttttgggaacacgggcagaatgggtgcggtcactgggccacgaccgggtgcagcactatcggtacgagggatacttcaacaatctgtcgatgtacccatctgtcaagcttcgccgtgttgatggcacactacgacgttcaggaggaggatcctgtgctgactgtgatcacatatatgggcctatctgtctccctgttgtgtctcctgctggccgcacttactttcctcctttgcaaggccattcagaacacaagcacctctctgcatctgcaattgtctttatgcttgttcctggcacatcttctgtttttagtcgccatagatcagaccgggcacaaagtactgtgttccatcatagctgggactctgcattatctctacttggccactctcacatggatgctgctcgaggctctttacctgtttctgaccgcgaggaacctgactgtcgttaactacagcagcataaatagattcatgaagaagctcatgttcccagttgggtacggtgtgcctgctgtgacggtggcgatcagcgccgcaagtagacctcatctgtatgggactccctccaggtgttggctccaacccgagaaagggttcatttggggatttctgggccctgtctgcgctattttctctgtcaaccttgttcttttcttagttactctgtggatccttaagaataggctgtcttcccttaattcagaggtttcaaccttgcgtaacaccaggatgcttgcgttcaaagcaaccgcacagctctttattctagggtgtacctggtgccttggaatcctgcaagtgggaccggcagcacgtgtcatggcctatctctttaccatcatcaatagcttgcaaggggttttcattttccttgtttactgtctgctgtcacaacaggtgagagaacaatatgggaagtggagcaagggcattcgcaaacttaagactgagagtgaaatgcacaccctgagctcaagtgccaaagctgacacgtcaaaaccatctaccgtgaactag

SEQ ID NO: 320524 - DNA, 2193 bp, Artificial Sequence
  derived and/or modified sequence
atgggtggtagagtctttctggtgtttctcgcgttctgtgtgtggttaaccctgccaggagctgaaactcaggattcccggggctgcgcaaggtggtgccctcaggacagtagttgtgtgaacgccaccgcttgtcggtgcaacccagggttctcgagcttctccgaaatcattacaactccaatggaaacctgcgacgatatcaacgagtgcgcgaccctgagcaaggtttcctgtgggaagtttagcgattgttggaacactgagggttcttacgattgcgtctgctcaccaggctatgagcctgtgagtggcgctaagacatttaaaaatgaatctgagaatacgtgccaggacgtggatgagtgctccagcggccagcatcagtgtgactcctcaacggtttgctttaacaccgtcggaagttatagttgtcgctgtagacccggatggaaaccgagacatggcattcctaacaaccagaaggatactgtgtgtgaagatatgacattctccacctggacgccccccccaggggtgcactcacagacactgtcgagattttttgacaaagtacaagacctcgggagggattacaaaccgggactcgctaacaacaccatccagtcgatactccaggctttggatgaactgctggaagccccaggagatctagaaaccctccccagattacagcagcactgcgtggcttcacatcttctggacggactggaagacgtgctgagaggactttcaaagaatttgagtaacggattattaaatttctcttaccccgctggtacagagctgtcccttgaggttcaaaagcaggttgacaggagcgtcactctgaggcagaaccaggctgtgatgcagctggattggaaccaagctcaaaagagtggcgatccaggaccatcagtcgtggggctcgtgtccattcccgggatgggtaagcttctcgctgaggcccccctggttctggagccagagaagcagatgttgcttcacgagacccaccagggcctgttacaggatggctcccccatcctcctttcggatgtgatcagcgctttcctgtctaataacgatactcaaaacctgtcctcccctgtgacatttactttttcccaccgtagtgtaattcctagacaaaaggtcttgtgtgtcttttgggagcacggccaaaacgggtgcggacattgggccactacagggtgctcaactattggcactagagatacaagtacgatttgcagatgtactcacctgtcgtcttttgctgtactaatggcacactatgatgtgcaagaggaggacccagtgctgactgtgattacctacatggggttaagcgttagccttctttgtctcctgctcgcagcacttacttttcttctctgtaaagctatacagaatacgagcacgtctcttcacttacaactcagcctgtgcttgttcctcgctcacctgctgttccttgtcgccatcgaccagaccggccataaggtcctgtgttccattatcgcagggaccctacactatttgtatctggccaccttaacttggatgttattggaagctctctatcttttcctcacagcccgcaacctcactgttgtaaattattcatcgatcaaccgattcatgaagaaactcatgtttcccgtgggttatggcgtccccgctgtcacggtggccatcagtgcagcgagtaggccccacctctatggcacccccagcagatgctggctgcagccagaaaaagggttcatctggggctttctgggccctgtgtgtgcgatatttagcgttaatttggttctcttcttggtcactctatggatactcaagaaccggctctcctcattaaatagcgaagtctcaacgttgcgtaatacgcgcatgctagcatttaaggcgaccgcgcaattattcatcctcggctgcacctggtgcctcgggatcctccaggtcggcccagctgccagggtgatggcttatctgttcacaatcattaacagcctccagggggtcttcattttcttggtgtactgcctgcttagccagcaggtgcgggagcaatacgggaaatggagcaagggaatccgcaagctgaagactgagagtgagatgcacactctgtcaagctccgcaaaagcagacacctctaaacccagtaccgtcaattag

SEQ ID NO: 320525 - DNA, 2046 bp, Artificial Sequence
  derived and/or modified sequence
atgggcggccgggtcttcctggtgttcctggccttctgtgtgtggctgaccctgcctggagctgagacccaggacagccggggctgtgcccgctggtgcccccaggacagcagctgtgtgaatgccacagcctgccgctgcaaccctggcttcagcagcttcagcgagatcatcaccacccccatggagacctgtgatgacatcaatgaatgtgccaccctgagcaaggtgtcctgtgggaagttcagtgactgctggaacacagagggcagctatgactgtgtgtgcagccctggctatgagcctgtgtctggggccaagaccttcaagaatgaaagtgagaacacctgccaggacatgaccttcagcacctggaccccacctcctggggtgcacagccagaccctgagccgcttctttgacaaggtgcaggacctgggccgggactacaagccaggcctggccaacaacaccatccagagcatcctgcaggccctggatgagctgctggaggcccctggggacctggagaccctgccccggctgcagcagcactgtgtggccagccacctgctggatggcctggaggatgtgctgcggggcctgagcaagaacctgagcaatggcctgctgaacttctcctacccagctggaacagagctgagcctggaggtgcagaagcaggtggacagatctgtgaccctgcggcagaaccaggccgtgatgcagctggactggaaccaggcccagaagagcggggaccccggccccagcgtggtgggcctggtgtccatccctggcatgggcaagctgctggccgaggcccccctggtgctggagcctgagaagcagatgctgctgcacgagacccaccagggcctgctgcaggacggcagccccatcctgctgagtgatgtgatcagcgccttcctgagcaacaatgacacccagaacctgagcagccctgtgaccttcaccttcagccacaggagcgtcatcccccggcagaaggtgctgtgtgtgttctgggagcacggccagaatggctgcggccactgggccaccaccggctgcagcaccatcggcacccgggacaccagcaccatctgccgctgcacccacctgagcagctttgctgtgctgatggcccactatgatgtgcaggaggaggaccctgtgctgaccgtcatcacctacatgggcctgtctgtgtccctgctgtgcctgctgctggccgccctgaccttcctgctgtgcaaggccatccagaacaccagcaccagcctgcacctgcagctgagcctgtgcctcttcctggcccacctgctcttcctggtggccatcgaccagacaggccacaaggtgctgtgcagcatcatcgccggcaccctgcactacctgtacctggccaccctgacctggatgctgctggaggccctgtacctgttcctgacagccaggaacctgactgtggtgaactacagcagcatcaaccgcttcatgaagaagctgatgtttcctgtgggctacggcgtgcctgctgtgacagtggccatctctgctgccagccggccccacctgtatggcacccccagccgctgctggctgcagcctgagaagggcttcatctggggcttcctgggccctgtgtgtgccatcttctctgtgaacctggtgctcttcctggtgaccctgtggatcctgaagaaccggctgagcagcctgaacagcgaggtgtccaccctgaggaacaccaggatgctggccttcaaggccacagcccagctgttcatcctgggctgcacctggtgcctgggcatcctgcaggtgggccctgctgcccgggtgatggcctacctgttcaccatcatcaacagcctgcagggcgtcttcatcttcctggtgtactgcctgctgagccagcaggtgcgggagcagtatggcaagtggagcaagggcatcaggaagctgaagacagaaagtgagatgcacaccctgagcagcagcgccaaggctgacaccagcaagcccagcacagtgaactag

SEQ ID NO: 320526 - DNA, 2193 bp, Artificial Sequence
  derived and/or modified sequence
atgggcggccgggtcttcctggtgttcctggccttctgtgtgtggctgaccctgcctggagctgagacccaggacagccggggctgtgcccgctggtgcccccaggacagcagctgtgtgaatgccacagcctgccgctgcaaccctggcttcagcagcttcagcgagatcatcaccacccccatggagacctgtgatgacatcaatgaatgtgccaccctgagcaaggtgtcctgtgggaagttcagtgactgctggaacacagagggcagctatgactgtgtgtgcagccctggctatgagcctgtgtctggggccaagaccttcaagaatgaaagtgagaacacctgccaggatgtggatgagtgcagcagcggccagcaccagtgtgacagcagcacagtgtgcttcaacacagtgggcagctacagctgccgctgcaggcctggctggaagcccaggcatggcatccccaacaaccagaaggacacagtgtgtgaggacatgaccttcagcacctggaccccacctcctggggtgcacagccagaccctgagccgcttctttgacaaggtgcaggacctgggccgggactacaagccaggcctggccaacaacaccatccagagcatcctgcaggccctggatgagctgctggaggcccctggggacctggagaccctgccccggctgcagcagcactgtgtggccagccacctgctggatggcctggaggatgtgctgcggggcctgagcaagaacctgagcaatggcctgctgaacttctcctacccagctggaacagagctgagcctggaggtgcagaagcaggtggacagatctgtgaccctgcggcagaaccaggccgtgatgcagctggactggaaccaggcccagaagagcggggaccccggccccagcgtggtgggcctggtgtccatccctggcatgggcaagctgctggccgaggcccccctggtgctggagcctgagaagcagatgctgctgcacgagacccaccagggcctgctgcaggacggcagccccatcctgctgagtgatgtgatcagcgccttcctgagcaacaatgacacccagaacctgagcagccctgtgaccttcaccttcagccacaggagcgtcatcccccggcagaaggtgctgtgtgtgttctgggagcacggccagaatggctgcggccactgggccaccaccggctgcagcaccatcggcacccgggacaccagcaccatctgccgctgcacccacctgagcagctttgctgtgctgatggcccactatgatgtgcaggaggaggaccctgtgctgaccgtcatcacctacatgggcctgtctgtgtccctgctgtgcctgctgctggccgccctgaccttcctgctgtgcaaggccatccagaacaccagcaccagcctgcacctgcagctgagcctgtgcctcttcctggcccacctgctcttcctggtggccatcgaccagacaggccacaaggtgctgtgcagcatcatcgccggcaccctgcactacctgtacctggccaccctgacctggatgctgctggaggccctgtacctgttcctgacagccaggaacctgactgtggtgaactacagcagcatcaaccgcttcatgaagaagctgatgtttcctgtgggctatggagtgcctgctgtgacagtggccatctctgctgccagccggccccacctgtatggcacccccagccgctgctggctgcagcctgagaagggcttcatctggggcttcctgggccctgtgtgtgccatcttctctgtgaacctggtgctcttcctggtgaccctgtggatcctgaagaaccggctgagcagcctgaacagcgaggtgtccaccctgaggaacaccaggatgctggccttcaaggccacagcccagctgttcatcctgggctgcacctggtgcctgggcatcctgcaggtgggccctgctgcccgggtgatggcctacctgttcaccatcatcaacagcctgcagggcgtcttcatcttcctggtgtactgcctgctgagccagcaggtgcgggagcagtatggcaagtggagcaagggcatcaggaagctgaagacagagagcgagatgcacaccctgagcagcagcgccaaggctgacaccagcaagcccagcacagtgaactag

SEQ ID NO: 320527 - DNA, 2046 bp, Artificial Sequence
  derived and/or modified sequence
atgggcggccgggtgttcctggtgttcctggccttctgcgtgtggctcacccttccgggagccgaaacgcaagactcccgtgggtgcgcaagatggtgccctcaggacagctcttgcgttaatgccacagcgtgccggtgcaatcccggcttttcttcatttagcgaaatcatcacaacccctatggagacctgcgacgatatcaatgaatgtgctactctgtccaaagtctcttgcgggaaattcagtgactgctggaataccgaagggtcatacgactgtgtctgctcccctggctacgagccagtgtcaggagcaaaaacctttaaaaacgaatccgagaatacttgtcaggacatgaccttctcgacatggacacctccaccaggcgtacattcacagaccctcagcaggttttttgataaggtccaggatctcggtagagattacaagcccgggctagctaataatactattcaaagcattttacaagcgttagacgaactgctcgaggccccaggcgatctggagacactgccaaggctgcagcagcattgcgtagcttctcacctccttgatggtctggaggatgtgctgcgtggtctctccaaaaacctgtccaatggacttttgaattttagctatcctgctggtactgaactgtcccttgaggtccagaaacaggttgatcggtctgtgaccctgagacagaatcaggcagtgatgcagttagactggaaccaggctcaaaagagcggcgatcctggaccgtccgttgtgggcctggtgtcaatcccggggatgggaaaattactggcagaagccccacttgtcctggaacctgagaaacagatgttgctccacgaaactcaccagggattactgcaggatggctcgccgatactgctttccgatgtcataagtgcctttctgtccaacaacgatactcagaacctgagttcgcctgtcacatttaccttctcacaccggtcagtcatccctaggcaaaaggtcctgtgtgtcttctgggagcacggtcaaaatgggtgcggtcactgggccacaactggatgctctaccattgggacccgtgacacatccactatctgccgctgtactcacttatcgagtttcgctgtgctgatggcccattacgacgttcaggaggaagatccagtgctgactgtgatcacgtacatgggcctctctgttagcctgctgtgccttctgctggccgcgctgacatttcttctgtgcaaggctatccagaatacatccacctccctgcacctccaactgagtctctgtctgtttttggctcatcttctgtttctggtggccatagatcaaaccggacacaaagtcctgtgtagcatcatagctggcactctgcactacctctatttggcgacattaacatggatgctgctcgaggctctatatctgtttctgaccgctcggaatctgaccgtagtcaactactcgtcaattaatagatttatgaaaaaattgatgttccccgtcggctatggcgtgccggctgtgacagtagccatatctgcagcaagcaggccacatctttacgggacccctagcaggtgttggctgcagcccgagaagggcttcatttggggtttcctggggccggtgtgtgcaatatttagcgttaaccttgtactgttcctggtaacgctgtggatcctcaaaaatcgcctttcttcacttaatagtgaagtctcgactctcagaaatacacgaatgctagcttttaaggccactgcccagctgttcatcctcgggtgcacctggtgcctgggcatcctgcaggtggggccggcggccagggttatggcctacctcttcacaatcataaacagcttgcaaggcgttttcattttcttagtgtactgtctactgtctcagcaagtaagggagcagtacggcaagtggagcaagggaattcggaagttgaagaccgagtcagagatgcacacgctctcctcctccgccaaagctgatacctcaaagccttcaactgtgaactag

SEQ ID NO: 320528 - DNA, 2193 bp, Artificial Sequence
  derived and/or modified sequence
atgggcggccgggtgttcctggtgttcctggccttctgcgtgtggttgacactgccaggggccgagacccaggattcccgggggtgtgcccggtggtgtccacaagactctagctgtgtgaatgctactgcctgtcggtgtaatcccggcttttcttctttctccgagataattactacaccaatggagacttgcgacgatatcaatgaatgtgccacactgtctaaggtcagctgcgggaaattcagcgactgttggaacaccgaaggcagctacgactgcgtgtgcagtcccgggtacgaacctgtatcgggcgccaaaacatttaagaatgagtctgagaacacatgtcaagatgtggatgagtgttcttccggacagcatcagtgtgatagttctacagtctgcttcaatactgtgggatcctactcatgtcgctgtcgacctggctggaaacctcggcacggtatccctaataatcaaaaggacactgtgtgtgaggacatgacattctccacctggaccccccctccgggagtacactctcagaccctttcccgcttcttcgacaaggtgcaggatctcgggcgtgattacaagccgggtctagctaataatactatccaatccatacttcaggctctggacgaacttctcgaggcgccgggggatctggaaaccctgccgaggctgcagcagcactgcgtagcgtcccatttattggacggactggaagacgtcttgcgaggactgtctaaaaatttgtccaatgggctgctcaacttttcgtaccccgccggtaccgagctcagcctagaagtccagaagcaggtggatcgcagtgtaacccttaggcagaaccaggccgtcatgcagctggattggaaccaggcccaaaagagcggggaccccggaccctctgttgttgggctcgtgagtattcctggcatgggtaaactgctggccgaggctcctctggtgcttgagcctgagaagcagatgctcctgcacgaaactcaccagggtcttctgcaggatggtagcccgattctgctttccgacgtgatatcagccttcttatctaacaacgacacgcaaaacctaagcagtcccgttacctttacatttagccatcggtccgtcatcccacgacaaaaggtgctgtgcgtgttctgggagcacggacagaatgggtgcggacactgggccacgaccggatgctccacgatcggcactagagatacctctaccatttgtcgctgtactcacctgagttcgttcgccgttctgatggcgcattacgacgttcaagaagaggatccagtgctcaccgttatcacgtacatgggcctctcggtctccttattatgtctgttgttggccgccctgacatttctgctatgtaaagccatccagaacacttctacatcattacacctgcagctgtccctatgccttttcctggctcaccttctatttctggtggctattgaccagaccggccataaagtcttgtgctccataatcgccggcactctgcactacctgtaccttgccactttgacctggatgctattggaagccctgtacctgttcctcacagctcggaacctaacggttgtgaattactccagcatcaacagatttatgaaaaaattgatgttcccagttggatacggtgttcccgcagtgaccgtggctatttccgctgcctcaagacctcacttatatggcacgccttctcgctgttggctccagcccgagaaggggttcatctggggatttttggggcccgtctgtgcaatcttttcagttaacttagtacttttcctcgtgactctttggatccttaagaatagattgagttctcttaatagtgaagtgtctaccctgcgaaatacacgaatgttggcctttaaggccaccgcccagctatttatcctggggtgcacctggtgtcttggtatacttcaggtaggacccgctgcacgcgtgatggcttatctctttacaattattaactccctgcagggagtgttcatttttctcgtgtactgcctgctcagccaacaggtgcgggaacagtacggaaaatggtcgaagggtattaggaagctaaagactgagagcgaaatgcacaccctgagttcatctgccaaagccgacacctccaaaccgagtacagtgaattag

SEQ ID NO: 320529 - DNA, 2046 bp, Artificial Sequence
  derived and/or modified sequence
atggggggaagagtgtttctagtctttctcgcgttctgtgtatggttgaccctacccggtgccgagactcaggactcgagaggctgcgccagatggtgtcctcaggactctagctgcgttaacgccaccgcttgcaggtgcaatccgggattttcaagttttagcgaaatcattaccactccaatggaaacgtgtgacgatatcaacgaatgtgcaactctctctaaagtaagctgtggaaagttttctgattgctggaacacagaaggctcttacgactgtgtctgctccccagggtatgaaccggtgtcgggcgctaagactttcaaaaacgaaagcgaaaatacctgtcaggacatgaccttctccacttggacacctcccccaggcgtgcacagtcagacacttagccgattctttgacaaagtacaggatctcggcagagactacaagccaggcctagccaacaatacgatccagtcaatcctacaagctttggatgaacttctggaggcacccggagatctcgaaaccctgccccgtctgcagcagcactgtgttgcttcacacctcttggatggactggaagacgtactacggggactgtcaaagaatttatcaaacggcctgctgaatttcagctaccccgcaggaaccgagttgtctcttgaagtgcaaaaacaggtcgaccgatctgtgaccctgcgccagaatcaagctgtgatgcaattggattggaaccaggcccagaaaagcggtgaccctggaccttcggtcgtgggactcgtaagcattcccggtatgggtaaattgctcgcagaagccccacttgtgttagagcctgagaaacagatgttgctccacgagacccatcagggactcctgcaggatggctcgccaattctgctctctgatgtgatctctgccttcttaagtaataacgatacacagaacctttcttctccggtgacatttaccttctcccaccggtcagtcatcccccgtcagaaggtgctttgcgtgttttgggagcatggtcagaacgggtgcggacactgggctactacaggatgctccacaatagggacaagggatacctctacaatctgccgatgcacccatctgtccagcttcgccgtgcttatggcacactatgatgtgcaggaggaggatccagtgttgacggtcatcacttacatgggactgagtgtgagcctattgtgcctcctcctggcggctctcacgttcttgttatgtaaagcaatccaaaacacttcaacaagccttcatctgcaactgtccctgtgcttgttcctggcccaccttctgttcctcgttgccatcgaccaaacaggtcacaaggtactgtgttctattattgccggtactctgcattacctctacctggccacattgacctggatgcttctcgaggcattatatctattcctgacagccagaaacctcaccgtcgttaattattccagcattaatcgctttatgaaaaagttgatgtttcctgttggatatggcgtgcccgctgtgactgttgccattagcgccgcatcccggccacacctttacggcacacccagccgctgctggctgcagccggaaaaggggttcatatggggattcctaggaccggtctgcgccatcttttctgtgaacttggtcctcttcctggtcaccctatggatcctgaaaaaccgactatcgtccctgaatagcgaagtgagcacactacggaataccaggatgttggctttcaaggctaccgcgcagttgttcattctgggatgcacttggtgcctggggatcctccaggtgggcccagctgccagggttatggcttacctgttcactataatcaattccttgcagggagtcttcatatttctcgtgtattgtctcctgtcacaacaggtaagggagcagtacggcaagtggtccaaagggattcgcaagctcaaaaccgagtctgagatgcacacactgtcgtcctccgcaaaagccgacaccagcaaaccatccaccgtcaattag

SEQ ID NO: 320530 - DNA, 2193 bp, Artificial Sequence
  derived and/or modified sequence
atggggggacgtgtatttcttgtgttcctggccttctgtgtatggttgaccctgcccggagctgaaacccaggattcccgtggctgtgcacgatggtgcccgcaggattcaagttgcgtcaacgctacggcgtgccggtgtaatcctggattttcctccttctccgagattataacgacacctatggaaacttgcgacgacatcaacgagtgcgccacactgtctaaggttagctgtggtaaattcagtgattgctggaacacagaagggtcctatgattgcgtctgctctcctggctacgaacctgtgtctggcgcaaaaacctttaaaaatgagtcagagaatacctgtcaggacgtggacgagtgctccagcgggcaacaccagtgcgactccagcacggtgtgcttcaatacggttggaagctacagctgtcgttgtagaccagggtggaaacctcgtcacgggatccccaataatcaaaaggacactgtatgcgaggatatgaccttcagcacatggaccccaccacccggtgtgcacagccagacactgtccaggttcttcgacaaggtgcaggatctgggacgtgattacaaacctggtctcgccaacaacaccatccagagcattctccaggccctggacgagctcctggaagcacccggagatcttgaaactctgcccagactgcaacaacactgtgtcgccagtcacctgctggacgggcttgaagatgttctgcgtggcttatccaagaatctaagcaatgggcttctgaatttctcttatcctgcaggcaccgagctctctctggaagtccagaaacaagtcgatcgtagtgtgactctgcggcaaaaccaggctgtcatgcagttggactggaatcaggcgcagaaaagcggagatccagggcctagtgtggtggggttagtcagtatccccggaatgggtaaactgctcgctgaggcccctctggtacttgagccagagaaacagatgctattacacgagacacatcaagggctcctgcaggacggctctcccatccttctgtctgacgtcatcagcgcttttctatcgaataacgacacacaaaatttgtcctcgcccgttactttcacttttagccatagatccgtgattccacgtcaaaaagtgctttgtgttttttgggaacatgggcagaacggttgcggccattgggcgacgacaggatgtagtaccatcggcaccagggatacatctactatctgccgttgtacacacttatcctcgttcgccgttcttatggcccactatgacgtgcaggaggaggatcccgttttaactgtcattacctacatgggactgtccgttagtctactgtgcctgcttctggcggcattgaccttcctcctgtgtaaagcaattcaaaatacctcaaccagtctgcatttgcaactctctttgtgtctgttcctcgctcacctactcttcctcgtcgctattgatcaaaccgggcacaaagtgctttgttctatcatcgctggaacccttcactatctgtaccttgctaccctgacatggatgctgctcgaagcactttacctcttccttacagccagaaatttaacagtggtgaattactcgtcaattaatcgattcatgaagaaactcatgttcccagtgggatacggggtaccggcagttaccgtcgcgatcagtgcagcctccagaccacacctatatggaactccaagcaggtgctggcttcaacctgagaaggggtttatttggggattcttgggacccgtttgcgcaatattctcagtcaaccttgtgctgttcctggttacactctggattttgaagaatcgactgagctctctgaactccgaagtgtctacccttcgtaacacacgaatgttggctttcaaggctacagctcaactgtttattctgggttgcacgtggtgtcttggaattttacaagtgggccctgccgcaagagtaatggcttacttatttactatcatcaatagcctacagggcgtctttatatttttggtgtattgtctgctgagtcagcaagtgcgcgagcaatacggaaagtggtcaaagggaattcgaaagctgaagacagaatccgagatgcatacactctctagttccgctaaagcagatacctccaaaccctcaactgtgaattag

SEQ ID NO: 320531 - DNA, 678 bp, Artificial Sequence
  derived and/or modified sequence
atgaccttcagcacctggacccccccccccggcgtgcacagccagaccctgagcagattcttcgacaaggtgcaggacctgggcagagactacaagcccggcctggccaacaacaccatccagagcatcctgcaggccctggacgagctgctggaggcccccggcgacctggagaccctgcccagactgcagcagcactgcgtggccagccacctgctggacggcctggaggacgtgctgagaggcctgagcaagaacctgagcaacggcctgctgaacttcagctaccccgccggcaccgagctgagcctggaggtgcagaagcaggtggacagaagcgtgaccctgagacagaaccaggccgtgatgcagctggactggaaccaggcccagaagagcggcgaccccgtgagcgaccccgagaccgagggcgccctgtgcctgctgggcgcctggcccgagtggatgtggagcctgggccaccacagactgcagcacaacagacaccagagacaccagcaccacctgcccctgcacccccccgagcagctgtgcagaccccacggccccctgagatgcgccggcggcggcagcagagccgactgccaccacctgcacggcgccgagagactgagcgccgtgcccccccccggcggcccccacttcagccccgtgtag

SEQ ID NO: 320532 - DNA, 678 bp, Artificial Sequence
  derived and/or modified sequence
atgactttttctacttggaccccccctccaggggtgcattcccagacactctccaggttctttgataaggtccaggatttgggacgggattataaacctggcctggcaaataatacaatccagtctatactccaggccctggatgagttgctggaagctccgggcgacctcgagactctgccaagactgcagcagcactgtgtggcaagtcatcttctcgacggcctggaagacgtcctgagaggactgtcaaagaacttaagcaacggcctgctcaatttttcttaccctgccggcacagagttaagcttggaggtccagaagcaggtcgataggagtgtgaccctgcgccagaatcaggctgtcatgcagcttgactggaatcaggcacagaagagtggggatccagtaagtgatccagagaccgaaggagcactttgcctactcggggcctggcctgagtggatgtggtcgctgggtcaccacaggctacagcacaataggcatcaacggcatcagcaccacctgcctctgcacccgccggagcagctgtgtcgacctcacggtcccctccggtgtgcaggaggcggttcacgtgcggactgtcatcatttgcatggtgcagagcgcctcagtgcagtgcccccccccggggggcctcacttcagtcccgtctag

SEQ ID NO: 320533 - DNA, 678 bp, Artificial Sequence
  derived and/or modified sequence
atgaccttcagcacctggaccccacctcctggggtgcacagccagaccctgagccgcttctttgacaaggtgcaggacctgggccgggactacaagccaggcctggccaacaacaccatccagagcatcctgcaggccctggatgagctgctggaggcccctggggacctggagaccctgccccggctgcagcagcactgtgtggccagccacctgctggatggcctggaggatgtgctgcggggcctgagcaagaacctgagcaatggcctgctgaacttctcctacccagctggaacagagctgagcctggaggtgcagaagcaggtggacagatctgtgaccctgcggcagaaccaggccgtgatgcagctggactggaaccaggcccagaagagcggggaccctgtgtctgaccctgagacagagggcgccctgtgcctgctgggcgcctggccagagtggatgtggagcctgggccaccaccggctgcagcacaacagacaccagaggcaccagcaccacctgcccctgcaccccccagagcagctgtgccggccccacggccccctgcgctgtgccggcggcggcagcagagctgactgccaccacctgcacggggctgagcggctgtctgctgtgcccccacctgggggcccccacttcagccctgtgtag

SEQ ID NO: 320534 - DNA, 678 bp, Artificial Sequence
  derived and/or modified sequence
atgaccttcagcacctggacccccccccccggcgtgcacagccagacgttgtcccggttcttcgacaaagtccaagacttaggaagggattataaaccaggcctcgcaaataatacaattcagagtattctgcaggccctggacgaactgctcgaagcacccggcgatttggaaactctcccccgcttgcagcagcattgcgtggcttctcatctgttagatggactggaggacgttcttcgtggactctccaagaacttaagcaacgggctcctgaacttctcctatcccgctggcaccgaactgtctttggaagtacagaaacaggtcgataggagcgtgacactgaggcaaaatcaggccgtgatgcagctggattggaaccaagcccagaagtctggcgaccccgtctcagaccctgaaactgaaggagccctttgtctgttaggggcgtggccagagtggatgtggagcctcggacaccatcgattgcagcacaaccgccatcagcggcaccagcaccacctgccattgcatccccccgagcagctgtgcagaccacacgggcctctacgatgcgcggggggcggttccagagccgactgccaccacctccacggtgccgagagactctccgccgtgccccccccagggggcccacactttagccccgtctag

SEQ ID NO: 320535 - DNA, 678 bp, Artificial Sequence
  derived and/or modified sequence
atgacattctcaacctggaccccaccacccggagtgcatagtcaaacactaagtaggtttttcgacaaggttcaagatctcgggagagactataaacccggactggcaaacaatacaatacagtcaatcctccaggcactggatgagttgctcgaggctccgggtgatctggaaacacttcctcgcctgcagcagcactgtgtggcttctcacctcctggatggtctggaagacgtactgagaggcctgtccaagaacctttccaacggtctgttgaacttcagttaccccgctgggaccgagttatccttagaagtacagaagcaggtcgacaggtccgtgaccctgagacagaaccaggctgtgatgcaacttgattggaaccaggcccaaaaatctggagacccagtgagcgacccagagactgagggcgctctgtgtctgctgggcgcatggccagagtggatgtggagcctaggacaccatcgtctgcagcacaataggcaccagagacatcaacatcatttgcccctgcacccccctgagcagctttgccggcctcacggcccattgcgatgtgcgggaggtggctctcgcgctgactgtcaccatctgcacggagccgaacgtctgtcagcagtaccccctccaggagggccacacttctcaccagtgtag

SEQ ID NO: 320536 - protein, 131 aa, Artificial Sequence
  derived and/or modified sequence
MGGDGRYVLNGHWVVSPPGTYEAAGTHVVYTRDTGPQETLQAAGPTSHDLLLQVLLQEPNPGIEFEFWLPRERYSPFQARVQALGWPLRQPQPRGVEPQPPAAPAVTPAQTPTLAPGPSAGPPPPGPGDPL

SEQ ID NO: 320537 - DNA, 396 bp, Artificial Sequence
  derived and/or modified sequence
atggggggtgacggaaggtacgtccttaatggccattgggtggtgtcccccccaggaacatacgaggcagccggtacgcacgtggtctacacccgcgatacgggacctcaggagacactgcaggcagctggtcctacgagtcacgacctattgttacaagtcctcttacaagaaccgaaccccggtattgagtttgagttttggctaccgagagagcggtactctcccttccaagccagggttcaagcgcttggttggcccctgcggcagccccagccccgtggcgtggagccacagccccctgccgctccagccgtgactcccgctcaaactccaactctggctcctgggccaagcgctgggccacctcctcctggacccggtgatccactttag

SEQ ID NO: 320538 - DNA, 396 bp, Artificial Sequence
  derived and/or modified sequence
atgggaggtgatggccgatacgttttgaacggacactgggtcgtttccccacctggaacttacgaagctgccggcacccacgtggtctacactagggacacgggcccccaggagacgctgcaggctgctggtcctacctcacatgatttactccttcaggtcctgcttcaggaaccgaatcccggaatcgaatttgaattttggttgccacgagagagatatagcccattccaagcccgggtgcaggctctgggatggcccctgcgacaacctcagccacgcggagtagaaccccagccccctgcagctcctgcggttacccccgcacagacccccacgctcgctccagggccctcagccggaccaccaccacctggtccaggagatcccctgtag

SEQ ID NO: 320539 - DNA, 396 bp, Artificial Sequence
  derived and/or modified sequence
atgggaggtgatggccgatacgttttgaacggacactgggtcgtttccccacctggaacttacgaagctgccggcacccacgtggtctacactagggacacgggcccccaggagacgctgcaggctgctggtcctacctcacatgatttactccttcaggtcctgcttcaggaaccgaatcccggaatcgaatttgaattttggttgccacgagagagatatagcccattccaagcccgggtgcaggctctgggatggcccctgcgacaacctcagccacgcggagtagaaccccagccccccgccgctccagccgttacgcccgcccaaacccccaccttagcacccggcccaagtgccggccccccaccacctggcccaggagaccccttatag

SEQ ID NO: 320540 - DNA, 396 bp, Artificial Sequence
  derived and/or modified sequence
atgggcggcgacggcagatacgtgctgaacggccactgggtggtgagcccccccggcacctacgaggccgccggcacccacgtggtgtacaccagagacaccggcccccaggagaccctgcaggccgccggccccaccagccacgacctgctgctgcaggtgctgctgcaggagcccaaccccggcatcgagttcgagttctggctgcccagagagagatacagccccttccaggccagagtgcaggccctgggctggcccctgagacagccccagcccagaggcgtggagccccagccccccgccgcccccgccgtgacccccgcccagacccccaccctggcccccggccccagcgccggcccccccccccccggccccggcgaccccctgtag

SEQ ID NO: 320541 - DNA, 396 bp, Artificial Sequence
  derived and/or modified sequence
atgggcggcgacggacgttacgtgcttaacggacactgggtggtaagtcctcccgggacttacgaagctgctggcactcacgtggtgtacacacgggataccggcccacaggagaccctgcaagccgcgggcccgaccagccatgacctgctgctgcaggtcctgctccaggaacccaatccagggatcgagttcgagttctggttacctcgcgagagatactccccttttcaggcgagagtgcaggcattgggttggcctctgcgccagcctcaacccagaggggtggagccgcagccccccgcggcgcccgccgtcacaccagctcagacacctactctcgctcccggaccatccgccggccctccgccaccaggaccaggggaccccttatag

SEQ ID NO: 320542 - DNA, 396 bp, Artificial Sequence
  derived and/or modified sequence
atgggaggagatggccgctacgtgctgaatggccactgggtggtgtccccacctggcacctatgaagctgctggcacccacgtggtgtacacccgggacaccggcccccaggagaccctgcaggccgccggccccaccagccatgacctgctgctgcaggtgctgctgcaggagcccaaccctggcattgaatttgagttctggctgccccgggagcgctacagccccttccaggcccgggtgcaggccctgggctggcccctgcggcagccccagccccggggcgtggagccccagcccccagctgccccagctgtgaccccagcccagacccccaccctggcccctggccccagcgctggccccccacctcctggccctggggaccccctgtag

SEQ ID NO: 320543 - DNA, 396 bp, Artificial Sequence
  derived and/or modified sequence
atgggcggcgacggccggtacgtgctgaacggccactgggtggtgtccccccctggcacgtacgaggctgcaggcactcatgtggtatacacccgagatactggtcctcaagaaacactgcaggccgcgggacccaccagtcacgacctgctgttgcaggtcttgctgcaagagcctaacccaggcattgagtttgagttttggctgccacgcgaacggtactccccttttcaggcccgggttcaggctttaggctggcctctcaggcagcctcagcccagaggagtggaaccccaacctccagccgcacccgctgtgacccctgctcagacccccaccttggctcccgggcccagcgccggaccccccccacccggccccggcgatcccttgtag

SEQ ID NO: 320544 - RNA, 396 nt, Artificial Sequence
  derived and/or modified sequence
augggaggugauggccgauacguuuugaacggacacugggucguuuccccaccuggaacuuacgaagcugccggcacccacguggucuacacuagggacacgggcccccaggagacgcugcaggcugcugguccuaccucacaugauuuacuccuucagguccugcuucaggaaccgaaucccggaaucgaauuugaauuuugguugccacgagagagauauagcccauuccaagcccgggugcaggcucugggauggccccugcgacaaccucagccacgcggaguagaaccccagcccccugcagcuccugcgguuacccccgcacagacccccacgcucgcuccagggcccucagccggaccaccaccaccugguccaggagauccccuguag

SEQ ID NO: 320545 - RNA, 396 nt, Artificial Sequence
  derived and/or modified sequence
augggaggugauggccgauacguuuugaacggacacugggucguuuccccaccuggaacuuacgaagcugccggcacccacguggucuacacuagggacacgggcccccaggagacgcugcaggcugcugguccuaccucacaugauuuacuccuucagguccugcuucaggaaccgaaucccggaaucgaauuugaauuuugguugccacgagagagauauagcccauuccaagcccgggugcaggcucugggauggccccugcgacaaccucagccacgcggaguagaaccccagccccccgccgcuccagccguuacgcccgcccaaacccccaccuuagcacccggcccaagugccggccccccaccaccuggcccaggagaccccuuauag

SEQ ID NO: 320546 - DNA, 1856 bp, Artificial Sequence
  derived and/or modified sequence
ggtggctgaacctcgcaggtggcagagaggctcccctggggctgtggggctctacgtggatccgatggagccgctggtgacctgggtggtccccctcctcttcctcttcctgctgtccaggcagggcgctgcctgcagaaccagtgagtgctgttttcaggacccgccatatccggatgcagactcaggctcggcctcgggccctagggacctgagatgctatcggatatccagtgatcgttacgagtgctcctggcagtatgagggtcccacagctggggtcagccacttcctgcggtgttgccttagctccgggcgctgctgctacttcgccgccggctcagccaccaggctgcagttctccgaccaggctggggtgtctgtgctgtacactgtcacactctgggtggaatcctgggccaggaaccagacagagaagtctcctgaggtgaccctgcagctctacaactcagttaaatatgagcctcctctgggagacatcaaggtgtccaagttggccgggcagctgcgtatggagtgggagaccccggataaccaggttggtgctgaggtgcagttccggcaccggacacccagcagcccatggaagttgggcgactgcggacctcaggatgatgatactgagtcctgcctctgccccctggagatgaatgtggcccaggaattccagctccgacgacggcagctggggagccaaggaagttcctggagcaagtggagcagccccgtgtgcgttccccctgaaaaccccccacagcctcaggtgagattctcggtggagcagctgggccaggatgggaggaggcggctgaccctgaaagagcagccaacccagctggagcttccagaaggctgtcaagggctggcgcctggcacggaggtcacttaccgactacagctccacatgctgtcctgcccgtgtaaggccaaggccaccaggaccctgcacctggggaagatgccctatctctcgggtgctgcctacaacgtggctgtcatctcctcgaaccaatttggtcctggcctgaaccagacgtggcacattcctgccgacacccacacagatggcatgatctcagctcactgcaacctccgccttccagattcaagagattctcctgcttcagcctcccgagtagctgggattacaggcatctgccaccatacccggctaattttgtatttttagtagagacggggtttcaccacgttggccaggctggtctcgaactcctgacctcaagtgatccacctgccttggcctcccaaagtgttgggattataggcgtgagccaccatgcccagcctaatttttgtatttttagtagagatggagtttcaccatgttgcccaggctggtctcaaactcctgccctcaggtgatccacccacctcagcctctcaaagtgctgggattacaggtgtgagccactgtggccgacctactatttttattatttttgagctaggttctcagtctgttggcagactggagtgcaatcatggctcactgcagccttgaactcccagactcaagtgatccttccacctcagcctctggagtagctgggactacagacatgcaccaccacacctggttaattttttatttttattttttgtagagacaggtgtctctctacgttgcccaggctggtctcgaactcctgggctcaagtgatccacccatctccacctcccaaagtgctaggattacaggcgtgagccaccgtacccagcctggtcccatatcatagtgaaatggtgcctgtaaagctctcagcattggcttggcacatgcagttggtactcaataaacggctgttgctatcccc

SEQ ID NO: 320547 - protein, 531 aa, Artificial Sequence
  derived and/or modified sequence
MEPTVADVHLVPRTTKEVPALDAACCRAASIGVVATSLVVLTLGVLLAFLSTQGFHVDHTAELRGIRWTSSLRRETSDYHRTLTPTLEALFVSSFQKTELEASCVGCSVLNYRDGNSSVLVHFQLHFLLRPLQTLSLGLEEELLQRGIRARLREHGISLAAYGTIVSAELTGRHKGPLAERDFKSGRCPGNSFSCGNSQCVTKVNPECDDQEDCSDGSDEAHCECGLQPAWRMAGRIVGGMEASPGEFPWQASLRENKEHFCGAAIINARWLVSAAHCFNEFQDPTKWVAYVGATYLSGSEASTVRAQVVQIVKHPLYNADTADFDVAVLELTSPLPFGRHIQPVCLPAATHIFPPSKKCLISGWGYLKEDFLVKPEVLQKATVELLDQALCASLYGHSLTDRMVCAGYLDGKVDSCQGDSGGPLVCEEPSGRFFLAGIVSWGIGCAEARRPGVYARVTRLRDWILEATTKASMPLAPTMAPAPAAPSTAWPTSPESPVVSTPTKSMQALSTVPLDWVTVPKLQGIFGAER

SEQ ID NO: 320548 - DNA, 1596 bp, Artificial Sequence
  derived and/or modified sequence
atggagcccaccgtggccgacgtgcacctggtgcccagaaccaccaaggaggtgcccgccctggacgccgcctgctgcagagccgccagcatcggcgtggtggccaccagcctggtggtgctgaccctgggcgtgctgctggccttcctgagcacccagggcttccacgtggaccacaccgccgagctgagaggcatcagatggaccagcagcctgagaagagagaccagcgactaccacagaaccctgacccccaccctggaggccctgttcgtgagcagcttccagaagaccgagctggaggccagctgcgtgggctgcagcgtgctgaactacagagacggcaacagcagcgtgctggtgcacttccagctgcacttcctgctgagacccctgcagaccctgagcctgggcctggaggaggagctgctgcagagaggcatcagagccagactgagagagcacggcatcagcctggccgcctacggcaccatcgtgagcgccgagctgaccggcagacacaagggccccctggccgagagagacttcaagagcggcagatgccccggcaacagcttcagctgcggcaacagccagtgcgtgaccaaggtgaaccccgagtgcgacgaccaggaggactgcagcgacggcagcgacgaggcccactgcgagtgcggcctgcagcccgcctggagaatggccggcagaatcgtgggcggcatggaggccagccccggcgagttcccctggcaggccagcctgagagagaacaaggagcacttctgcggcgccgccatcatcaacgccagatggctggtgagcgccgcccactgcttcaacgagttccaggaccccaccaagtgggtggcctacgtgggcgccacctacctgagcggcagcgaggccagcaccgtgagagcccaggtggtgcagatcgtgaagcaccccctgtacaacgccgacaccgccgacttcgacgtggccgtgctggagctgaccagccccctgcccttcggcagacacatccagcccgtgtgcctgcccgccgccacccacatcttcccccccagcaagaagtgcctgatcagcggctggggctacctgaaggaggacttcctggtgaagcccgaggtgctgcagaaggccaccgtggagctgctggaccaggccctgtgcgccagcctgtacggccacagcctgaccgacagaatggtgtgcgccggctacctggacggcaaggtggacagctgccagggcgacagcggcggccccctggtgtgcgaggagcccagcggcagattcttcctggccggcatcgtgagctggggcatcggctgcgccgaggccagaagacccggcgtgtacgccagagtgaccagactgagagactggatcctggaggccaccaccaaggccagcatgcccctggcccccaccatggcccccgcccccgccgcccccagcaccgcctggcccaccagccccgagagccccgtggtgagcacccccaccaagagcatgcaggccctgagcaccgtgcccctggactgggtgaccgtgcccaagctgcagggcatcttcggcgccgagagatag

SEQ ID NO: 320549 - DNA, 1596 bp, Artificial Sequence
  derived and/or modified sequence
atggaaccaaccgtggctgatgtgcacctggtgcctaggacgacaaaggaagtcccagcactagacgccgcctgttgtagagcagcctccatcggggtagtcgctacatccctagtcgttctgaccctaggagtactccttgcattcttgtcaactcagggatttcatgttgatcatactgcggaactcaggggcatccgctggacaagctcactgagacgagaaactagcgattaccacagaaccttaactcctacactcgaggccctctttgtgtcctctttccaaaagactgagctggaggccagctgcgtgggttgtagcgttctgaactaccgcgatggaaactccagcgttctcgtgcactttcaactgcattttcttttgaggcccttgcaaaccctttctttggggctggaagaggagctattgcagcggggcattcgggcgaggcttagagaacacggtatctctcttgctgcttatggaactatagtctctgctgaactcactgggaggcacaagggacccttggcagaaagagactttaagtccggcagatgtccgggtaattctttttcttgtgggaattcccagtgcgtgactaaggtgaaccccgagtgtgatgatcaagaagactgcagtgacggttcagatgaagcacattgcgaatgtggcttgcagcctgcatggcgcatggctgggcgaatcgtgggaggcatggaggcttcccccggggagtttccctggcaggccagtctgagggagaataaggagcatttctgcggcgccgctattatcaacgccagatggttagtgtcagctgcacattgtttcaacgaattccaggaccctactaaatgggtggcctacgtgggtgccacgtacctgtcaggctctgaggctagcactgtgcgggcgcaggtggtacagatcgtgaaacatcctctttacaatgctgatactgccgacttcgacgtagctgtgcttgagctaacatcccctttgccattcggccggcatattcagccagtctgcctgcctgctgccactcatatttttcccccttccaagaagtgcctaatctcagggtggggctacctgaaagaagacttcctcgtcaagcccgaggtgctccagaaggccactgtggaactgctcgatcaggcactatgcgcatcgctgtatggtcacagtctgacggaccgcatggtgtgcgcaggttatcttgatggcaaggtggactcttgtcagggcgactcaggagggccacttgtgtgtgaggagccctctggtcggtttttcctagccggcatcgtatcatggggcatcgggtgcgccgaagcgagaaggcctggcgtctacgcccgagtcaccagactgagagactggatcttggaggcaactactaaggcatcaatgccattggcccccacgatggctcccgctccggcagccccctccacagcatggcccaccagcccagagtcgccagttgtcagcacccccaccaagtctatgcaggccctgtccacggtgcccctggactgggtaactgtgcctaaattgcagggtatcttcggagcagagcggtag

SEQ ID NO: 320550 - DNA, 1596 bp, Artificial Sequence
  derived and/or modified sequence
atggagcccaccgtggctgatgtgcacctggtgcccaggaccaccaaggaggtgcctgccctggatgctgcctgctgccgggccgccagcattggagtggtggccaccagcctggtggtgctgaccctgggcgtgctgctggccttcctgagcacccagggcttccacgtggaccacacagctgagctgcggggcatccgctggaccagcagcctgcggcgggagaccagtgactaccacaggaccctgacccccaccctggaggccctgtttgtgagcagcttccagaagacagagctggaggccagctgtgtgggctgcagcgtgctgaactacagagatggcaacagctctgtgctggtgcacttccagctgcacttcctgctgcggcccctgcagaccctgagcctgggcctggaggaggagctgctgcagaggggcatccgggcccggctgcgggagcacggcatcagcctggccgcctacggcaccatcgtgtctgctgagctgaccggccgccacaagggccccctggccgagcgggacttcaagagcggccgctgccccggcaacagcttcagctgtggcaacagccagtgtgtgaccaaggtgaacccagaatgtgatgaccaggaggactgcagtgatggcagtgatgaggcccactgtgaatgtggcctgcagcctgcctggaggatggccggcagaattgtgggcggcatggaggccagccctggagagttcccctggcaggccagcctgcgggagaacaaggagcacttctgtggggccgccatcatcaatgcccgctggctggtgtctgctgcccactgcttcaatgagttccaggaccccaccaagtgggtggcctacgtgggcgccacctacctgagcggcagcgaggccagcacagtgcgggcccaggtggtgcagatcgtgaagcaccccctgtacaatgctgacacagctgactttgatgtggccgtgctggagctgaccagccccctgcccttcggccgccacatccagcctgtgtgcctgcctgctgccacccacatcttcccccccagcaagaagtgcctgatcagcggctggggctacctgaaggaggacttcctggtgaagccagaggtgctgcagaaggccaccgtggagctgctggaccaggccctgtgtgccagcctgtatggccacagcctgacagacaggatggtgtgtgccggctacctggatggcaaggtggacagctgccagggcgacagcggcggccccctggtgtgtgaggagcccagcggccgcttcttcctggccggcatcgtgtcctggggcatcggctgtgccgaggcccggcggcctggggtgtatgcccgggtgacccggctgcgggactggatcctggaggccaccaccaaggcctccatgcccctggcccccaccatggccccagccccagctgcccccagcacagcctggcccaccagccctgagagccctgtggtgtccacccccaccaagtccatgcaggccctgagcacagtgcccctggactgggtgacagtgcccaagctgcagggcatctttggagctgagaggtag

SEQ ID NO: 320551 - DNA, 1596 bp, Artificial Sequence
  derived and/or modified sequence
atggagcccaccgtggccgacgtgcacctggtgccccggaccaccaaagaagtccccgcactggacgcggcctgttgtcgcgctgcatccattggggtcgtggcaacatccttggtggtgttgacactgggagtcctgcttgcatttctaagcacccaagggttccatgtggaccataccgctgagctcaggggaatacgctggaccagtagcctgagacgcgagaccagcgactaccatcgaacgctcacacccacacttgaggccctattcgtctcctcgtttcagaagacagagttagaggctagttgtgtgggctgctcagtgctgaactaccgtgacggaaatagcagtgtgctggtacactttcaactacatttcctgttaaggccacttcagacgctttctctggggttagaggaagagctgttgcagcgagggataagagccagattgagggaacacggcatcagcctagccgcatacggtacgatcgtgagtgccgagctgaccggacggcataagggtcccctagccgagagggattttaaaagcggtcgctgccctggcaatagcttttcctgtggcaactcacagtgtgttacgaaggtgaacccagagtgtgacgaccaggaggattgtagtgatggatcggacgaggctcactgcgagtgtggtctccagccggcttggcggatggccggcagaatagtgggtggcatggaagcctccccaggcgagtttccctggcaagcttcactgagagaaaacaaagagcatttctgtggtgccgcaataattaacgccagatggcttgtgtcggctgcacactgtttcaacgagttccaggatcctacaaagtgggtcgcttacgtaggggccacatacctgagtggaagcgaggccagtaccgtgcgtgctcaagtggtacagatcgtcaaacacccgctgtacaatgcggatacagcggattttgatgtggcggttttggagttgacttcaccgctgcctttcggacggcatatacaaccagtctgcctgccagctgccacccatatcttccccccatcgaagaagtgcttaatctcggggtggggctatctgaaggaggactttttagtgaagccagaagtcttacagaaggcgacagtggaactgctggatcaagccctttgcgcttcattgtatgggcatagcctcacagaccgcatggtctgcgccggctatttggacggaaaagtcgattcatgccaaggcgacagcggggggccgttagtttgtgaagaacccagcggccggttctttctggccgggattgtttcgtggggcatcgggtgtgcagaggccagacgaccgggcgtgtatgcaagggtcacccgcctccgggactggatcctggaagccaccactaaagccagcatgcctctggctccgactatggctcccgcacctgccgctcccagcaccgcttggcccacatctccggaatcccccgtagtgtctacacccaccaaaagtatgcaagccctgtcaaccgtgcctctggattgggttactgtgcccaagctccagggcatctttggtgcagaaaggtag

SEQ ID NO: 320552 - DNA, 1596 bp, Artificial Sequence
  derived and/or modified sequence
atggagccaaccgtggcagacgtgcatctggtccctcggaccaccaaagaagttcctgcacttgatgcagcctgttgtagagcagcaagcataggagttgttgccaccagccttgtggttctgaccctgggtgtcctgctggcatttctttccacccaggggttccacgtggatcataccgcagagttgcgagggattcggtggacaagctccttgcggcgagagacgtcagactaccataggacactgactcccactctggaagccctgttcgtgagtagttttcaaaagacagagcttgaggccagctgcgtgggatgtagcgtgctgaattacagggatgggaactcgagtgtcctggttcacttccagctacatttccttctgcggcctctgcagactctttcactgggtcttgaagaggaactcctccagcgcggaatccgggcacgtctcagagaacacggcatctctctggcagcatacggcaccattgtttccgctgaacttaccgggaggcacaagggacccttggcagaacgagatttcaaaagtggtaggtgccccggtaattccttcagctgcggaaatagccagtgtgtgactaaagttaatcccgagtgtgacgatcaagaagattgcagcgacgggagtgatgaagcccattgcgaatgtggtctccagcccgcatggcggatggccggacgcatcgtgggtgggatggaggctagcccaggcgagttcccctggcaggcttcactaagagaaaacaaggaacacttttgcggcgctgccatcatcaacgctcggtggctggtcagcgcggctcactgttttaatgaatttcaggaccccacaaaatgggtggcctatgtaggagcaacttatctctcaggatcagaagcctctacagtgagagcacaggtggtgcaaatcgtcaaacaccctctgtataatgccgatacagcagatttcgacgtagctgtcttggagctgaccagccccctacccttcgggaggcatatccagcccgtctgtctgcctgcggcaacgcatatctttcccccttccaagaaatgcctgatatctggatggggctaccttaaagaggacttcctagtaaagccagaggtgctccagaaagcaacagttgagcttctcgatcaggccttgtgtgctagtctctacgggcactctctgacagacagaatggtgtgtgccggttacctcgacggtaaagtggattcttgccagggagacagtggagggcctctagtctgcgaagagccctctggtcgcttcttcctggctgggattgtttcttggggaatcggatgcgccgaggcacgtcgccctggagtctatgcgagggtaacgcgcctcagagactggattctggaggccacaaccaaagctagtatgcccctcgcaccgacgatggcacctgcacccgctgctccgtcgaccgcctggccaaccagcccggaatcaccagtcgtatccactcctaccaagtctatgcaagctcttagtaccgtgcccttagactgggttaccgtgccaaaattgcagggaatatttggagccgagaggtag

SEQ ID NO: 320553 - DNA, 1628 bp, Artificial Sequence
  derived and/or modified sequence
gcgtgtctctgagccatggagcccactgtggctgacgtacacctcgtgcccaggacaaccaaggaagtccccgctctggatgccgcgtgctgtcgagcggccagcattggcgtggtggccaccagccttgtcgtcctcaccctgggagtccttttggccttcctctctacacagggcttccacgtggaccacacggccgagctgcggggaatccggtggaccagcagtttgcggcgggagacctcggactatcaccgcacgctgacgcccaccctggaggcactgtttgtaagtagttttcagaagacagagttagaggcaagctgcgtgggttgctcggtactgaattatagggatgggaactccagtgtcctcgtacatttccagctgcactttctgctgcgacccctccagacgctgagcctgggcctggaggaggagctattgcagcgagggatccgggcaaggctgcgggagcacggcatctccctggctgcctatggcacaattgtgtcggctgagctcacagggagacataagggacccttggcagaaagagacttcaaatcaggccgctgtccagggaactccttttcctgcgggaacagccagtgtgtgaccaaggtgaacccggagtgtgacgaccaggaggactgctccgatgggtccgacgaggcgcactgcgagtgtggcttgcagcctgcctggaggatggccggcaggatcgtgggcggcatggaagcatccccgggggagtttccgtggcaagccagccttcgagagaacaaggagcacttctgtggggccgccatcatcaacgccaggtggctggtgtctgctgctcactgcttcaatgagttccaagacccgacgaagtgggtggcctacgtgggtgcgacctacctcagcggctcggaggccagcaccgtgcgggcccaggtggtccagatcgtcaagcaccccctgtacaacgcggacacggccgactttgacgtggctgtgctggagctgaccagccctctgcctttcggccggcacatccagcccgtgtgcctcccggctgccacacacatcttcccacccagcaagaagtgcctgatctcaggctggggctacctcaaggaggacttcctggtcaagccagaggtgctgcagaaagccactgtggagctgctggaccaggcactgtgtgccagcttgtacggccattcactcactgacaggatggtgtgcgctggctacctggacgggaaggtggactcctgccagggtgactcaggaggacccctggtctgcgaggagccctctggccggttctttctggctggcatcgtgagctggggaatcgggtgtgcggaagcccggcgtccaggggtctatgcccgagtcaccaggctacgtgactggatcctggaggccaccaccaaagccagcatgcctctggcccccaccatggctcctgcccctgccgcccccagcacagcctggcccaccagtcctgagagccctgtggtcagcacccccaccaaatcgatgcaggccctcagtaccgtgcctcttgactgggtcaccgttcctaagctacaaggtattttcggggcagaaaggtagaagatgatgtacgtgcc

SEQ ID NO: 320554 - DNA, 252 bp, Artificial Sequence
  derived and/or modified sequence
ccataccaaaacgttaccgaattcgacgggcaagacgcctgcgggagcaactcttggactgtcgtcgacatcgatcccccgctgcgctcgaacgaccccaagtcccaaaatcaccctggctggttgatgaggggtttgaagccttggacacagtacgccatatttgtcaagacgctcgttactttctcagatgagcgcagaacatatggtgctaagtcagacatcatctacgtacaaaccgatgccacttag

SEQ ID NO: 320555 - DNA, 252 bp, Artificial Sequence
  derived and/or modified sequence
ccctaccagaatgtgacagaatttgatggccaggatgcctgtggcagcaacagctggacagtggtggacatcgacccccccctgcggagcaatgaccccaagagccagaaccaccctggctggctgatgaggggcctgaagccctggacccagtatgccatctttgtgaagaccctggtgaccttcagtgatgagaggaggacctatggagccaagagtgacatcatctacgtgcagacagatgccacctag

SEQ ID NO: 320556 - DNA, 252 bp, Artificial Sequence
  derived and/or modified sequence
ccctaccagaacgtgaccgagttcgacggccaggacgcctgcggctctaattcctggacggttgtggacatcgacccgcctctgaggagcaacgaccccaagtctcaaaaccatcccggctggttaatgagagggctcaagccttggactcagtacgcaatatttgtcaagacactggtaacatttagcgatgaacggcggacctatggagcgaagtcggacataatctatgtccagaccgacgcaacatag

SEQ ID NO: 320557 - DNA, 252 bp, Artificial Sequence
  derived and/or modified sequence
ccatatcagaatgtcactgaatttgatggacaggatgcatgcgggagtaatagctggaccgtcgtggatattgacccacccttgcgcagtaacgatccaaaaagtcagaatcaccctggatggctaatgcgaggactgaaaccctggacccagtacgctattttcgttaaaacgttggtcacattttctgacgagagacgtacgtacggcgcaaaaagcgatattatttacgtacaaacagacgccacctag

SEQ ID NO: 320558 - DNA, 252 bp, Artificial Sequence
  derived and/or modified sequence
ccctaccagaacgtgaccgagttcgacggccaggacgcctgcggcagcaacagctggaccgtggtggacatcgacccccccctgagaagcaacgaccccaagagccagaaccaccccggctggctgatgagaggcctgaagccctggacccagtacgccatcttcgtgaagaccctggtgaccttcagcgacgagagaagaacctacggcgccaagagcgacatcatctacgtgcagaccgacgccacctag

SEQ ID NO: 320559 - protein, 619 aa, Artificial Sequence
  derived and/or modified sequence
MAPPSEETPLIPQRSCSLLSTEAGALHVLLPARGPGPPQRLSFSFGDHLAEDLCVQAAKASGILPVYHSLFALATEDLSCWFPPSHIFSVEDASTQVLLYRIRFYFPNWFGLEKCHRFGLRKDLASAILDLPVLEHLFAQHRSDLVSGRLPVGLSLKEQGECLSLAVLDLARMAREQAQRPGELLKTVSYKACLPPSLRDLIQGLSFVTRRRIRRTVRRALRRVAACQADRHSLMAKYIMDLERLDPAGAAETFHVGLPGALGGHDGLGLLRVAGDGGIAWTQGEQEVLQPFCDFPEIVDISIKQAPRVGPAGEHRLVTVTRTDNQILEAEFPGLPEALSFVALVDGYFRLTTDSQHFFCKEVAPPRLLEEVAEQCHGPITLDFAINKLKTGGSRPGSYVLRRSPQDFDSFLLTVCVQNPLGPDYKGCLIRRSPTGTFLLVGLSRPHSSLRELLATCWDGGLHVDGVAVTLTSCCIPRPKEKSNLIVVQRGHSPPTSSLVQPQSQYQLSQMTFHKIPADSLEWHENLGHGSFTKIYRGCRHEVVDGEARKTEVLLKVMDAKHKNCMESFLEAASLMSQVSYRHLVLLHGVCMAGDSESPPPTHPTPASPKSRLFFPPLF

SEQ ID NO: 320560 - DNA, 1860 bp, Artificial Sequence
  derived and/or modified sequence
atggcaccaccctcagaagaaacacccctgatcccacaacggagctgtagtctgctcagcacggaggccggagccctgcatgtgctgctccccgccagaggacccggccccccccagaggctctctttctcctttggcgaccatcttgccgaggatctgtgtgttcaagctgcaaaagcctcaggtattctgccagtataccattccctatttgctctggccactgaagacctgtcatgctggttccccccgagccatattttctccgtcgaggacgctagtactcaggtactgctctacagaattaggttttattttcctaactggtttgggctggagaagtgccaccggttcggcctccggaaagaccttgcctctgccatattagatctcccagttctagaacatctctttgctcagcatcgctcagatcttgtgtccgggcggttgcctgttggtctgagcttgaaagagcaaggtgagtgccttagcctcgccgttctggatcttgctagaatggcaagggagcaggcccagaggccgggcgagctgctcaaaaccgtttcgtacaaagcgtgcctgcccccctccctccgagatctgattcaaggactttctttcgtgacgcgccgccggattagacggaccgtgcgcagggcacttaggagagtggctgcctgtcaagcagatagacacagcctgatggctaaatacatcatggacctggaaaggctggaccccgctggagcagccgagacatttcatgtggggctccccggggcccttggcgggcacgatggtctgggtctgctgagagtcgccggtgacggtggaattgcttggactcagggagagcaggaggtgctccagccgttctgcgactttcccgagatcgtggatatttccatcaaacaagcaccaagagtagggcccgccggggaacatcgactggtcacagtcaccagaaccgacaaccagatccttgaagccgaattccctgggctcccagaggcccttagtttcgtggcattggttgacgggtacttccggctcactacagactctcaacactttttctgcaaagaggtggctcccccccgactcctagaggaggttgcagagcagtgccacggccccattacactggactttgcaatcaacaagctgaagacgggcggctctagaccaggatcctacgtgctacgaaggagcccgcaggacttcgattctttcctacttaccgtatgcgtgcaaaatcccctgggccccgactacaagggttgcttaatcaggagatctccaaccggcacctttcttctcgtgggcctgagtcgcccgcatagctctctccgggagctccttgccacctgttgggatgggggccttcatgtggacggggtcgccgtcactttgacaagctgctgtataccacggccaaaagagaagtcaaatctgattgtggtccaacgcggccattcccctcccacctcatcgctcgtgcagcctcagagccaataccaactctcacagatgaccttccataagatccctgctgatagtctggagtggcatgagaacctaggacatggatctttcacgaagatttaccgaggatgtagacatgaggttgtggatggggaggcgcgtaagacagaggtcttactgaaggttatggatgccaaacacaaaaactgcatggagagttttctggaggcggcctctctgatgagccaggtgtcctacaggcatttggtcctgctgcatggtgtgtgcatggcgggggactctgagtctcctccacccacacacccaactccagcctctccaaagtctcgactgtttttcccacccctgttctag

SEQ ID NO: 320561 - DNA, 2803 bp, Artificial Sequence
  derived and/or modified sequence
cccggctctgcccgcccttcgaaagtccagggtccctgcccgctaggactgaggggctttttctctctgtgccccaggcaagttgcactcatggcacctccaagtgaagagacgcccctgatccctcagcgttcatgcagcctcttgtccacggaggctggtgccctgcatgtgctgctgcccgctcggggccccgggcccccccagcgcctatctttctcctttggggaccacttggctgaggacctgtgcgtgcaggctgccaaggccagcggcatcctgcctgtgtaccactccctctttgctctggccacggaggacctgtcctgctggttccccccgagccacatcttctccgtggaggatgccagcacccaagtcctgctgtacaggattcgcttttacttccccaattggtttgggctggagaagtgccaccgcttcgggctacgcaaggatttggccagtgctatccttgacctgccagtcctggagcacctctttgcccagcaccgcagtgacctggtgagtgggcgcctccccgtgggcctcagtctcaaggagcagggtgagtgtctcagcctggccgtgttggacctggcccggatggcgcgagagcaggcccagcggccgggagagctgctgaagactgtcagctacaaggcctgcctacccccaagcctgcgcgacctgatccagggcctgagcttcgtgacgcggaggcgtattcggaggacggtgcgcagagccctgcgccgcgtggccgcctgccaggcagaccggcactcgctcatggccaagtacatcatggacctggagcggctggatccagccggggccgccgagaccttccacgtgggcctccctggggcccttggtggccacgacgggctggggctgctccgcgtggctggtgacggcggcatcgcctggacccagggagaacaggaggtcctccagcccttctgcgactttccagaaatcgtagacattagcatcaagcaggccccgcgcgttggcccggccggagagcaccgcctggtcactgttaccaggacagacaaccagattttagaggccgagttcccagggctgcccgaggctctgtcgttcgtggcgctcgtggacggctacttccggctgaccacggactcccagcacttcttctgcaaggaggtggcaccgccgaggctgctggaggaagtggccgagcagtgccacggccccatcactctggactttgccatcaacaagctcaagactgggggctcacgtcctggctcctatgttctccgccgcagcccccaggactttgacagcttcctcctcactgtctgtgtccagaacccccttggtcctgattataagggctgcctcatccggcgcagccccacaggaaccttccttctggttggcctcagccgaccccacagcagtcttcgagagctcctggcaacctgctgggatggggggctgcacgtagatggggtggcagtgaccctcacttcctgctgtatccccagacccaaagaaaagtccaacctgatcgtggtccagagaggtcacagcccacccacatcatccttggttcagccccaatcccaataccagctgagtcagatgacatttcacaagatccctgctgacagcctggagtggcatgagaacctgggccatgggtccttcaccaagatttaccggggctgtcgccatgaggtggtggatggggaggcccgaaagacagaggtgctgctgaaggtcatggatgccaagcacaagaactgcatggagtcattcctggaagcagcgagcttgatgagccaagtgtcgtaccggcatctcgtgctgctccacggcgtgtgcatggctggagacagtgagagccccccacccacccaccccacccctgcctcacccaagtctaggctgttcttcccacctctgttctgagccgctatatgacagccccagcaacacactgggccaccctggatgggagccgtgttcattaccctttatttatgtctctccatcatcactccttggaaagcggctccaggttctcacccatatccagccccagaatgacctgaagtcagacaaacctggctttctaatctctgcagctttgtacaggtcacgtaacctttctgagccttggtttcattggttgggagtctaggatgggccaggagctgggacagagcctagaatgtgacaggcagggtgtgatgaggtgtgaggagggcagcacggagcactgtggatggtcagaaaggcattcctggcagagggaacagcatgccaagcgtgagaaggctcagagtaaggaggttaagagcccaagtattggagcctacagttttgccccttccatgcagtgtgacagtgggcaagttcctttccctctctgggtctcagttctgtcccctgcaaaatggtcagagcttaccccttggctgtgcagggtcaactttctgactggtgagagggattctcatgcaggttaagcttctgctgctcctcctcacctgcaaagcttttctgccacttttgcctccttggaaaactcttatccatctctcaaaactccagctaccacatccttgcagccttccctcatatacccccactactactgtagccctgtccttccctccagccccactctggccctggggctggggaagtgtctgtgtccagctgtctcccctgacctcagggttccttgggggctgggctgaggcctcagtacagagggggctctggaaatgtttgttgactgaataaaggaattcagtgg

SEQ ID NO: 320562 - DNA, 1860 bp, Artificial Sequence
  derived and/or modified sequence
atggcccctccttctgaggagacccccctcatcccccagaggagctgcagcctgctgagcacagaagctggggccctgcacgtgctgctgcctgcccggggccctggccccccccagaggctgtccttctcctttggagaccacctggccgaggacctgtgtgtgcaggccgccaaggccagcggcatcctgcctgtgtaccacagcctgtttgccctggccacagaggacctgagctgctggttcccccccagccacatcttctctgtggaggatgccagcacccaggtgctgctgtaccgcatccgcttctacttccccaactggtttggcctggagaagtgccaccgcttcggcctgaggaaggacctggccagcgccatcctggacctgcctgtgctggagcacctgtttgcccagcacagaagtgacctggtgtctggccgcctgcctgtgggcctgagcctgaaggagcagggagaatgtctgagcctggccgtgctggacctggccaggatggcccgggagcaggcccagaggcctggagagctgctgaagacagtgtcctacaaggcctgcctgccccccagcctgcgggacctgatccagggcctgagctttgtgacccggcggcgcatccggaggacagtgcggcgggccctgcggcgggtggccgcctgccaggccgacagacacagcctgatggccaagtacatcatggacctggagcggctggaccctgctggagctgctgagaccttccacgtgggcctgcccggggccctgggcggccatgatggcctgggcctgctgcgggtggccggagatggcggcatcgcctggacccagggcgagcaggaggtgctgcagcccttctgtgacttccctgagatcgtggacatcagcatcaagcaggccccccgggtgggccctgctggggagcaccggctggtgacagtgaccaggacagacaaccagatcctggaggccgagttccctggcctgcctgaggccctgagctttgtggccctggtggatggctacttccggctgaccacagacagccagcacttcttctgcaaggaggtggccccaccccggctgctggaggaggtggccgagcagtgccacggccccatcaccctggactttgccatcaacaagctgaagacaggaggcagccggcccggcagctatgtgctgcggcgcagcccccaggactttgacagcttcctgctgactgtgtgtgtgcagaaccccctgggccctgactacaagggctgcctgatcagaagaagccccaccggcaccttcctgctggtgggcctgagccggccccacagcagcctgcgggagctgctggccacctgctgggatggcggcctgcacgtggatggagtggccgtgaccctgaccagctgctgcatcccccggcccaaggagaagagcaacctgattgtggtgcagaggggccacagcccccccaccagcagcctggtgcagccccagagccagtaccagctgagccagatgaccttccacaagatcccagctgacagcctggagtggcatgagaacctgggccacggcagcttcaccaagatctaccggggctgcagacatgaggtggtggatggagaggccaggaagacagaggtgctgctgaaggtgatggatgccaagcacaagaactgcatggagagcttcctggaggccgccagcctgatgagccaggtgtcctaccgccacctggtgctgctgcacggcgtgtgcatggccggggacagcgagagccccccacccacccaccccaccccagccagccccaagagccgcctcttcttccccccactcttctag

SEQ ID NO: 320563 - DNA, 1860 bp, Artificial Sequence
  derived and/or modified sequence
atggccccccccagcgaggagacccccctgatcccccagcggagctgctcactactatctacagaggccggtgccctgcacgtgcttctgcctgcgcgcgggccggggcctccccagagactgagtttctcttttggtgaccaccttgcagaagacctctgtgtacaagccgccaaagcctctggcatcttacccgtgtaccacagcctgttcgccctggcaacagaggatttgagctgttggttccctccttcccatatcttttccgtcgaggacgccagcacccaggtcctcctgtataggattaggttttatttcccgaactggttcgggttggaaaagtgtcaccgttttgggctgcggaaagatttagctagtgctattctggatttgccagtcctggaacacctcttcgcccagcatcgctcggatctggttagcgggcgactccccgtcgggctctcgctcaaagaacagggggaatgtctttccctggcagtactggatcttgccaggatggctcgggaacaggcgcaaagacccggagagcttctgaagaccgtgtcatataaggcttgcctccccccatcactgcgtgacttaatacaggggctttcttttgtgacacgtagacgcattcgccggacagtgagacgcgctcttcggagagtggcagcgtgccaggctgaccgccactccctaatggccaagtacatcatggatttggagcggttggaccctgcaggggctgcagagaccttccacgtgggcctgcccggcgccctcggcgggcatgacgggctcggtctcctgcgggtcgccggcgacgggggcatagcgtggacccagggcgagcaggaagtgctgcagcccttttgtgacttccccgaaatagtcgatatcagtataaaacaggctcccagagtgggtcctgctggcgaacacaggttagtgaccgttacacggacagataatcagattcttgaggcagagtttcccggactgccagaagcgctttcctttgtcgccctggtcgatggatactttcgactgaccaccgacagccaacacttcttttgtaaagaagtcgctcctcctagactgctcgaggaggtggccgaacaatgccacggtccaatcactttagatttcgctataaataagttaaaaactggtgggtccaggcccgggagctacgtgctacgcaggtcccctcaagatttcgattcctttctcttaactgtatgcgtgcaaaaccccttgggccctgattacaaaggctgtctgattcgcaggtctcctacaggtaccttcctgctggtcggcttgtcacgtccacattcttcactaagggaactgctggcgacctgctgggacggcgggctccatgtggacggagtggctgtgactctaactagctgttgcattccccggcctaaagaaaagagcaacctgattgtggtccagcgcggacactctccccccacttcgtctctggttcagccccaatcccagtaccagctttctcagatgacgtttcataaaatccctgccgactcgctagaatggcacgagaacttaggccacggatccttcaccaaaatctataggggatgtcgtcatgaggtggttgatggcgaggcgcgtaagaccgaagtactgctgaaagttatggatgccaagcacaaaaactgcatggaatcattcttagaagcagcatcgctcatgtcgcaggtgtcctaccgccacttagttttgcttcacggtgtgtgcatggctggagacagcgagtctcccccacccacacaccctactcctgccagcccgaaatctagattatttttccctccactcttttag

SEQ ID NO: 320564 - DNA, 1860 bp, Artificial Sequence
  derived and/or modified sequence
atggcaccaccgtctgaagagaccccgttgattcctcagagatcctgttcactgctgtccactgaggccggtgctttacacgtgttgcttccagcccgtgggcctggccctccacagagactgtctttcagctttggcgaccacttagcagaagacctctgcgttcaagccgcaaaggctagcggaattttgcctgtttaccactcactctttgcactcgcaactgaagatctctcctgttggtttcctccatcacacatattctctgtagaagatgcaagcactcaagtgctgctttacagaataagattctacttccctaactggttcggattagagaagtgtcatcgctttggcctcaggaaagacctggctagtgctattcttgacctgcccgtgctggaacatctgttcgcccaacacagatccgacttagtcagtgggagactgccagtgggtctctctctgaaagagcagggcgagtgtctttctctcgccgtcctggacctggccaggatggccagagaacaggctcaacgaccgggagaactgctcaagactgttagctacaaggcgtgtttaccaccatctctgcgtgacctcatccagggtctgtctttcgtcaccagacggcgtatccgccgaaccgtccgaagagctttgcgacgagttgctgcctgtcaggccgaccggcactcactgatggccaaatatatcatggaccttgagcgtctggaccctgccggagccgctgaaacattccatgtgggtttgccaggagccctcggaggccacgacggcttgggacttctgagggtggcaggggacggcggtattgcctggacacagggggagcaggaggtgctgcagcccttctgcgacttcccagagattgtcgacatctcaatcaagcaggccccacgggtgggccctgccggagagcaccgacttgtcactgttactcgtactgacaaccaaatcctagaggccgagtttccaggcctacccgaggccctgtctttcgtggctttagtggacggatactttcggctcaccactgactctcagcatttcttctgcaaagaggtagcaccccctaggctgctcgaggaggtcgccgagcagtgccatggacccattaccctcgatttcgctattaacaagctaaagactggaggtagtaggccaggcagttacgtgctgagacggtccccccaggatttcgattcttttttactgacagtttgtgttcagaatccactgggtcctgactataaaggctgcttaatccgccgaagtcctactgggaccttcctgctggtgggtctgagtcggccacactcctcccttagagaactgttagcaacttgttgggatgggggactgcacgtcgacggcgtagccgtgaccctcacttcttgctgtattcccagaccaaaggagaagagtaacctgatagtggttcagcgcggacactcccctcctacgtcctcactggtgcagccgcagagtcagtaccagttgtcacaaatgacattccacaagattccggcagattctttggagtggcacgagaatctgggtcacgggagtttcacaaaaatataccgaggttgccgtcatgaggttgtggacggagaggcgagaaaaactgaggtactgctcaaggtaatggacgcaaaacacaaaaattgcatggaaagttttttggaggctgctagccttatgtcccaggtaagctataggcacctagtcttactccacggagtatgcatggcaggcgattctgagtcaccacctcccacccatcctacgccggcttctccgaagagccgattattttttccccctctgttttag

SEQ ID NO: 320565 - DNA, 1860 bp, Artificial Sequence
  derived and/or modified sequence
atggccccccccagcgaggagacccccctgatcccccagagaagctgcagcctgctgagcaccgaggccggcgccctgcacgtgctgctgcccgccagaggccccggccccccccagagactgagcttcagcttcggcgaccacctggccgaggacctgtgcgtgcaggccgccaaggccagcggcatcctgcccgtgtaccacagcctgttcgccctggccaccgaggacctgagctgctggttcccccccagccacatcttcagcgtggaggacgccagcacccaggtgctgctgtacagaatcagattctacttccccaactggttcggcctggagaagtgccacagattcggcctgagaaaggacctggccagcgccatcctggacctgcccgtgctggagcacctgttcgcccagcacagaagcgacctggtgagcggcagactgcccgtgggcctgagcctgaaggagcagggcgagtgcctgagcctggccgtgctggacctggccagaatggccagagagcaggcccagagacccggcgagctgctgaagaccgtgagctacaaggcctgcctgccccccagcctgagagacctgatccagggcctgagcttcgtgaccagaagaagaatcagaagaaccgtgagaagagccctgagaagagtggccgcctgccaggccgacagacacagcctgatggccaagtacatcatggacctggagagactggaccccgccggcgccgccgagaccttccacgtgggcctgcccggcgccctgggcggccacgacggcctgggcctgctgagagtggccggcgacggcggcatcgcctggacccagggcgagcaggaggtgctgcagcccttctgcgacttccccgagatcgtggacatcagcatcaagcaggcccccagagtgggccccgccggcgagcacagactggtgaccgtgaccagaaccgacaaccagatcctggaggccgagttccccggcctgcccgaggccctgagcttcgtggccctggtggacggctacttcagactgaccaccgacagccagcacttcttctgcaaggaggtggccccccccagactgctggaggaggtggccgagcagtgccacggccccatcaccctggacttcgccatcaacaagctgaagaccggcggcagcagacccggcagctacgtgctgagaagaagcccccaggacttcgacagcttcctgctgaccgtgtgcgtgcagaaccccctgggccccgactacaagggctgcctgatcagaagaagccccaccggcaccttcctgctggtgggcctgagcagaccccacagcagcctgagagagctgctggccacctgctgggacggcggcctgcacgtggacggcgtggccgtgaccctgaccagctgctgcatccccagacccaaggagaagagcaacctgatcgtggtgcagagaggccacagcccccccaccagcagcctggtgcagccccagagccagtaccagctgagccagatgaccttccacaagatccccgccgacagcctggagtggcacgagaacctgggccacggcagcttcaccaagatctacagaggctgcagacacgaggtggtggacggcgaggccagaaagaccgaggtgctgctgaaggtgatggacgccaagcacaagaactgcatggagagcttcctggaggccgccagcctgatgagccaggtgagctacagacacctggtgctgctgcacggcgtgtgcatggccggcgacagcgagagccccccccccacccaccccacccccgccagccccaagagcagactgttcttcccccccctgttctag

SEQ ID NO: 320566 - protein, 505 aa, Artificial Sequence
  derived and/or modified sequence
MATGALLPCSRPCPMSRLDFLKASHFSLGPDLRLHEGTMRTTSHRDFAYPAATREPPSLQPPPALLFPMDPRWDREERVSEAHRAFPPPSTPPWELLQAQARERTLAMQAGNLHLHEDAHAGIGLSNAHAAYGWPELPARTRERIRGARLIFDRDSLPPGDRDKLRIPPTTHQALFPPHDARPQPRAPSCHLGGPNTLKWDYTRQDGTSYQRQFQALPGPPALRCKRASSGVELGDCKISYGSTCSEQKQAYRPQDLPEDRYDKAQATAHIHCVNIRPGDGLFRDRTTKAEHFYAREPEPFVLHHDQTPESHILKGNWCPGPGSLDTFMQYFYGQPPPPTQPPSRHVPHEKLQSHVTLGEPKLLKRFFKTTMGSDYCPSEWRQVQKAPNLHLQQSYLPRGTGEFDFLTMNQKMLKPHRTPPAPVTEEMLQRCKYSHMEPPLGGLRFFSTQYKDEFPFKYQGPAALRLKNPQEGFVPLGTPHQRGCREKIDPLVPQPPMYLCPSQQ

SEQ ID NO: 320567 - protein, 192 aa, Artificial Sequence
  derived and/or modified sequence
MATGALLPCSRPCPMSRLDFLKASHFSLGPDLRLHEGTMRTTSHRDFAYPAATREPPSLQPPPALLFPMDPRWDREERVSEAHRAFPPPSTPPWELLQAQARERTLAMQAGNLHLHEDAHAGIGLSNAHAAYGWPELPARTRERIRGARLIFDRDSLPPGDRDKLRIPPTTHQALFPPHDARPQPRAPSCHL

SEQ ID NO: 320568 - DNA, 1679 bp, Artificial Sequence
  derived and/or modified sequence
ggatgcagcctgggaaggaacatgaggatcctctgagagaccagggacagagggagacccaaagatctggtctgtagctaagtgaattttctaaaactcattgattcacacgccatcccttgaggtggctggtgtcccgcgatggccacaggcgccctcctgccgtgctcgcgcccgtgcccgatgtcccggctggacttcctcaaggcctcgcacttctcgctggggcctgacctgcggctgcacgagggcaccatgcgcaccacgtcgcaccgggactttgcctacccggctgccacccgggagccgccgagcctgcagccgccgcccgcgctgcttttcccaatggacccgcgctgggaccgggaagagcgcgtgtcggaggcgcaccgcgcgttcccgccgccatccacgccgccgtgggagctgctgcaagcgcaggcgcgggaacgcacgctcgccatgcaggccggcaacctgcacctgcacgaggacgcgcacgccgggatcggcctctccaacgcgcacgccgcctacggctggcccgagctgccggcgcgcacccgagagcggatccgcggcgcgcgcctcatcttcgaccgcgactccctgcctcctggcgaccgcgacaagttgcgcatcccgcccaccacgcaccaggcgctctttccaccccacgacgcgcgcccgcagcctcgcgcgcccagttgccacctcgggggccccaacaccctcaagtgggactacacgagacaagatgggacttcctaccaaagacagttccaggccctgccaggcccacctgccttgaggtgtaagagggcctcctccggagtggagctgggagactgcaagatcagctatggatcaacgtgttcggagcagaaacaggcctacaggccccaggatctgcctgaagataggtatgacaaggcccaggccacagcccacatccactgtgtaaatatccgtcctggtgacggcctcttccgcgacaggaccaccaaggccgagcacttctatgccagggagccagagccttttgttcttcaccacgatcagactccggagtcgcacatcctgaaaggaaattggtgccccggccccggcagtctggacaccttcatgcagtacttctacggccagccgccacccccgacccagccacccagccgccacgtgcctcatgagaaattgcagagtcatgtgaccctaggggagccaaagctactcaaacgcttcttcaagaccaccatgggctcggactactgcccttcagagtggagacaggtgcagaaagcgcccaacctccacttgcagcaaagctacctgccgcggggcacgggcgaattcgattttttaaccatgaaccagaagatgctgaagccacacagaacacctccggccccggtgactgaagagatgctacagcggtgcaagtacagccacatggagccccctctgggtggactgcgcttcttctcaacacaatacaaggacgagtttcctttcaagtaccagggcccagcagccctgagactgaaaaatcctcaggagggcttcgtgcccctgggcacgcctcaccagcgcggctgcagggagaagatagaccctctggtcccccagccccctatgtacctgtgccccagccagcaataaatgccatcttggcaacattc

SEQ ID NO: 320569 - DNA, 1518 bp, Artificial Sequence
  derived and/or modified sequence
atggccaccggcgccctgctgccctgcagcagaccctgccccatgagcagactggacttcctgaaggccagccacttcagcctgggccccgacctgagactgcacgagggcaccatgagaaccaccagccacagagacttcgcctaccccgccgccaccagagagccccccagcctgcagcccccccccgccctgctgttccccatggaccccagatgggacagagaggagagagtgagcgaggcccacagagccttccccccccccagcacccccccctgggagctgctgcaggcccaggccagagagagaaccctggccatgcaggccggcaacctgcacctgcacgaggacgcccacgccggcatcggcctgagcaacgcccacgccgcctacggctggcccgagctgcccgccagaaccagagagagaatcagaggcgccagactgatcttcgacagagacagcctgccccccggcgacagagacaagctgagaatcccccccaccacccaccaggccctgttccccccccacgacgccagaccccagcccagagcccccagctgccacctgggcggccccaacaccctgaagtgggactacaccagacaggacggcaccagctaccagagacagttccaggccctgcccggcccccccgccctgagatgcaagagagccagcagcggcgtggagctgggcgactgcaagatcagctacggcagcacctgcagcgagcagaagcaggcctacagaccccaggacctgcccgaggacagatacgacaaggcccaggccaccgcccacatccactgcgtgaacatcagacccggcgacggcctgttcagagacagaaccaccaaggccgagcacttctacgccagagagcccgagcccttcgtgctgcaccacgaccagacccccgagagccacatcctgaagggcaactggtgccccggccccggcagcctggacaccttcatgcagtacttctacggccagccccccccccccacccagccccccagcagacacgtgccccacgagaagctgcagagccacgtgaccctgggcgagcccaagctgctgaagagattcttcaagaccaccatgggcagcgactactgccccagcgagtggagacaggtgcagaaggcccccaacctgcacctgcagcagagctacctgcccagaggcaccggcgagttcgacttcctgaccatgaaccagaagatgctgaagccccacagaaccccccccgcccccgtgaccgaggagatgctgcagagatgcaagtacagccacatggagccccccctgggcggcctgagattcttcagcacccagtacaaggacgagttccccttcaagtaccagggccccgccgccctgagactgaagaacccccaggagggcttcgtgcccctgggcaccccccaccagagaggctgcagagagaagatcgaccccctggtgccccagccccccatgtacctgtgccccagccagcagtag

SEQ ID NO: 320570 - DNA, 1518 bp, Artificial Sequence
  derived and/or modified sequence
atggctacaggcgccctccttccctgcagtagaccgtgccccatgtcccgactagacttccttaaagcttctcatttcagcttaggcccggatctccggttgcacgaggggaccatgcgcacgacttctcatagggattttgcatatcctgccgctacccgggaacccccctcactgcaacctcccccggcactccttttccctatggaccctcggtgggatcgcgaggaaagggtgtccgaggcccaccgtgcttttccaccccctagcacacctccatgggaactcctgcaggcccaggcccgggagaggacgctggccatgcaagccggaaaccttcatctacatgaggatgcacatgccggtattgggctatccaacgcccacgccgcttacggctggccggaacttcccgcgagaacgagagagcgaatccgaggagctagactgatcttcgatagagattctcttcccccaggggatagggacaagctccgcatacccccaactacacatcaggccttattccctccacatgacgcacggccacagccaagagctcctagttgccaccttggggggcccaatacactgaagtgggactatacgcgtcaggatggaaccagttatcagaggcagttccaagcgctcccgggtcccccagcactcagatgcaagcgagcctcaagcggcgtggaactgggggattgcaagatctcctacgggtcaacatgtagcgaacagaagcaagcttatcgaccgcaggatctgcccgaggatcgatacgataaagctcaagcaacagcacacatccactgcgttaacattcgccctggagacgggctttttagagacaggaccacaaaagctgagcatttttacgcccgcgagcctgaacccttcgtgctgcaccatgatcagacccccgagtctcacattcttaaaggcaattggtgccccgggccagggtcattggatacgttcatgcagtatttctatggtcagccaccaccccccacacaaccacctagccggcatgtgcctcatgaaaagctccagtcccacgttaccctgggagagcccaagctgttgaagaggtttttcaagaccactatggggagtgactactgtccctctgagtggcgccaggtgcagaaggcccctaacctgcacctacagcagtcatatctgcctcggggcacgggcgagttcgacttcctgacaatgaatcagaaaatgctcaaaccgcaccgcacaccccctgcccctgtgaccgaggagatgcttcaaaggtgcaagtacagtcacatggagccacccctaggaggcctccggttctttagcacacagtataaggatgaattcccattcaaataccagggaccagcagcgctcagactgaaaaatccccaggaaggcttcgtgcccctgggaacccctcatcagcgcggctgccgcgagaagatcgatcctctcgtgccccaaccacccatgtacctttgtccctctcaacagtag

SEQ ID NO: 320571 - DNA, 1518 bp, Artificial Sequence
  derived and/or modified sequence
atggccactggagccctgctgccctgcagccggccctgccccatgagccggctggacttcctgaaggccagccacttcagcctgggccctgacctgcggctgcacgagggcaccatgaggaccaccagccaccgggactttgcctacccagctgccacccgggagccccccagcctgcagcccccaccagccctgctcttccccatggacccccgctgggaccgggaggagcgggtgtctgaggcccaccgggccttccccccacccagcaccccaccctgggagctgctgcaggcccaggcccgggagaggaccctggccatgcaggccggcaacctgcacctgcatgaagatgcccatgctggcatcggcctgagcaatgcccacgccgcctacggctggccagagctgcctgcccggacccgggagcgcatccggggggcccggctcatctttgaccgggacagcctgcccccaggggaccgggacaagctgcgcatcccccccaccacccaccaggccctcttcccccctcatgatgcccggccccagccccgggcccccagctgccacctgggcggccccaacaccctgaagtgggactacacccggcaggacggcaccagctaccagaggcagttccaggccctgcccggccccccagccctgcgctgcaagagggccagcagcggcgtggagctgggggactgcaagatctcctatggcagcacctgcagcgagcagaagcaggcctaccggccccaggacctgcctgaagatagatatgacaaggcccaggccacagcccacatccactgtgtgaacatccggcctggagatggcctcttccgggacaggaccaccaaggccgagcacttctacgcccgggagcctgagccctttgtgctgcaccacgaccagaccccagagagccacatcctgaagggcaactggtgccccggccctggcagcctggacaccttcatgcagtacttctacggccagcccccaccacccacccagccccccagccgccacgtgccccatgagaagctgcagagccacgtgaccctgggggagcccaagctgctgaagcgcttcttcaagaccaccatgggcagtgactactgccccagcgagtggaggcaggtgcagaaggcccccaacctgcacctgcagcagagctacctgccccggggcactggagaatttgacttcctgaccatgaaccagaagatgctgaagccccacaggaccccaccagcccctgtgacagaggagatgctgcagcgctgcaagtacagccacatggagccccccctgggcggcctgcgcttcttcagcacccagtacaaggatgagttccccttcaagtaccagggccctgctgccctgcggctgaagaacccccaggagggctttgtgcccctgggcaccccccaccagaggggctgccgggagaagattgaccccctggtgccccagccccccatgtacctgtgccccagccagcagtag

SEQ ID NO: 320572 - DNA, 1518 bp, Artificial Sequence
  derived and/or modified sequence
atggccaccggcgccctgctgccctgcagccggccctgccccatgagccggctggattttctcaaggctagtcatttttccctgggccctgatctgcggcttcatgaaggaacgatgcgcactacatcccaccgcgacttcgcctatcccgctgccacccgagaacccccttctttgcagccccccccagccctcctattcccaatggacccccgctgggatcgggaggagagagttagtgaggcgcacagggcatttcctccacctagcactccaccatgggagctgctgcaggcccaagcgcgggaaaggactctggctatgcaggctggcaacttgcacctgcatgaggatgcccatgccggcatcggcctcagcaacgcgcatgccgcctatggctggccagaactgcccgctcgcacaagagagaggattcggggtgcgcggctcatcttcgaccgcgactcgctgcctccaggcgatcgcgataaactgagaatcccccccacgacacaccaggccctgttcccgccccacgatgcacgcccacagccacgagccccgagctgtcacctgggcggacctaacacactgaagtgggactacaccaggcaggatggcacttcttaccagaggcagttccaagcgctcccaggccctcccgcgttgcgatgcaagcgggcctcaagtggagttgaactgggagactgcaagatcagttatggaagcacctgcagcgaacagaagcaggcctaccgaccacaggacctccccgaagatcgctacgacaaggctcaggcaacggctcacatccattgtgtcaacatccggcctggcgacgggctgttcagagatcggactaccaaggctgaacacttctacgctcgcgaacccgaacctttcgtgctccaccacgatcaaacacccgagtcacacattttgaaggggaactggtgccccggccccggctcactggatacattcatgcagtacttttatggacaacctcccccacctacgcagcctcctagtagacatgttccccacgagaagctgcagtcccatgttactctcggtgaacccaagttgctgaaaagatttttcaaaactactatggggtccgattactgccccagcgagtggaggcaggtgcagaaggctcccaatcttcacctccaacagtcatacttgccaagaggcacaggcgagttcgactttcttacaatgaaccagaagatgcttaagccccatcgtaccccacccgccccagtgactgaggaaatgttacagagatgtaagtattcacatatggagcctcccctgggcgggttgcgattcttctcgacgcagtacaaagatgaatttccattcaaatatcaaggacccgcagcattacggctgaaaaatccccaggaaggttttgtccccttaggaaccccgcaccagcggggatgtagagaaaagatcgatcccctggtgccccagccacccatgtacttatgtccgtcacagcagtag

SEQ ID NO: 320573 - DNA, 1518 bp, Artificial Sequence
  derived and/or modified sequence
atggcaactggagcactgctgccatgttccagaccgtgccccatgagtcggctggactttctgaaggcttcccatttcagcctgggcccagaccttcgactccatgaggggactatgcgaaccaccagtcatcgtgatttcgcctaccccgctgctactagggaacctccatccctgcagcccccaccagccctcctgtttcccatggacccgaggtgggatcgtgaagagcgcgtgagtgaggcccaccgagccttcccaccaccttccacaccaccttgggagctattgcaggcacaagcgcgagagcgaacccttgccatgcaggcgggtaacctccacttgcatgaggatgcacatgctgggattggcctgtccaacgcgcacgccgcatacggctggcctgagctgccagcacgaaccagagagaggatcagaggggcaaggctgatcttcgacagagatagtttgccacccggagacagagataagctaagaatccctcctaccacacaccaggctctgttccctccccacgatgctcggccacaaccacgggctcctagctgccatctaggcggtcccaatacattgaagtgggattatactaggcaagatgggactagctaccagcggcagtttcaggcactgcccggaccccctgcgctgagatgtaagagggcttcttccggcgtcgagctcggagactgcaagattagttacggaagcacctgttctgagcaaaagcaggcttataggccacaggaccttcccgaggaccgctatgacaaagcccaggctacggcgcatattcattgtgtgaatattcgacctggggacggactctttagagatcgcactaccaaggcagagcatttttacgcccgagagcccgaacccttcgtcttgcaccacgaccagactcccgaatcccacatactaaaggggaattggtgtcctggacccggatcattagacactttcatgcagtatttctatggccagcctccgccacccactcagcccccatcacgtcacgttccccacgagaagctacaatcccacgtgacattgggagaacctaagctactgaaacggttcttcaagacgactatgggctccgattattgcccctcggagtggcgccaggtccagaaagccccaaatctgcatctgcagcagagctaccttccccgaggcaccggagaatttgactttctgaccatgaatcagaaaatgctaaaaccccatagaactccccctgcacctgttaccgaggagatgctccagagatgcaagtactcccacatggagccaccgctaggaggcctacgatttttctccacccaatacaaggacgagtttccctttaaataccaggggcctgctgcactcagactcaaaaacccacaggagggattcgtgccactgggaacaccccatcagcggggttgcagggagaaaatcgaccccttagtacctcaacccccaatgtacttgtgcccatcacagcagtag

SEQ ID NO: 320574 - protein, 223 aa, Artificial Sequence
  derived and/or modified sequence
MATGALLPCSRPCPMSRLDFLKASHFSLGPDLRLHEGTMRTTSHRDFAYPAATREPPSLQPPPALLFPMDPRWDREERVSEAHRAFPPPSTPPWELLQAQARERTLAMQAGNLHLHEDAHAGIGLSNAHAAYGWPELPARTRERIRGARLIFDRDSLPPGDRDKLRIPPTTHQALFPPHDARPQPRAPSCHLGGPNTLKWDYTRQDGTSYQRQFQALPGPPAL

SEQ ID NO: 320575 - DNA, 786 bp, Artificial Sequence
  derived and/or modified sequence
acaccctcctggacacttcctacccatgttacctgctggtgacctgtcttgttcatggctatatccgcacagcctggcagaaaacagagaatctgttttgtggctggtgtcccgcgatggccacaggcgccctcctgccgtgctcgcgcccgtgcccgatgtcccggctggacttcctcaaggcctcgcacttctcgctggggcctgacctgcggctgcacgagggcaccatgcgcaccacgtcgcaccgggactttgcctacccggctgccacccgggagccgccgagcctgcagccgccgcccgcgctgcttttcccaatggacccgcgctgggaccgggaagagcgcgtgtcggaggcgcaccgcgcgttcccgccgccatccacgccgccgtgggagctgctgcaagcgcaggcgcgggaacgcacgctcgccatgcaggccggcaacctgcacctgcacgaggacgcgcacgccgggatcggcctctccaacgcgcacgccgcctacggctggcccgagctgccggcgcgcacccgagagcggatccgcggcgcgcgcctcatcttcgaccgcgactccctgcctcctggcgaccgcgacaagttgcgcatcccgcccaccacgcaccaggcgctctttccaccccacgacgcgcgcccgcagcctcgcgcgcccagttgccacctcgggggccccaacaccctcaagtgggactacacgagacaagatgggacttcctaccaaagacagttccaggccctgccaggcccacctgccttga

SEQ ID NO: 320576 - DNA, 833 bp, Artificial Sequence
  derived and/or modified sequence
ccctgagcctcaatgtcttttgtgaagcagtggttaaaacctacccttggccaggcatggtggctaacacctgtaatcccagcactttgggaggctgaggcagaagggttgcttgagcccaggagtttgagaccagcctgagcaacatagccagacccctgtctctaaaaaaaaaaatagaaagaattagccatgcatggtggtgcacacctatagtcccagatgctcagaagactgaggtggctggtgtcccgcgatggccacaggcgccctcctgccgtgctcgcgcccgtgcccgatgtcccggctggacttcctcaaggcctcgcacttctcgctggggcctgacctgcggctgcacgagggcaccatgcgcaccacgtcgcaccgggactttgcctacccggctgccacccgggagccgccgagcctgcagccgccgcccgcgctgcttttcccaatggacccgcgctgggaccgggaagagcgcgtgtcggaggcgcaccgcgcgttcccgccgccatccacgccgccgtgggagctgctgcaagcgcaggcgcgggaacgcacgctcgccatgcaggccggcaacctgcacctgcacgaggacgcgcacgccgggatcggcctctccaacgcgcacgccgcctacggctggcccgagctgccggcgcgcacccgagagcggatccgcggcgcgcgcctcatcttcgaccgcgactccctgcctcctggcgaccgcgacaagttgcgcatcccgcccaccacgcaccaggcgctctttccaccccacgacgcgcgcccgcagcctcgcgcgcccagttgccacctcg

SEQ ID NO: 320577 - DNA, 672 bp, Artificial Sequence
  derived and/or modified sequence
atggccaccggcgccctgctgccctgcagcagaccctgccccatgagcagactggacttcctgaaggccagccacttcagcctgggccccgacctgagactgcacgagggcaccatgagaaccaccagccacagagacttcgcctaccccgccgccaccagagagccccccagcctgcagcccccccccgccctgctgttccccatggaccccagatgggacagagaggagagagtgagcgaggcccacagagccttccccccccccagcacccccccctgggagctgctgcaggcccaggccagagagagaaccctggccatgcaggccggcaacctgcacctgcacgaggacgcccacgccggcatcggcctgagcaacgcccacgccgcctacggctggcccgagctgcccgccagaaccagagagagaatcagaggcgccagactgatcttcgacagagacagcctgccccccggcgacagagacaagctgagaatcccccccaccacccaccaggccctgttccccccccacgacgccagaccccagcccagagcccccagctgccacctgggcggccccaacaccctgaagtgggactacaccagacaggacggcaccagctaccagagacagttccaggccctgcccggcccccccgccctgtag

SEQ ID NO: 320578 - DNA, 579 bp, Artificial Sequence
  derived and/or modified sequence
atggccaccggcgccctgctgccctgcagcagaccctgccccatgagcagactggacttcctgaaggccagccacttcagcctgggccccgacctgagactgcacgagggcaccatgagaaccaccagccacagagacttcgcctaccccgccgccaccagagagccccccagcctgcagcccccccccgccctgctgttccccatggaccccagatgggacagagaggagagagtgagcgaggcccacagagccttccccccccccagcacccccccctgggagctgctgcaggcccaggccagagagagaaccctggccatgcaggccggcaacctgcacctgcacgaggacgcccacgccggcatcggcctgagcaacgcccacgccgcctacggctggcccgagctgcccgccagaaccagagagagaatcagaggcgccagactgatcttcgacagagacagcctgccccccggcgacagagacaagctgagaatcccccccaccacccaccaggccctgttccccccccacgacgccagaccccagcccagagcccccagctgccacctgtag

SEQ ID NO: 320579 - DNA, 672 bp, Artificial Sequence
  derived and/or modified sequence
atggcaacaggagctttactgccttgcagcaggccttgccccatgtcaagactggatttcctaaaagctagccacttttctcttggacccgatcttcggttgcatgagggcaccatgcgcactacatcccatcgggattttgcctatcccgcggccaccagggagccacccagcctgcagcctcccccggctctgctgttcccgatggacccccggtgggatcgcgaggaacgggtgtctgaagcacatcgcgcctttccacccccctcaactcccccatgggagctcctgcaggctcaggccagggaacggaccttggctatgcaggccggcaacctgcacctccatgaagacgctcacgcagggataggcctgtccaacgcgcatgctgcctacggctggcctgagttgccagccagaaccagggaacgcattaggggggcacgccttattttcgatcgtgattcattgccccctggggatagagataaactcagaattcctcccaccacgcaccaggcccttttccctccccacgacgcccggccccagccacgggcaccgtcatgccacctgggaggcccgaacactttgaagtgggattataccagacaagatgggacatcttaccagcgtcagtttcaggctcttcctggccctcctgccctgtag

SEQ ID NO: 320580 - DNA, 579 bp, Artificial Sequence
  derived and/or modified sequence
atggccactggcgccctactgccctgttccaggccctgccccatgagcagactggacttcctgaaggcatcccacttttccttaggacctgatctccgtctacatgaagggacaatgcgcaccactagccatcgggactttgcctatccggccgccacccgcgaaccaccatccctgcagccgcctcccgctttattgtttccgatggaccctagatgggacagagaggaacgagtgtctgaagctcacagagcgttcccacctccttcgactcctccatgggaactcctgcaggcacaagcccgagaacggaccttggctatgcaggcaggaaacttgcacctccatgaggatgcccatgcaggcattgggctgagcaatgcacacgccgcatacggctggcctgagctcccagcccgtacgagggaacgcattcgaggggcccgccttatttttgacagagactccctgcccccaggggaccgtgataaactgcgtattccacctacgacacatcaagcactattcccccctcacgacgcccggccccagccccgcgcgccgagttgccatctttag

SEQ ID NO: 320581 - DNA, 672 bp, Artificial Sequence
  derived and/or modified sequence
atggccactggagccctgctgccctgcagccggccctgccccatgagccggctggacttcctgaaggccagccacttcagcctgggccctgacctgcggctgcacgagggcaccatgaggaccaccagccaccgggactttgcctacccagctgccacccgggagccccccagcctgcagcccccaccagccctgctcttccccatggacccccgctgggaccgggaggagcgggtgtctgaggcccaccgggccttccccccacccagcaccccaccctgggagctgctgcaggcccaggcccgggagaggaccctggccatgcaggccggcaacctgcacctgcatgaagatgcccatgctggcatcggcctgagcaatgcccacgccgcctacggctggccagagctgcctgcccggacccgggagcgcatccggggggcccggctcatctttgaccgggacagcctgcccccaggggaccgggacaagctgcgcatcccccccaccacccaccaggccctcttcccccctcatgatgcccggccccagccccgggcccccagctgccacctgggcggccccaacaccctgaagtgggactacacccggcaggacggcaccagctaccagaggcagttccaggccctgcccggccccccagccctgtag

SEQ ID NO: 320582 - DNA, 579 bp, Artificial Sequence
  derived and/or modified sequence
atggccactggagccctgctgccctgcagccggccctgccccatgagccggctggacttcctgaaggccagccacttcagcctgggccctgacctgcggctgcacgagggcaccatgaggaccaccagccaccgggactttgcctacccagctgccacccgggagccccccagcctgcagcccccaccagccctgctcttccccatggacccccgctgggaccgggaggagcgggtgtctgaggcccaccgggccttccccccacccagcaccccaccctgggagctgctgcaggcccaggcccgggagaggaccctggccatgcaggccggcaacctgcacctgcatgaagatgcccatgctggcatcggcctgagcaatgcccacgccgcctacggctggccagagctgcctgcccggacccgggagcgcatccggggggcccggctcatctttgaccgggacagcctgcccccaggggaccgggacaagctgcgcatcccccccaccacccaccaggccctcttcccccctcatgatgcccggccccagccccgggcccccagctgccacctgtag

SEQ ID NO: 320583 - DNA, 672 bp, Artificial Sequence
  derived and/or modified sequence
atggccaccggcgccctgctgccctgcagccggccctgccccatgtccagattggacttcctgaaagccagtcacttttcgctcgggcccgacctgcgcctccacgaaggaactatgcgaacgacatcacacagggattttgcttaccccgcggctacgcgggaaccaccctcactccagccacccccggccctgctcttcccgatggatccaagatgggatagggaggagcgagtctcagaagctcacagagcgtttccccctcccagcactcctccctgggagctactacaggcacaggcaagggagcgaactcttgcgatgcaggcggggaacctgcatctccacgaagacgcacacgccgggatcggactcagcaatgcccatgccgcttacggttggcctgagctgcctgcccgcacacgagaacgtattcgcggagcaagactgatcttcgaccgtgacagcctcccacccggtgaccgtgacaaactgcgaatccctccaaccactcaccaggcattattcccaccacatgatgccaggccccagccccgggccccctcctgccatttaggcgggcccaatactttaaaatgggactatacaagacaggatggaacatcgtaccagaggcaattccaagctttacccgggccacccgctctttag

SEQ ID NO: 320584 - DNA, 579 bp, Artificial Sequence
  derived and/or modified sequence
atggccaccggcgccctgctgccctgcagccggccctgccccatgtcacgactggactttttgaaagcctctcacttcagcctgggacccgatctgcgattgcacgaggggacgatgcggaccacctcccaccgcgatttcgcatacccagctgccactcgggagcctccctctctgcagccaccaccagcgttgctgttcccaatggatcctcggtgggatcgcgaggaacgggttagcgaggcccaccgggctttccctcccccctccacccctccatgggagttgctccaggctcaggcccgggagcgcaccctcgcgatgcaggctggcaatttacacttacacgaggatgctcacgccggcatagggttgtctaatgcacacgccgcctacggatggcctgaactccctgcaaggaccagggagagaatccgcggggctagattgatctttgatcgggattcccttcctcccggcgacagggacaagctgagaatccctcctaccacccaccaggcactgtttcccccccacgatgcacgccctcagcccagagccccttcttgtcacctgtag

SEQ ID NO: 320585 - DNA, 672 bp, Artificial Sequence
  derived and/or modified sequence
atggccaccggagccctcttgccgtgctctcggccatgcccaatgtccaggcttgatttcttaaaggcgagtcactttagccttggcccagatctcagactgcatgagggcacaatgaggacaacgtcccatagagattttgcttatcctgcagccacacgggaacctccttccctgcaaccacccccagcactgctgttccctatggaccctcgctgggaccgcgaagagcgggtttctgaagctcatcgcgcattccctcctcctagtaccccaccatgggaactgttgcaggcccaggctcgagaacgaaccctcgccatgcaggctggtaaccttcacctgcacgaagatgcccacgctggcatagggctgagtaatgcccacgccgcatacggatggcctgagctgccggcacgcacacgggaacgaattcgcggtgcgagactcatatttgatcgagattcgttaccaccaggcgacagagacaaactgcgcattcctccaaccacacaccaagccctcttcccgcctcacgacgcaagaccccagcctagagctccttcctgtcatctaggaggtcccaacacgctgaagtgggactataccagacaggacggcaccagttaccagcgccagttccaagcattacctggtccccctgccctgtag

SEQ ID NO: 320586 - DNA, 579 bp, Artificial Sequence
  derived and/or modified sequence
atggctactggcgcactcctcccttgtagccgcccttgcccaatgtctcgtttggacttcctcaaagccagccacttctccctgggcccagatctgcgcctgcacgaaggcacaatgagaacaacctcccatcgggactttgcataccctgccgcaaccagggagccgccttcactgcagcccccaccggcattgctatttccgatggatccgaggtgggacagggaggaacgcgtatctgaagcacatcgtgcctttccgccacctagcacaccaccttgggagctgttacaggcccaggcgagggagagaacactggcaatgcaggccggtaacttgcacctgcatgaggatgcccacgctggaatcgggttatctaacgcacatgctgcgtatgggtggcccgaactaccggcaaggactagagagagaattagaggggcaagattgatcttcgacagggatagtcttccacccggagatcgggacaaactgcgcatccccccaacgacgcatcaggctctgttcccaccccacgacgctagacctcagcctcgtgccccttcttgtcacctatag

SEQ ID NO: 320587 - protein, 240 aa, Artificial Sequence
  derived and/or modified sequence
PEFVGLWLGLAKAGMEAALLNVNLRREPLAFCLGTSGAKALIFGGEMVAAVAEVSGHLGKSLIKFCSGDLGPEGILPDTHLLDPLLKEASTAPLAQIPSKGMDDRLFYIYTSGTTGLPKAAIVVHSRYYRMAAFGHHAYRMQAADVLYDCLPLYHSAGNIIGVGQCLIYGLTVVLRKKFSASRFWDDCIKYNCTWHGPSWTEKLEPQRNPCLSAALVPLCLPPLPAFQPLSPSIPVPVWP

SEQ ID NO: 320588 - DNA, 723 bp, Artificial Sequence
  derived and/or modified sequence
cccgagttcgtgggattgtggctgggcttggcgaaagccggcatggaagcagctctactgaacgtgaacctacggagagaacctcttgcattttgtctgggaacatcaggggcaaaagccctgatcttcggaggtgagatggttgccgccgtggccgaggtaagcggccatctgggaaaatccctgattaagttttgctcaggggacctgggccccgaaggaattctgcctgacacccatttgctggatcctctgttgaaggaagcaagtacagctccactggcacaaatccctagtaaagggatggacgacaggctgttctatatttacactagtggcactaccgggttgcccaaggcagctatcgtcgttcactcccgatattacagaatggcagctttcggccatcacgcatacaggatgcaagctgcggacgttctgtacgactgtctgcctctgtatcacagcgctggaaatatcatcggagtgggacagtgcctgatatacggattgaccgtggttcttaggaaaaagttcagcgcttccaggttctgggacgattgtattaagtataactgcacctggcacggtcctagctggacagagaagctagagccgcagcgaaacccttgcctgtcagcagctcttgtgcctctttgcttgccacccctgccggccttccagccactgtcaccaagtatccctgttccggtttggccatag

SEQ ID NO: 320589 - DNA, 723 bp, Artificial Sequence
  derived and/or modified sequence
cctgagtttgtgggcctgtggctgggcctggccaaggccggcatggaggccgccctgctgaatgtgaacctgcggcgggagcccctggccttctgcctgggcaccagcggggccaaggccctgatctttggaggagagatggtggccgctgtggccgaggtgtctggccacctgggcaagagcctcatcaagttctgcagcggggacctgggccctgagggcatcctgcctgacacccacctgctggaccccctgctgaaggaggccagcacagcccccctggcccagatccccagcaagggcatggatgacaggctcttctacatctacaccagcggcaccaccggcctgcccaaggccgccatcgtggtgcacagccgctactacaggatggccgccttcggccaccacgcctacaggatgcaggccgcagatgtgctgtatgactgcctgcccctgtaccacagcgctggcaacatcattggagtgggccagtgcctgatctacggcctgactgtggtgctgaggaagaagttcagcgccagccgcttctgggatgactgcatcaagtacaactgcacctggcacggccccagctggacagagaagctggagccccagaggaacccctgcctgtctgctgccctggtgcccctgtgcctgccccccctgcctgccttccagcccctgagccccagcatccctgtgcctgtgtggccctag

SEQ ID NO: 320590 - DNA, 723 bp, Artificial Sequence
  derived and/or modified sequence
cccgagttcgtgggcctgtggctgggcctggccaaggccggcatggaagctgctctgctcaatgttaatctccgtagggagccgttagccttctgtcttggaacctccggtgctaaggctctaatcttcggtggagagatggttgccgccgtggcagaagtctcaggacatctggggaaaagtctaatcaagttttgcagcggcgatctgggacccgaaggaattctgccagatacccacctcttggacccccttcttaaggaggcaagcactgcgccgctcgctcaaattccctctaaggggatggacgatcgcctgttttacatatatacgtcaggaacgaccgggcttccaaaagccgcaatcgtcgtgcactccagatactaccgtatggctgcattcggccaccacgcctataggatgcaagccgctgacgttctctacgattgcctgccgctgtatcattccgccgggaatatcatcggcgtgggccaatgcttgatatatggactgaccgtggtcctccgaaagaaattctctgctagtagattttgggacgattgcatcaaatataactgcacttggcatgggcctagctggactgagaagttagaaccccagaggaacccatgtctgtccgccgcgctggtaccattgtgcttgcctccgcttccagcctttcaaccactctcacctagtatacctgtccccgtatggccatag

SEQ ID NO: 320591 - DNA, 723 bp, Artificial Sequence
  derived and/or modified sequence
cctgagtttgttggtctgtggctaggattggcaaaggctggcatggaagccgcattactgaacgtaaacttgcgccgtgagccactggctttctgcttgggaacttctggtgcgaaagcgttgattttcggcggagaaatggtggccgcagttgctgaggtttcaggccatctgggtaagtccttaatcaaattctgttctggtgatctgggcccagagggcatcctgcctgatacacaccttctggacccactactcaaggaggcatccactgcccctcttgcacagatcccctctaagggcatggatgatagactattctatatctatacatcagggacaaccggactgcctaaagctgccatcgtcgtgcacagtaggtattaccgaatggccgcattcgggcaccatgcctaccgcatgcaggccgctgacgtgctttacgattgcttgccactgtatcattccgccggaaatattatcggggtcggccagtgtcttatctatgggttgaccgtcgtgctgcggaaaaagttttctgcctccaggttttgggatgactgtattaagtacaattgtacttggcatggaccttcgtggacggaaaaattggaaccccagcgcaatccttgcctcagcgctgccctggttcccctgtgcctccccccactgcctgcctttcaacctctgtcaccctctattcctgtcccagtttggccctag

SEQ ID NO: 320592 - DNA, 723 bp, Artificial Sequence
  derived and/or modified sequence
ccggagttcgtggggctgtggctgggcctggccaaggcgggcatggaggccgcgctgctcaacgtgaacctgcggcgcgagcccctggccttctgcctgggcacctcgggcgctaaggccctgatctttggaggagaaatggtggcggcggtggccgaagtgagcgggcatctggggaaaagtttgatcaagttctgctctggagacttggggcccgagggcatcttgccggacacccacctcctggacccgctgctgaaggaggcctctactgcccccttggcacagatccccagcaagggcatggacgatcgtcttttctacatctacacgtcggggaccaccgggctgcccaaggctgccattgtcgtgcacagcaggtactaccgcatggcagccttcggccaccacgcctaccgcatgcaggcggctgacgtgctctatgactgcctgcccctgtaccactcggcaggaaacatcatcggcgtggggcagtgtctcatctatgggctgacagtcgtcctccgcaagaaattctcggccagccgcttctgggacgactgcatcaagtacaactgcacgtggcacggcccatcctggactgagaaactggaacctcagaggaacccgtgcctctctgctgccttggtgcccctgtgtctgcctcctctccctgcttttcagcctctgtctccttccatccctgtccctgtctggccttaa

SEQ ID NO: 320593 - DNA, 723 bp, Artificial Sequence
  derived and/or modified sequence
cccgagttcgtgggcctgtggctgggcctggccaaggccggcatggaggccgccctgctgaacgtgaacctgagaagagagcccctggccttctgcctgggcaccagcggcgccaaggccctgatcttcggcggcgagatggtggccgccgtggccgaggtgagcggccacctgggcaagagcctgatcaagttctgcagcggcgacctgggccccgagggcatcctgcccgacacccacctgctggaccccctgctgaaggaggccagcaccgcccccctggcccagatccccagcaagggcatggacgacagactgttctacatctacaccagcggcaccaccggcctgcccaaggccgccatcgtggtgcacagcagatactacagaatggccgccttcggccaccacgcctacagaatgcaggccgccgacgtgctgtacgactgcctgcccctgtaccacagcgccggcaacatcatcggcgtgggccagtgcctgatctacggcctgaccgtggtgctgagaaagaagttcagcgccagcagattctgggacgactgcatcaagtacaactgcacctggcacggccccagctggaccgagaagctggagccccagagaaacccctgcctgagcgccgccctggtgcccctgtgcctgccccccctgcccgccttccagcccctgagccccagcatccccgtgcccgtgtggccctag

SEQ ID NO: 320594 - protein, 646 aa, Artificial Sequence
  derived and/or modified sequence
MRAPGAGAASVVSLALLWLLGLPWTWSAAAALGVYVGSGGWRFLRIVCKTARRDLFGLSVLIRVRLELRRHQRAGHTIPRIFQAVVQRQPERLALVDAGTGECWTFAQLDAYSNAVANLFRQLGFAPGDVVAIFLEGRPEFVGLWLGLAKAGMEAALLNVNLRREPLAFCLGTSGAKALIFGGEMVAAVAEVSGHLGKSLIKFCSGDLGPEGILPDTHLLDPLLKEASTAPLAQIPSKGMDDRLFYIYTSGTTGLPKAAIVVHSRYYRMAAFGHHAYRMQAADVLYDCLPLYHSAGNIIGVGQCLIYGLTVVLRKKFSASRFWDDCIKYNCTVVQYIGEICRYLLKQPVREAERRHRVRLAVGNGLRPAIWEEFTERFGVRQIGEFYGATECNCSIANMDGKVGSCGFNSRILPHVYPIRLVKVNEDTMELLRDAQGLCIPCQAGEPGLLVGQINQQDPLRRFDGYVSESATSKKIAHSVFSKGDSAYLSGDVLVMDELGYMYFRDRSGDTFRWRGENVSTTEVEGVLSRLLGQTDVAVYGVAVPGVEGKAGMAAVADPHSLLDPNAIYQELQKVLAPYARPIFLRLLPQVDTTGTFKIQKTRLQREGFDPRQTSDRLFFLDLKQGHYLPLNEAVYTRICSGAFAL

SEQ ID NO: 320595 - DNA, 1941 bp, Artificial Sequence
  derived and/or modified sequence
atgcgtgccccaggcgctggcgctgcaagtgtagtatccctagctctgctgtggctgctgggtctgccgtggacttggtcggccgctgccgccctgggcgtatatgtcggaagtggaggctggagatttctgcggatcgtgtgcaagactgccagaagagatctgtttggccttagtgtgttgattagagtgcgccttgagttgagacggcatcagcgcgcggggcataccatccctaggatcttccaagccgtagtgcagcgccagcctgaacgactggccctggtcgacgctggcacgggcgagtgctggacttttgcccagcttgatgcttattctaatgccgtggcgaacctcttcaggcagctaggattcgcccctggagacgtcgtggccatcttcctagagggccggcccgaattcgtgggactctggcttggtttggccaaggccgggatggaagcagcacttctgaacgtaaatttgcggcgggaacctctggctttctgcctgggtacaagtggtgccaaagcgcttatttttggaggcgagatggtcgcagccgtggcggaggtgtctggccacctggggaagtctctgattaaattttgcagcggtgatttaggtccagagggcattctgcccgacacccaccttttagatccgctcctcaaggaagccagcactgccccactggctcaaataccttccaaaggtatggatgacaggctcttttacatctatactagcggtacaacaggcctgcctaaggccgccatagtagttcatagccgatattatagaatggctgccttcgggcaccacgcttacaggatgcaggcggctgatgtgctctacgattgcctgcctctataccactcagcgggaaacataattggcgtcggccagtgcctcatttatgggctgactgtcgttttacgcaaaaagtttagcgccagcaggttctgggatgattgcatcaaatacaattgcactgtggttcaatatattggagagatttgccgatacctactgaagcagcctgttagggaggctgagaggcgccaccgtgtcagactggcagtcggcaatggcttacggcccgcgatctgggaagagtttactgagaggtttggagtcaggcaaatcggagaattttatggcgctacggagtgcaactgctcgatcgcgaatatggacgggaaagtgggcagctgcggattcaatagccggattctcccacatgtctaccccataagacttgttaaggtgaacgaggataccatggagctgctgcgggatgcacaggggttgtgcatcccctgccaggccggggaacctggacttcttgtgggacagattaaccagcaggacccgcttcgccggttcgatggctacgtgtccgagtccgccacatcgaaaaagatcgcacacagtgtgttcagtaagggagactccgcctatctgagcggagacgtgctggtcatggacgaactgggctatatgtacttccgtgacaggtccggcgatacgtttaggtggaggggcgagaacgtaagcaccaccgaagttgagggagtgctgtcccggctgctggggcagaccgatgttgctgtttatggtgtagcagtgccgggcgttgagggcaaagccggtatggctgctgttgccgacccccactctcttctggacccaaatgctatctaccaggaacttcagaaggtactggcgccatacgcaaggcccatcttcctgagactcttgccccaggtggacacaacaggaacattcaaaattcagaaaacacgtctccaacgagaggggtttgaccctcgacagacaagtgacagactgttctttcttgacctcaaacagggacattatctccctctcaatgaggccgtctacacccgcatatgtagcggggcattcgctctttag

SEQ ID NO: 320596 - DNA, 1941 bp, Artificial Sequence
  derived and/or modified sequence
atgagggcacccggggctggtgccgcgagcgtggtgtctctcgctttgctttggctgctgggtctgccttggacctggagcgcggccgctgcgctaggagtgtacgtagggtcagggggctggagattcctgcgcatcgtttgtaagactgctagacgagacctcttcggcttaagtgtgctaattcgagtcaggttagaactcagacggcaccagagagccgggcataccattcctaggatctttcaggccgtcgtccaacgacagcccgagaggctagccctggttgatgcgggaacaggagagtgttggaccttcgcccaactggatgcttacagcaatgccgttgccaaccttttcaggcaacttgggttcgcccccggagacgtggtggcgatctttctcgaaggaaggcctgagttcgtcgggctctggctgggactggcaaaggcgggaatggaggcagccctcttgaatgtgaacctcaggagagaacccctggctttctgtttgggcacttcgggggccaaagcattaatcttcggcggagaaatggtggctgcagttgctgaagtgtcaggtcacctcgggaaatctctaattaaattttgctctggcgacctagggcccgaaggtatcctgcccgatacccacctcctggaccccctgctcaaagaggccagcaccgcccccctagcccaaatacctagcaaaggtatggatgacagactgttttacatctatacaagtggaactacagggctgcccaaggctgccattgttgttcacagccgctactaccgcatggcggcttttggacatcacgcataccgtatgcaggccgccgatgtgctatacgactgtttgcccctatatcatagcgcgggcaacattattggagtggggcagtgcttgatttatgggctcactgttgttctccggaagaaatttagcgccagcaggttttgggacgactgtataaagtataactgcacagtagtgcagtatattggggaaatatgtaggtacctcctgaaacagcccgtaagggaggcagagcgcagacaccgcgtgagactagctgtgggaaacgggctcagacccgcaatttgggaagagtttaccgaacgctttggggtgagacagatcggtgaattttacggagcgaccgagtgcaactgcagcatcgctaatatggatgggaaggtcggcagttgcggattcaattctcggattctaccccatgtctaccctatccgcctggttaaagttaatgaggataccatggaacttctccgcgatgctcagggcctctgcatcccatgccaagccggcgaaccaggcctcctagtggggcagatcaaccagcaggaccctctacgcaggttcgatgggtatgtaagcgagtctgcaacgtctaaaaagatagcccactctgtcttttcaaagggtgacagcgcctatctgagcggggacgtcctcgtcatggatgagcttggctatatgtacttcagagacaggtcgggggatactttccgttggaggggtgagaatgtctccacaactgaggtggagggggtgctgagccgactgctgggccagaccgatgtcgcagtatacggcgtggcagttccgggggtggaaggtaaagcgggaatggccgccgtggccgacccccactctctcctggacccaaacgcaatctatcaggaacttcagaaggtgctggcgccatacgcccgtccaatctttcttcgcctgctcccgcaggtagacactacagggacattcaaaattcagaaaacgcgcctgcagcgcgaaggattcgaccctaggcagacttctgacagattatttttcctggacctgaagcaaggacactacctccccttgaatgaggcggtgtacacacgcatttgtagcggggcctttgctctgtag

SEQ ID NO: 320597 - DNA, 1941 bp, Artificial Sequence
  derived and/or modified sequence
atgagggcccctggggccggggccgcctctgtggtgtccctggccctgctgtggctgctgggcctgccctggacctggagcgctgctgctgccctgggcgtgtatgtgggcagcggcggctggaggttcctgcgcatcgtgtgcaagacagcccggcgggacctgtttggcctgtctgtgctgatccgggtgcggctggagctgcggcggcaccagagagctggccacaccatcccccgcatcttccaggccgtggtgcagaggcagcctgagcggctggccctggtggatgctggcaccggggagtgctggacctttgcccagctggatgcctacagcaatgctgtggccaacctcttccggcagctgggctttgcccctggagatgtggtggccatcttcctggagggccggcctgagtttgtgggcctgtggctgggcctggccaaggccggcatggaggccgccctgctgaatgtgaacctgcggcgggagcccctggccttctgcctgggcaccagcggggccaaggccctgatctttggaggagagatggtggccgctgtggccgaggtgtctggccacctgggcaagagcctcatcaagttctgcagcggggacctgggccctgagggcatcctgcctgacacccacctgctggaccccctgctgaaggaggccagcacagcccccctggcccagatccccagcaagggcatggatgacaggctcttctacatctacaccagcggcaccaccggcctgcccaaggccgccatcgtggtgcacagccgctactacaggatggccgccttcggccaccacgcctacaggatgcaggccgcagatgtgctgtatgactgcctgcccctgtaccacagcgctggcaacatcattggagtgggccagtgcctgatctacggcctgactgtggtgctgaggaagaagttcagcgccagccgcttctgggatgactgcatcaagtacaactgcaccgtggtgcagtacatcggggagatctgccgctacctgctgaagcagcctgtgcgggaggccgagcggcggcaccgggtgcggctggccgtgggcaatggcctgcggcctgccatctgggaggagttcacagagcgcttcggcgtgcggcagattggagagttctatggagccacagagtgcaactgcagcatcgccaacatggatggcaaggtgggcagctgtggcttcaacagccgcatcctgccccacgtgtaccccatccggctggtgaaggtgaatgaagacaccatggagctgctgagagatgcccagggcctgtgcatcccctgccaggccggggagcccggcctgctggtgggccagatcaaccagcaggaccccctgcggagatttgatggctacgtgtctgagagcgccaccagcaagaagatcgcccacagcgtcttcagcaaaggagacagcgcctacctgtctggagatgtgctggtgatggatgagctgggctacatgtacttccgggacagaagtggggacaccttccgctggagaggagaaaatgtgtccaccacagaggtggagggcgtgctgagccggctgctgggccagacagatgtggccgtgtatggagtggccgtgcctggggtggagggcaaggccggcatggctgctgtggccgacccccacagcctgctggaccccaatgccatctaccaggagctgcagaaggtgctggccccctatgcccggcccatcttcctgcggctgctgccccaggtggacaccaccggcaccttcaagatccagaagacccggctgcagcgggagggctttgacccccggcagaccagtgacaggctcttcttcctggacctgaagcagggccactacctgcccctgaatgaggccgtgtacacccgcatctgcagcggggcctttgccctgtag

SEQ ID NO: 320598 - DNA, 1941 bp, Artificial Sequence
  derived and/or modified sequence
atgcgggcccccggcgccggcgccgccagcgtggtgagcctggccctcctgtggctgctgggacttccatggacatggtccgcagcggctgccttaggtgtctacgtaggctcaggcggatggcgcttcttgagaattgtctgcaaaactgctcgtcgggaccttttcggcctgtccgtccttatacgcgtgaggcttgagctcaggcgccatcagagagctggccacacaattccgcgcatttttcaggccgttgtgcagaggcagcccgagaggctggcactcgttgacgccggcaccggcgaatgctggacatttgcccagctggatgcatactcaaacgctgtggctaatctgttccggcagctgggtttcgctccaggagatgttgtggccatttttctcgaggggcgccctgaattcgtcggactatggctcggcctggccaaagcaggcatggaggccgccctcctgaatgtgaatctgcggagagaacctttggcattttgtttagggacatcgggagcaaaagccctgatttttgggggtgaaatggtggccgccgtggcagaagtttccggtcacttaggcaagtcccttatcaagttctgcagcggggatcttgggcctgagggtattctgcctgatacccacctgctggacccgctgctcaaagaagcttccaccgccccactggctcagatcccatctaaaggaatggacgaccgcttgttttacatttacacctccggcaccacaggactacctaaggccgcaattgtggtgcatagtcgctactatcggatggccgcttttggccaccatgcttatcggatgcaggcagctgatgtgctgtatgactgtcttcctttataccattccgctgggaacatcataggtgtggggcagtgcctcatctatggcctcacagtggtcctaagaaaaaagttcagcgcctcaagattctgggacgactgcattaagtacaattgtacagtggtgcagtatatcggcgaaatctgtcgatacttgctcaaacagccagtgagggaagccgagcggagacacagagtgcgattggccgtggggaacgggctgcgccctgctatatgggaagaatttacggaacgcttcggggtgcggcagatcggggaattttatggagctacagagtgcaattgcagtatcgcgaatatggacggtaaggtaggatcctgcggatttaactcacgcatcctcccgcatgtgtacccaattcggttggttaaagtcaatgaggatacaatggaactactcagggatgcccaggggctgtgtatcccctgccaggctggcgagcccggcctccttgttgggcagattaatcagcaggaccccctgaggcgttttgacgggtacgttagcgaatctgcaacttccaagaagatcgcacattcagtgttttctaagggcgatagcgcctacctcagtggcgatgtcctggtgatggacgaattagggtacatgtatttccgcgatcggtcaggggacactttccgctggcgcggcgagaacgtcagcaccaccgaagtggaaggtgtgctgagtaggttgctgggacagactgacgttgcggtttatggcgtggcagtaccgggggtcgagggtaaggctgggatggcagctgtggctgaccctcactctctcctggatcctaacgcaatctatcaggagctgcagaaggttcttgctccttacgcacgcccgatctttctgcggttgctaccacaggtcgatacaaccgggacatttaagatccagaaaacccggctgcagcgagagggtttcgaccccagacagacatctgatcggctattttttctggatctgaagcagggtcactatctacccctgaacgaggctgtgtataccagaatctgctcaggagcctttgccctctag

SEQ ID NO: 320599 - DNA, 1941 bp, Artificial Sequence
  derived and/or modified sequence
atgcgggcccccggcgccggcgccgccagcgtggtgagcctggcccttctctggttattgggactcccctggacttggtctgcagccgctgctttgggcgtttatgtggggtctggaggctggcgctttctgcgtattgtgtgtaagaccgctcggcgggatctgtttgggctctctgttctgatacgcgtgcgccttgagcttaggcgtcatcaaagagctggccatactatccctaggatttttcaagctgtcgttcagaggcagcccgagcgcttggcactggtcgatgcaggtacgggcgagtgctggacctttgctcagctggatgcgtactcaaatgctgttgctaacctctttcgtcagcttgggttcgccccaggagatgtggtcgccatatttttggaggggaggcctgagtttgtggggctatggctggggttagcgaaggcgggcatggaggccgccctcctgaacgtaaacttgcgaagggagccgctggccttctgcttagggaccagcggcgcaaaagcactgatttttgggggggagatggtggccgccgttgcggaggttagcgggcacctggggaaatccctgatcaagttttgctctggggatttggggcccgagggtattttgcccgatactcacctcttggatcctttgcttaaggaggccagcactgcacccttggctcaaattccctctaagggcatggacgaccgtctcttctatatctatacttctggcacaacaggtttgcctaaggctgctattgtggttcactccagatattaccggatggctgcctttgggcaccacgcgtatcgaatgcaggcagcagacgtgctgtatgactgtctgcctctgtaccacagcgcaggaaatatcataggcgttggccagtgcctgatatacggattaacagtggtgttgcgaaagaagttctctgccagtaggttttgggacgattgcataaagtataactgcacagtggtgcagtatatcggggaaatctgccgctatctccttaagcagccagtccgtgaggccgaaagacggcatagagtccggcttgctgtgggtaacggcctccgccccgccatctgggaagaattcactgaaagatttggtgttcgccagattggcgagttttacggggccacagaatgcaattgctcgattgcaaatatggacggcaaggtagggagctgtggatttaattctcgcatcctgcctcatgtgtatcctattaggctcgtgaaagtgaatgaggataccatggaactactaagggatgcccagggactctgtatcccttgccaagctggtgagcctggcttgctggtaggtcagattaatcaacaggacccactcaggcggttcgacggttacgtatctgagtcggccactagtaaaaagattgcgcacagcgttttctcaaaaggcgactccgcctatctgagcggcgacgtgctcgtgatggacgagctgggatacatgtacttccgagaccggtcaggagatacctttaggtggcggggggaaaatgtgtcgaccacagaggtggagggggtgctctcgaggcttctaggacagacagatgttgcagtctatggtgtggcagtgcccggcgtagagggaaaggctggaatggccgccgtggctgaccctcattcattattagacccaaatgccatctatcaggagcttcaaaaggtgctggcaccctacgctcgccctatcttcctgcgccttctgccgcaagtggacacgactggtactttcaaaattcagaagacgcggctgcagcgggaaggcttcgacccacgccagacgtcagatagactatttttcctcgatttaaaacaaggccattacctgccacttaacgaggctgtctacactcgaatttgttccggagcctttgccctttag

SEQ ID NO: 320600 - DNA, 1941 bp, Artificial Sequence
  derived and/or modified sequence
atgcgggcacctggcgcaggggctgcctccgttgttagcctggcactgctctggttgctcggactcccttggacttggtccgcagccgctgccctcggggtttatgtcggctcgggcggatggagattcttgagaatcgtgtgtaaaactgctagaagagacctctttggtctgtcagtgctgatcagggtgcgcctggaactccgccgacatcaacgggcagggcatacaattcctaggattttccaggcggtggtgcagcggcagcctgagagattagcattagtcgacgccggaacaggagagtgttggactttcgctcagctggacgcatatagtaacgccgtggctaacttattccgacagctcggtttcgcgcctggagatgtagttgcaatatttttggaaggcagacccgaatttgtgggactgtggctaggtcttgccaaggcgggtatggaagctgcacttctaaacgtcaacctgcggcgtgagcccctggccttttgcctggggacaagcggcgctaaggctctgatcttcggcggagaaatggtggccgcagtagctgaagtctctggccatcttgggaaatcactgattaagttctgttcaggggatcttggaccagaaggaattcttccagatacccatctgctggatcctttgctcaaagaggcttcaacagctccactggcgcagattccttccaaaggtatggacgacagactgttttacatctatacctctgggaccactggccttcccaaggccgcaatagtggtgcacagcaggtactatagaatggctgcttttggacatcatgcttacagaatgcaggcagcagacgtgttatatgattgcctgcccctatatcatagcgccggtaacattatcggagtgggccagtgtctgatatacggccttactgtggtgctgagaaagaaattctcggcatccaggttttgggacgactgtattaagtataattgcaccgtggtgcagtacattggagaaatatgtagatacttgctgaagcagccggtgcgcgaggctgaaaggcggcatagggtacgtcttgccgtaggtaacgggttaaggcccgcaatctgggaagagtttacagaaagatttggggtaagacagatcggagaattctatggtgccactgagtgcaactgcagtatcgccaatatggatggcaaggttggctcatgtggatttaactcacgaatcctgccgcatgtgtaccccatccggctggtgaaggtcaatgaagatactatggagttgctgagagacgcacaggggctgtgtattccatgtcaggccggagagcctgggctgctggtcggccagatcaaccagcaggacccactcagacggtttgacggttatgtgtctgagtcggcgacaagcaaaaagattgcacattccgttttctctaagggggatagcgcctacttgtccggagacgtgctagtcatggacgagctggggtatatgtatttcagagaccgtagcggcgacacattccgctggcgcggtgaaaacgtgtccaccacggaagtggagggtgtgctttctcgactccttgggcagaccgatgttgccgtctacggagtcgccgtccctggcgtcgaggggaaggcagggatggccgctgttgccgatccccatagcttgctcgacccaaacgccatctaccaggagctgcagaaggtgttggcaccatacgctaggccaatcttcctccgcctgctaccacaggtggatacaactggtacgttcaaaatccagaaaactaggctgcagcgggaggggtttgacccacggcagactagtgatagactcttcttccttgatctgaaacagggccattaccttccgctgaacgaggctgtttacacacgaatctgcagcggcgcatttgccctgtag

SEQ ID NO: 320601 - DNA, 1941 bp, Artificial Sequence
  derived and/or modified sequence
atgcgcgcacctggagccggtgccgctagtgtcgtatctcttgctttgctctggctgctgggactcccatggacatggtccgcggctgccgcactgggcgtctacgtgggctccggcggttggcgctttcttaggatcgtgtgcaagaccgctcgaagagacctgtttgggctctctgtgctgatccgagtgcggctagagctccgtagacaccagagagctgggcatacaattccccgaatctttcaggccgtggtacagcgacagcctgaaagactggcactcgtcgacgcaggcacaggggagtgctggacctttgcccaactggatgcttactctaacgccgtcgctaatttgttcaggcaactgggtttcgctcccggagatgtggtcgcaatatttctggaaggacggcctgaattcgtggggctttggcttggcctggctaaggccggaatggaagctgctctcctgaacgtcaacttacgcagggagccactcgccttctgcttgggcacgtctggggctaaggcactgatttttggaggggaaatggttgctgcagtggctgaagtgagtggacacctcggaaaaagtctcattaagttttgcagtggcgatctaggcccagaaggtatcctccccgacacgcatttattagaccctctgttgaaggaagcctctaccgcgcctctggcacagatccccagcaaggggatggacgatagactgttttatatctatacgtcgggcacaaccggtttgcccaaagccgcaatcgtggtgcatagccgctattatcggatggctgcttttggtcaccatgcgtaccggatgcaagctgccgatgtgttgtatgactgtctgcctctctatcactctgctggtaacattattggggtcggacagtgcttaatctacggacttaccgtagtgctccggaagaaattcagcgctagccgcttctgggacgactgcataaaatataattgcaccgttgtccagtatattggagaaatatgtagatacctgctcaagcagcccgtgagggaagccgaacggagacatcgggtgcggctggcagtgggaaatggtcttaggcctgccatttgggaagaatttactgagcgattcggcgtgagacagattggcgaattttacggggcaacggaatgcaattgtagcattgcaaacatggatggcaaggtgggtagctgcggctttaacagcaggatattaccacacgtttatcctatccgactggtcaaagtgaacgaagacaccatggagctgttacgcgatgcacagggactctgtattccctgtcaggcaggggaacccggacttctggtaggacagataaaccaacaggacccactacggagatttgacggctacgtttcagagagtgccacgtctaagaaaattgcccattccgtcttctctaagggcgattctgcgtacctcagcggagacgttcttgttatggacgagctgggctacatgtacttcagggatagatcgggggatacgtttcggtggcgaggagaaaacgtgtccacgaccgaggtagaaggcgtcctatctagactgctggggcagaccgacgtggcggtgtatggtgtggctgtgcccggagtggaaggaaaagcaggtatggcagcggtcgcggacccacattcgctactcgatcctaatgccatctatcaggagcttcagaaggtgctcgcaccgtacgcccgtcccattttcctgagattgcttccacaggtggacacaactgggacctttaaaatccagaagactagactgcagcgcgagggtttcgatccgcgacagaccagcgatagattgttctttctcgacctgaaacaggggcattatctgccattgaatgaggctgtttacacaagaatttgttctggggcttttgctttatag

SEQ ID NO: 320602 - DNA, 3547 bp, Artificial Sequence
  derived and/or modified sequence
ggggcggggctggagcggcccgcggcctcagctctctctgcttccccaggatgcgggctccgggtgcgggcgcggcctcggtggtctcgctggcgctgttgtggctgctggggctgccgtggacctggagcgcggcagcggcgctcggcgtgtacgtgggcagcggcggctggcgcttcctgcgcatcgtctgcaagaccgcgaggcgagacctcttcggtctctctgtgctgatccgcgtgcgcctggagctgcggcggcaccagcgtgccggccacaccatcccgcgcatctttcaggcggtagtgcagcgacagcccgagcgcctggcgctggtggatgccgggaccggcgagtgctggacctttgcgcagctggacgcctactccaatgcggtagccaacctcttccgccagctgggcttcgcgccgggcgacgtggtggccatcttcctggagggccggccggagttcgtggggctgtggctgggcctggccaaggcgggcatggaggccgcgctgctcaacgtgaacctgcggcgcgagcccctggccttctgcctgggcacctcgggcgctaaggccctgatctttggaggagaaatggtggcggcggtggccgaagtgagcgggcatctggggaaaagtttgatcaagttctgctctggagacttggggcccgagggcatcttgccggacacccacctcctggacccgctgctgaaggaggcctctactgcccccttggcacagatccccagcaagggcatggacgatcgtcttttctacatctacacgtcggggaccaccgggctgcccaaggctgccattgtcgtgcacagcaggtactaccgcatggcagccttcggccaccacgcctaccgcatgcaggcggctgacgtgctctatgactgcctgcccctgtaccactcggcaggaaacatcatcggcgtggggcagtgtctcatctatgggctgacagtcgtcctccgcaagaaattctcggccagccgcttctgggacgactgcatcaagtacaactgcacggtggttcagtacatcggggagatctgccgctacctgctgaagcagccggtgcgcgaggcggagaggcgacaccgcgtgcgcctggcggtggggaacgggctgcgtcctgccatctgggaggagttcacggagcgcttcggcgtacgccaaatcggggagttctacggcgccaccgagtgcaactgcagcattgccaacatggacggcaaggtcggctcctgtggtttcaacagccgcatcctgccccacgtgtaccccatccggctggtgaaggtcaatgaggacacaatggagctgctgcgggatgcccagggcctctgcatcccctgccaggccggggagcctggcctccttgtgggtcagatcaaccaacaggacccgctgcgccgcttcgatggctatgtcagcgagagcgccaccagcaagaagatcgcccacagcgtcttcagcaagggcgacagcgcctacctctcaggtgacgtgctagtgatggatgagctgggctacatgtacttccgggaccgtagcggggacaccttccgctggcgaggggagaacgtctccaccaccgaggtggagggcgtgctgagccgcctgctgggccagacagacgtggccgtctatggggtggctgttccaggagtggagggtaaggcagggatggcggccgtcgcagacccccacagcctgctggaccccaacgcgatataccaggagctgcagaaggtgctggcaccctatgcccggcccatcttcctgcgcctcctgccccaggtggacaccacaggcaccttcaagatccagaagacgaggctgcagcgagagggctttgacccacgccagacctcagaccggctcttcttcctggacctgaagcagggccactacctgcccttaaatgaggcagtctacactcgcatctgctcgggcgccttcgccctctgaagctgttcctctactggccacaaactctgggcctggtgggagaggccagcttgagccagacagcgctgcccaggggtggccgcctagtacacacccacctggccgagctgtacctggcacggcccatcctggactgagaaactggaacctcagaggaacccgtgcctctctgctgccttggtgcccctgtgtctgcctcctctccctgcttttcagcctctgtctccttccatccctgtccctgtctggccttaactcttccctctttttcttttctttctttctttcttttttttttaagatagagtctcactctgctgcccgggctagagtgcagtggtgggatctcggctcactgcaacctctgcctcctggggttcaagtgatcctcccacctcagcctcctgagtagctgggattacaggcacccgccaccacgtccagctaatttttatatttttagtagagacggggtttcaccatgttggtcaggttggtcttgaactcctgacctcaggtgatccgctggcctcggcctcccagagtgctgggattataggcgtgagcctctggcccggcctttcctttttcctctcctctcctgccgagagtggaacacgcgtgtcctgggagctgcatcttgtgtagggtccagctgcttttggggactgcaggaatcatctcccctgggccctggactcggactggggcctccccacctccctctcggctgtgccttacggagccccgatccaggcctcctgtggctgttgggttccagatgctgcagctccatgtgacttccaagcaggccctccgccctccctgctgaatggaggagccgggggtcccccaggccaactggaaaatctcccaggctaggccaattgccttttgcacttccccgttcctgtcacatttccccagccccaccttcccctcctgatgccctgaaagcttccggaattgactgtgaccacttggatgtcaccactgtcagcccctgccttgatgtccccatttagccatctccatggagctcctgctggagggccctgaaccctgcactgcgtggctgcccagccagctgcctcctgtcctgggaggaggcctcctgggtgtcctcatctggtgtgtctactggagggtcccacaggagaggcagcagaggggtcaggggaggtctcctgccgggggttggcctctcaagcctcaggggttctagcctgttgaatataccccacctggtggtggcccctccgatgtccccactgatggctctgacaccgtgttggtggcgatgtcccagacaatcccaccaggacggcccagacatccctactggcttcgctggtggctcatctcgaacatccacgccagcctttctggggccggccacccaggccgcctgtccgtctgtcctccctccagcagcaccccctggcccctggagtggtggggccatggcaagagacaccgtggcgtctcatgtgaactttcctgggcactgtggttttatttcctaattgatttaagaaataaacctgaagaccgtc

SEQ ID NO: 320603 - DNA, 2184 bp, Artificial Sequence
  derived and/or modified sequence
aacgctggaaaggtcggccaaggagagcagaaaacaagcagtggtggagtcggcagtggggcagaggagggggagctggaagggaaggaccccaaagcagaagcccgcacagtaggcacagcgcacccaagaagggtccaggagtctgcagaaacagaaaggtccccggcctcagcctcctagtccctgcctgcctcctgcctgagcttctgggagactgaaggcacggcttgcagcttcaggatgcgggctccgggtgcgggcgcggcctcggtggtctcgctggcgctgttgtggctgctggggctgccgtggacctggagcgcggcagcggcgctcggcgtgtacgtgggcagcggcggctggcgcttcctgcgcatcgtctgcaagaccgcgaggcgagacctcttcggtctctctgtgctgatccgcgtgcgcctggagctgcggcggcaccagcgtgccggccacaccatcccgcgcatctttcaggcggtagtgcagcgacagcccgagcgcctggcgctggtggatgccgggaccggcgagtgctggacctttgcgcagctggacgcctactccaatgcggtagccaacctcttccgccagctgggcttcgcgccgggcgacgtggtggccatcttcctggagggccggccggagttcgtggggctgtggctgggcctggccaaggcgggcatggaggccgcgctgctcaacgtgaacctgcggcgcgagcccctggccttctgcctgggcacctcgggcgctaaggccctgatctttggaggagaaatggtggcggcggtggccgaagtgagcgggcatctggggaaaagtttgatcaagttctgctctggagacttggggcccgagggcatcttgccggacacccacctcctggacccgctgctgaaggaggcctctactgcccccttggcacagatccccagcaagggcatggacgatcgtcttttctacatctacacgtcggggaccaccgggctgcccaaggctgccattgtcgtgcacagcaggtactaccgcatggcagccttcggccaccacgcctaccgcatgcaggcggctgacgtgctctatgactgcctgcccctgtaccactcggcaggaaacatcatcggcgtggggcagtgtctcatctatgggctgacagtcgtcctccgcaagaaattctcggccagccgcttctgggacgactgcatcaagtacaactgcacggtggttcagtacatcggggagatctgccgctacctgctgaagcagccggtgcgcgaggcggagaggcgacaccgcgtgcgcctggcggtggggaacgggctgcgtcctgccatctgggaggagttcacggagcgcttcggcgtacgccaaatcggggagttctacggcgccaccgagtgcaactgcagcattgccaacatggacggcaaggtcggctcctgtggtttcaacagccgcatcctgccccacgtgtaccccatccggctggtgaaggtcaatgaggacacaatggagctgctgcgggatgcccagggcctctgcatcccctgccaggccggggagcctggcctccttgtgggtcagatcaaccaacaggacccgctgcgccgcttcgatggctatgtcagcgagagcgccaccagcaagaagatcgcccacagcgtcttcagcaagggcgacagcgcctacctctcaggtgacgtgctagtgatggatgagctgggctacatgtacttccgggaccgtagcggggacaccttccgctggcgaggggagaacgtctccaccaccgaggtggagggcgtgctgagccgcctgctgggccagacagacgtggccgtctatggggtggctgttccaggagtggagggtaaggcagggatggcggccgtcgcagacccccacagcctgctggaccccaacgcgatataccaggagctgcagaaggtgctggcaccctatgcccggcccatcttcctgcgcctcctgccccaggtggacaccacaggcaccttcaagatccagaagacgaggctgcagcgagagggctttgacccacgccagacctcagaccggctcttcttcctggacctgaagcagggccactacctgcccttaaatgaggcagtctacactcgcatctgctcgggcgccttcgccctctga

SEQ ID NO: 320604 - DNA, 1941 bp, Artificial Sequence
  derived and/or modified sequence
atgagagcccccggcgccggcgccgccagcgtggtgagcctggccctgctgtggctgctgggcctgccctggacctggagcgccgccgccgccctgggcgtgtacgtgggcagcggcggctggagattcctgagaatcgtgtgcaagaccgccagaagagacctgttcggcctgagcgtgctgatcagagtgagactggagctgagaagacaccagagagccggccacaccatccccagaatcttccaggccgtggtgcagagacagcccgagagactggccctggtggacgccggcaccggcgagtgctggaccttcgcccagctggacgcctacagcaacgccgtggccaacctgttcagacagctgggcttcgcccccggcgacgtggtggccatcttcctggagggcagacccgagttcgtgggcctgtggctgggcctggccaaggccggcatggaggccgccctgctgaacgtgaacctgagaagagagcccctggccttctgcctgggcaccagcggcgccaaggccctgatcttcggcggcgagatggtggccgccgtggccgaggtgagcggccacctgggcaagagcctgatcaagttctgcagcggcgacctgggccccgagggcatcctgcccgacacccacctgctggaccccctgctgaaggaggccagcaccgcccccctggcccagatccccagcaagggcatggacgacagactgttctacatctacaccagcggcaccaccggcctgcccaaggccgccatcgtggtgcacagcagatactacagaatggccgccttcggccaccacgcctacagaatgcaggccgccgacgtgctgtacgactgcctgcccctgtaccacagcgccggcaacatcatcggcgtgggccagtgcctgatctacggcctgaccgtggtgctgagaaagaagttcagcgccagcagattctgggacgactgcatcaagtacaactgcaccgtggtgcagtacatcggcgagatctgcagatacctgctgaagcagcccgtgagagaggccgagagaagacacagagtgagactggccgtgggcaacggcctgagacccgccatctgggaggagttcaccgagagattcggcgtgagacagatcggcgagttctacggcgccaccgagtgcaactgcagcatcgccaacatggacggcaaggtgggcagctgcggcttcaacagcagaatcctgccccacgtgtaccccatcagactggtgaaggtgaacgaggacaccatggagctgctgagagacgcccagggcctgtgcatcccctgccaggccggcgagcccggcctgctggtgggccagatcaaccagcaggaccccctgagaagattcgacggctacgtgagcgagagcgccaccagcaagaagatcgcccacagcgtgttcagcaagggcgacagcgcctacctgagcggcgacgtgctggtgatggacgagctgggctacatgtacttcagagacagaagcggcgacaccttcagatggagaggcgagaacgtgagcaccaccgaggtggagggcgtgctgagcagactgctgggccagaccgacgtggccgtgtacggcgtggccgtgcccggcgtggagggcaaggccggcatggccgccgtggccgacccccacagcctgctggaccccaacgccatctaccaggagctgcagaaggtgctggccccctacgccagacccatcttcctgagactgctgccccaggtggacaccaccggcaccttcaagatccagaagaccagactgcagagagagggcttcgaccccagacagaccagcgacagactgttcttcctggacctgaagcagggccactacctgcccctgaacgaggccgtgtacaccagaatctgcagcggcgccttcgccctgtag

SEQ ID NO: 320605 - protein, 13 aa, Artificial Sequence
  derived and/or modified sequence
LAHPFSLAVFEDK

SEQ ID NO: 320606 - DNA, 843 bp, Artificial Sequence
  derived and/or modified sequence
atgtgccccccccaggcccaggccgaggtgggccccaccatgaccgagaaggccgagatggtgtgcgcccccagccccgcccccgcccccccccccaagcccgccagccccggccccccccaggtggaggaggtgggccacagaggcggcagcagcccccccagactgccccccggcgtgcccgtgatcagcctgggccacagcagaccccccggcgtggccatgcccaccaccgagctgggcaccctgagaccccccctgctgcagctgagcaccctgggcaccgccccccccaccctggccctgcactaccacccccaccccttcctgaacagcgtgtacatcggccccgccggccccttcagcatcttccccagcagcagactgaagagaagacccagccactgcgagctggacctggccgagggccaccagccccagaaggtggccagaagagtgttcaccaacagcagagagagatggagacagcagaacgtgaacggcgccttcgccgagctgagaaagctgctgcccacccacccccccgacagaaagctgagcaagaacgaggtgctgagactggccatgaagtacatcggcttcctggtgagactgctgagagaccaggccgccgccctggccgccggccccaccccccccggccccagaaagagacccgtgcacagagtgcccgacgacggcgccagaagaggcagcggcagaagagccgaggccgccgccagaagccagcccgccccccccgccgaccccgacggcagccccggcggcgccgccagacccatcaagatggagcagaccgccctgagccccgaggtgagatag

SEQ ID NO: 320607 - DNA, 843 bp, Artificial Sequence
  derived and/or modified sequence
atgtgccccccccaggcccaggcggaggtgggcccaactatgaccgagaaggctgaaatggtttgcgccccaagtcctgctcccgctcctcctccaaagcctgctagcccaggcccaccacaggtagaggaggtcggtcacagaggcggttcctctccccctaggttacctccaggggttcccgtgattagcctgggccacagccgcccccctggcgtggcgatgcccaccactgaactgggtaccttacggccaccattgctgcaactgagcacccttggtacagcaccaccgaccctcgccctccactatcaccctcacccattcctcaactcagtgtacatcgggcctgcagggcccttttcgatcttcccctcgagccggcttaagagacgaccctctcattgtgagctggacctggctgagggccaccagccacagaaggtggcacggagagtgtttactaattccagagaaagatggcgccagcagaatgttaacggtgccttcgccgagctgagaaagttgctccctacccaccccccagatcggaagctgtcaaagaacgaggtgctacgccttgcaatgaaatatatcggttttctggtcaggctgttaagagaccaggcggctgccctggccgccggtcctactccacccggaccaaggaagcgtcccgtccatcgggtgcctgacgacggcgcccgacgcggatccggcagaagagctgaggcggccgcgcgctcccaacccgcaccacctgcagacccggacggaagcccgggcggcgctgctcggcccattaagatggaacagaccgcactgtctcccgaagtgcgatag

SEQ ID NO: 320608 - DNA, 843 bp, Artificial Sequence
  derived and/or modified sequence
atgtgccccccccaggcccaggccgaggtgggccccaccatgacagagaaggccgagatggtgtgtgcccccagccctgccccagcccccccacccaagccagccagccctggccccccccaggtggaggaggtgggccacagaggaggcagcagccccccccggctgcccccaggagtgcctgtgatcagcctgggccacagccggcccccaggagtggccatgcccaccacagagctgggcaccctgcggccccccctgctgcagctgagcaccctgggcacagccccacccaccctggccctgcactaccacccccaccccttcctgaacagcgtgtacatcggccctgctggccccttcagcatcttccccagcagccggctgaagagaagacccagccactgtgagctggacctggccgagggccaccagccccagaaggtggcccggcgggtcttcaccaacagccgggagcgctggaggcagcagaatgtgaatggagcctttgctgagctgaggaagctgctgcccacccaccccccagacaggaagctgagcaagaatgaggtgctgcggctggccatgaagtacatcggcttcctggtgcggctgctgcgggaccaggccgccgccctggccgccggccccaccccacctggccccaggaagaggcctgtgcaccgggtgcctgatgatggagcccggcggggcagcggcagaagagctgaggccgccgcccggagccagcctgcccctcctgctgaccctgatggcagccctggaggagctgcccggcccatcaagatggagcagacagccctgagccctgaggtgaggtag

SEQ ID NO: 320609 - DNA, 843 bp, Artificial Sequence
  derived and/or modified sequence
atgtgccccccccaggcccaggccgaggtgggccccaccatgaccgaaaaggctgaaatggtgtgtgccccgagtccagccccggcccccccacctaagccggcctcccccggtccccctcaggtggaggaagtgggacaccggggtggctcatcccccccaagacttcctcccggtgtcccggtcataagcctcggccatagccgcccccctggagtggccatgccaaccaccgagctgggaacgctgcgcccccccctgctacaactttccacacttggtacagccccaccaaccctggccctgcactaccacccacaccccttcctcaatagcgtttatattgggccagctggaccattttccatctttccttcaagcaggctaaaacggcgccccagccattgtgagctggacctggcagaaggacaccagccgcagaaggtggctcggagggtcttcacaaactctagagaacggtggagacagcagaacgttaacggcgcgtttgccgaactgcgcaagctcctgccaactcatcctccagatcgcaagttgtctaagaatgaggtactccggctggctatgaagtacatcggtttcctggttagacttctcagagaccaggccgccgcactggcagctggacctactccccccgggcctagaaagagaccggttcaccgcgtccccgacgacggggcacggagaggctctggccgccgcgctgaggccgccgccagatcacagcctgcaccccctgccgaccccgacggcagccctggaggcgcagccaggcctatcaagatggaacagacagctctttcccccgaggtgcgctag

SEQ ID NO: 320610 - DNA, 843 bp, Artificial Sequence
  derived and/or modified sequence
atgtgtcccccacaggcacaagcagaggttggcccaacaatgaccgaaaaagctgaaatggtttgcgccccatcccccgcacctgcaccccctcccaagcccgctagccccggacccccacaagtcgaagaggtggggcatagaggcggttcatcgccgcctcggctgccacctggtgttcccgtcatctctctcggccactcaaggccacctggagttgccatgcctacaaccgaactcgggacgctgaggccacccctcctccagttatccacattgggtaccgcccctccaactctcgcgctgcattatcaccctcacccttttttaaattcagtatatatcggccctgccggaccattttccatttttccctcaagcaggctcaaacggcgtccctcacactgcgagctggatctcgccgaaggccaccagccgcagaaggttgcacgtcgcgttttcaccaactcccgtgagcggtggcgccagcaaaatgtcaacggcgcttttgctgaattgagaaagctcttacccactcacccaccagataggaaactcagcaagaatgaagtcctccgactggccatgaagtacattggtttcctggtgaggctactgcgcgatcaggccgcagccctcgcagccggaccaaccccacccggaccacgcaaacggcctgtccatagagtccccgacgacggtgctagacgtggatcgggacgtcgtgctgaggcggctgcccgttcccagccagcccctcctgcagacccggatgggagcccgggaggtgctgcacggcctatcaaaatggaacagaccgctttgagccccgaagtcagatag

SEQ ID NO: 320611 - protein, 187 aa, Artificial Sequence
  derived and/or modified sequence
  misc_feature (1)..(1): Xaa can be any naturally occurring amino acid
XRGGGDSYGVLLSNALARLRGFKDHFTFCQQLNISICPLSQTAARFQVIVYNPLGRKVNWMVRLPVSEGVFVVKDPNGRTVPSDVVIFPSSDSQAHPPELLFSASLPALGFSTYSVAQVPRWKPQARAPQPIPRRSWSPALTIENEHIRATFDPDTGLLMEIMNMNQQLLLPVRQTFFWYNASIGDN

SEQ ID NO: 320612 - protein, 16 aa, Artificial Sequence
  derived and/or modified sequence
HLVLLDTAQAAAAGHR

SEQ ID NO: 320613 - DNA, 558 bp, Artificial Sequence
  derived and/or modified sequence
cgcggcggcggcgacagctacggcgtgctgctgagcaacgccctggcccgcctgcgcggcttcaaggaccacttcaccttctgccagcagctgaacatcagcatctgccccctgagccagaccgccgcccgcttccaggtgatcgtgtacaaccccctgggccgcaaggtgaactggatggtgcgcctgcccgtgagcgagggcgtgttcgtggtgaaggaccccaacggccgcaccgtgcccagcgacgtggtgatcttccccagcagcgacagccaggcccacccccccgagctgctgttcagcgccagcctgcccgccctgggcttcagcacctacagcgtggcccaggtgccccgctggaagccccaggcccgcgccccccagcccatcccccgccgcagctggagccccgccctgaccatcgagaacgagcacatccgcgccaccttcgaccccgacaccggcctgctgatggagatcatgaacatgaaccagcagctgctgctgcccgtgcgccagaccttcttctggtacaacgccagcatcggcgacaac

SEQ ID NO: 320614 - DNA, 564 bp, Artificial Sequence
  derived and/or modified sequence
tgaagaggcggcggcgacagctacggcgtgctgctgagcaacgccctggccagactgagaggcttcaaggaccacttcaccttctgccagcagctgaacatcagcatctgccccctgagccagaccgccgccagattccaggtgatcgtgtacaaccccctgggcagaaaggtgaactggatggtgagactgcccgtgagcgagggcgtgttcgtggtgaaggaccccaacggcagaaccgtgcccagcgacgtggtgatcttccccagcagcgacagccaggcccacccccccgagctgctgttcagcgccagcctgcccgccctgggcttcagcacctacagcgtggcccaggtgcccagatggaagccccaggccagagccccccagcccatccccagaagaagctggagccccgccctgaccatcgagaacgagcacatcagagccaccttcgaccccgacaccggcctgctgatggagatcatgaacatgaaccagcagctgctgctgcccgtgagacagaccttcttctggtacaacgccagcatcggcgacaactag

SEQ ID NO: 320615 - DNA, 564 bp, Artificial Sequence
  derived and/or modified sequence
tgacgcggaggcggggactcatacggcgtcttgctctcaaacgcgctggccagacttaggggcttcaaggatcacttcaccttctgccagcagttaaatataagcatatgtcccctctcacagacagccgctaggttccaggttattgtgtataatcctctggggcgcaaggtgaactggatggtcaggctgccagtatctgaaggggtgttcgtggtcaaggacccaaatggacgaaccgtcccaagcgacgttgtgatcttcccctcaagcgacagccaggcgcatccccccgaactccttttttccgcaagcttaccggccctgggcttctctacatactcagtggctcaggtgccacggtggaagcctcaagccagggcccctcagcctatcccacggagaagttggtcacctgccctcaccattgagaacgagcacattagagcgaccttcgaccccgacactgggctgctcatggaaattatgaatatgaaccagcagctcctcctgcccgtacgtcaaaccttcttttggtataacgccagtattggagacaactag

SEQ ID NO: 320616 - DNA, 564 bp, Artificial Sequence
  derived and/or modified sequence
tgaagaggaggaggagacagctatggagtgctgctgagcaatgccctggcccggctgcggggcttcaaggaccacttcaccttctgccagcagctgaacatcagcatctgccccctgagccagacagctgcccgcttccaggtgattgtgtacaaccccctgggcaggaaggtgaactggatggtgcggctgcctgtgtctgaaggagtgtttgtggtgaaggaccccaatggaagaacagtgcccagtgatgtggtgatcttccccagcagtgacagccaggcccaccccccagagctgctcttcagcgccagcctgcctgccctgggcttcagcacctacagcgtggcccaggtgccccgctggaagccccaggcccgggccccccagcccatcccccggcgctcctggagccctgccctgaccattgaaaatgagcacatccgggccacctttgatcctgacaccggcctgctgatggagatcatgaacatgaaccagcagctgctgctgcctgtgcggcagaccttcttctggtacaatgccagcatcggggacaactag

SEQ ID NO: 320617 - DNA, 564 bp, Artificial Sequence
  derived and/or modified sequence
tgacggggcggcggcgacagctacggcgtgctgctgagcaacgccttggccaggctgaggggatttaaggaccacttcactttttgccagcagcttaatatatctatctgtcccctgtctcagacagccgcccgcttccaggtgatcgtctacaatccactaggaagaaaagtgaactggatggtccgattgcctgtaagtgaaggcgtcttcgtcgtgaaagaccctaacggacggacggtgcccagtgacgtcgtgatattcccatcgtccgattcccaggcacatcctccggagttactgttcagcgcctccctgcctgctctgggcttctccacatatagcgtagcccaggtgccacgctggaagcctcaggcccgagctccccagccaatcccacgccgatcctggtctccggccttgacgattgaaaatgaacatatacgcgctaccttcgatcccgataccggactcctgatggagattatgaacatgaatcagcagctcctactgccagtacggcagacgttcttttggtataatgccagcattggagacaactag

SEQ ID NO: 320618 - DNA, 564 bp, Artificial Sequence
  derived and/or modified sequence
taacggggaggaggggatagctatggcgttctgctgtcaaacgcacttgccaggctgcgcggattcaaggatcacttcactttctgtcagcaactgaatatttcgatctgtccactgtcacagacagctgcacgatttcaagtaatcgtttacaaccccctgggaaggaaggttaactggatggtgcggctccctgtctccgaaggcgtgtttgttgtcaaggacccgaatgggcgaactgttcctagtgacgtggttattttcccatccagcgatagtcaagcccatcccccagaactgctgttctctgcatcactgccggcattggggttctctacgtactccgtggcccaggtgccacgctggaagccgcaggccagagcccctcagcccatcccgaggcggtcctggtccccagcgctgacaatcgaaaacgagcacatccgggctacctttgaccccgacacagggctcttgatggaaatcatgaacatgaaccagcagctgctgctgccagtaagacagacattcttttggtataacgcttcgatcggcgataattag

SEQ ID NO: 320619 - DNA, 560 bp, Artificial Sequence
  derived and/or modified sequence
aagaggaggcggagacagctatggggttcttctgagcaacgcgctggcgcggctcagaggcttcaaagatcacttcaccttttgccaacagctaaacatcagcatctgcccgctcagccagacggcggcgcgcttccaggtcatcgtttataatcccctggggcggaaggtgaattggatggtacggctgccggtcagcgaaggcgttttcgttgtgaaggaccccaatggcaggacagtgcccagcgatgtggtaatatttcccagctcagacagccaggcgcaccctccggagctgctgttctcagcctcactgcccgccctgggcttcagcacctattcagtagcccaggtgcctcgctggaagccccaggcccgcgcaccacagcccatccccagaagatcctggtcccctgctttaaccatcgaaaatgagcacatccgggcaacgtttgatcctgacacagggctgttgatggagattatgaacatgaatcagcaactcctgctgcctgttcgccagaccttcttctggtacaacgccagtataggtgacaacg

SEQ ID NO: 320620 - protein, 507 aa, Artificial Sequence
  derived and/or modified sequence
MAGRGSLVSWRAFHGCDSAEELPRVSPRFLRAWHPPPVSARMPTRRWAPGTQCITKCEHTRPKPGELAFRKGDVVTILEACENKSWYRVKHHTSGQEGLLAAGALREREALSADPKLSLMPWFHGKISGQEAVQQLQPPEDGLFLVRESARHPGDYVLCVSFGRDVIHYRVLHRDGHLTIDEAVFFCNLMDMVEHYSKDKGAICTKLVRPKRKHGTKSAEEELARAGWLLNLQHLTLGAQIGEGEFGAVLQGEYLGQKVAVKNIKCDVTAQAFLDETAVMTKMQHENLVRLLGVILHQGLYIVMEHVSKGNLVNFLRTRGRALVNTAQLLQFSLHVAEGMEYLESKKLVHRDLAARNILVSEDLVAKVSDFGLAKAERKGLDSSRLPVKWTAPEALKHGKFTSKSDVWSFGVLLWEVFSYGRAPYPKMSLKEVSEAVEKGYRMEPPEGCPGPVHVLMSSCWEAEPARRPPFRKLAEKLARELRSAGAPASVSGQDADGSTSPRSQEP

SEQ ID NO: 320621 - DNA, 1524 bp, Artificial Sequence
  derived and/or modified sequence
atggctggcaggggttccctagtgtcatggagagcttttcacggttgcgactccgcagaggagctccccagggttagtcccagattcctgcgagcctggcacccaccacccgtctccgcaagaatgccgactagacgttgggctcccggaacgcagtgtatcacaaaatgtgaacacacaagacccaagccgggagagttggcgtttagaaaaggcgacgtcgtgactattttagaagcgtgcgaaaataagtcatggtatcgggtcaagcaccatacctcaggccaggaaggtctactggcggctggggccttacgggaaagagaagcacttagtgcagaccccaaactcagtctaatgccttggtttcacggcaaaatcagcggacaagaggcggtgcagcaattacagccacccgaggacggactctttttggtgcgagagagtgcccgccaccctggagactacgtgttgtgcgtgtcttttggaagggacgtcatacactacagagtgctacaccgagatggccatctgacaattgatgaggccgtcttcttttgtaacctgatggatatggttgagcactactcaaaagacaaaggggccatttgcacaaagttggtccgcccgaagcggaaacacgggacaaaatcggcagaggaggaactggcccgcgcaggttggctgctgaacctccaacacctcaccctgggcgctcagattggggagggggaatttggcgcggtactccagggagagtaccttgggcaaaaggtcgctgttaagaacattaaatgcgatgtcaccgcccaggccttccttgacgagacagctgtaatgactaagatgcagcacgaaaacctggtacgcctgctgggcgtgatccttcatcaggggctctatatagtgatggagcacgtcagcaaagggaacctcgtgaattttctccggacacgcggcagggccttagtgaataccgcccaactcctgcagttttccttacacgtggccgagggtatggaatatctggagagtaaaaaacttgtgcaccgcgacttagcagctcgaaacattttggtgtccgaagacctggtggccaaggtgagtgattttggtttagctaaggcagaaagaaaaggcctcgactctagtagactgcctgttaagtggacggctcctgaagcactgaaacatgggaaattcacctctaaatccgacgtgtggtccttcggagtcctgctgtgggaggtcttttcttacggtcgcgccccctaccccaagatgtcactgaaggaagtgtccgaggctgtggagaagggttatcgcatggagccgcctgagggctgcccaggtcccgtccatgtgctcatgtcctcgtgttgggaggcagaacccgcgaggcgaccccctttcagaaagctggctgagaaacttgccagggagctgagaagcgccggggctccagcgtccgtgtccggtcaagacgcagatggctccacctccccccggtcacaggagccatag

SEQ ID NO: 320622 - DNA, 1401 bp, Artificial Sequence
  derived and/or modified sequence
atgcccacaaggcgctgggcgcctgggacccagtgcattactaaatgcgaacacacaagaccaaaaccgggagagctggcattccgcaagggcgatgtcgtgacgatcctcgaagcctgtgagaacaaatcctggtatcgcgtgaaacaccataccagcggccaggagggactgctagcagctggcgccctccgagagcgagaagctctctccgccgatcccaaactgtccctgatgccatggtttcatgggaaaatttctggacaagaggccgtgcagcaattgcagccacctgaggacggactattcttggtgcgcgagagcgcccgccatcccggcgactacgtgctgtgcgtaagctttggaagggatgtgatacactatcgggtgctgcatcgggacggacacctcacgatcgacgaggccgtttttttctgtaacttgatggatatggttgaacactatagcaaggataagggcgccatctgcaccaaactggtgcgtcccaaacgtaagcacggcactaaatcagccgaagaggaattggcccgagcagggtggctgctgaatctgcagcacttaaccctgggcgctcagattggtgagggcgaattcggtgccgtgcttcagggagaataccttgggcagaaggtggctgttaaaaatatcaagtgcgatgtaaccgcacaggcatttctggatgagaccgctgtcatgacaaagatgcagcacgagaacctggtgcggctgcttggcgttattctgcaccaaggcttgtacattgttatggaacatgtatccaaagggaacctcgttaattttctgagaacacgaggccgtgccctagtcaataccgcccagctcttgcagttttctttacatgtggccgagggcatggaatacctggagtcaaagaaactcgtgcatcgggacctcgcagcacgcaatatcctcgtctcagaggatctggtcgcgaaggtctctgactttggcctcgcgaaggctgagagaaaggggttggactcctcgcggctgcctgtgaaatggacggcccctgaagcacttaagcatggcaaattcacatcaaagtctgatgtttggtcatttggcgtgttactgtgggaggtattttcttacggtagagccccttaccctaaaatgagcctgaaggaagtatctgaggccgtggagaagggctaccgcatggagccaccggaaggatgtcctggaccagttcacgtgctgatgagtagctgctgggaggcagaaccggcaaggagaccccctttcaggaagctggctgagaaattggcccgggaactgcgctcagccggcgctcctgcttccgtaagcggacaagatgccgacggctcgacctcacctagatctcaggaaccatag

SEQ ID NO: 320623 - DNA, 1524 bp, Artificial Sequence
  derived and/or modified sequence
atggccggccggggcagcctggtgtcctggagggccttccacggctgtgacagcgctgaggagctgccccgggtgagcccccgcttcctgcgggcctggcaccccccacctgtgtctgccaggatgcccacccggcgctgggcccctggcacccagtgcatcaccaagtgtgagcacacccggcccaagccaggagagctggccttcagaaaaggagatgtggtgaccatcctggaggcctgtgagaacaagtcctggtacagagtgaagcaccacaccagcggccaggagggcctgctggccgccggggccctgcgggagcgggaggccctgtctgctgaccccaagctgagcctgatgccctggttccacggcaagatcagcggccaggaggccgtgcagcagctgcagcccccagaagatggcctcttcctggtgcgggagagcgcccggcaccctggggactatgtgctgtgtgtgtcctttggaagagatgtgatccactacagagtgctgcacagagatggccacctgaccattgatgaagctgtgttcttctgcaacctgatggacatggtggagcactacagcaaggacaagggggccatctgcaccaagctggtgcggcccaagaggaagcacggcaccaagtctgctgaggaggagctggcccgggccggctggctgctgaacctgcagcacctgaccctgggcgcccagattggagagggggagtttggagctgtgctgcagggcgagtacctgggccagaaggtggccgtgaagaacatcaagtgtgatgtgacagcccaggccttcctggatgaaacagctgtgatgaccaagatgcagcacgagaacctggtgcggctgctgggcgtcatcctgcaccagggcctgtacatcgtgatggagcacgtgtccaaaggaaacctggtgaacttcctgcggacccggggccgggccctggtgaacacagcccagctgctgcagttcagcctgcacgtggccgagggcatggagtacctggagagcaagaagctggtgcaccgggacctggccgccaggaacatcctggtgtctgaggacctggtggccaaggtgtctgactttggcctggccaaggccgagaggaagggcctggacagcagccggctgcctgtgaagtggacagcccctgaggccctgaagcacggcaagttcaccagcaagagtgatgtgtggagctttggagtgctgctgtgggaggtgttctcctatggccgggccccctaccccaagatgagcctgaaggaggtgtctgaggccgtggagaagggctacaggatggagcccccagagggctgccccggccctgtgcacgtgctgatgagcagctgctgggaggccgagcccgcccggcggccccccttcaggaagctggccgagaagctggcccgggagctgcggtctgctggggccccagcctctgtgtctggccaggatgctgatggcagcaccagccccaggagccaggagccctag

SEQ ID NO: 320624 - DNA, 1401 bp, Artificial Sequence
  derived and/or modified sequence
atgcccacccggcgctgggcccctggcacccagtgcatcaccaagtgtgagcacacccggcccaagccaggagagctggccttcagaaaaggagatgtggtgaccatcctggaggcctgtgagaacaagtcctggtacagagtgaagcaccacaccagcggccaggagggcctgctggccgccggggccctgcgggagcgggaggccctgtctgctgaccccaagctgagcctgatgccctggttccacggcaagatcagcggccaggaggccgtgcagcagctgcagcccccagaagatggcctcttcctggtgcgggagagcgcccggcaccctggggactatgtgctgtgtgtgtcctttggaagagatgtgatccactacagagtgctgcacagagatggccacctgaccattgatgaggccgtgttcttctgcaacctgatggacatggtggagcactacagcaaggacaagggggccatctgcaccaagctggtgcggcccaagaggaagcacggcaccaagtctgctgaggaggagctggcccgggccggctggctgctgaacctgcagcacctgaccctgggcgcccagatcggggagggggagtttggagctgtgctgcagggcgagtacctgggccagaaggtggccgtgaagaacatcaagtgtgatgtgacagcccaggccttcctggatgaaacagctgtgatgaccaagatgcagcacgagaacctggtgcggctgctgggcgtcatcctgcaccagggcctgtacatcgtgatggagcacgtgtccaagggcaacctggtgaacttcctgcggacccggggccgggccctggtgaacacagcccagctgctgcagttcagcctgcacgtggccgagggcatggagtacctggagagcaagaagctggtgcaccgggacctggccgccaggaacatcctggtgtctgaggacctggtggccaaggtgtctgactttggcctggccaaggccgagaggaagggcctggacagcagccggctgcctgtgaagtggacagcccctgaggccctgaagcacggcaagttcaccagcaagagtgatgtgtggagctttggagtgctgctgtgggaggtgttctcctatggccgggccccctaccccaagatgagcctgaaggaggtgtctgaggccgtggagaagggctacaggatggagcccccagagggctgccccggccctgtgcacgtgctgatgagcagctgctgggaggccgagcccgcccggcggccccccttcaggaagctggccgagaagctggcccgggagctgcggtctgctggggccccagcctctgtgtctggccaggatgctgatggcagcaccagccccaggagccaggagccctag

SEQ ID NO: 320625 - DNA, 2137 bp, Artificial Sequence
  derived and/or modified sequence
gggccggcggcggcggcggcgcgcggaggagaccgcagtgcggccggcgctaggacccgcgggggcctcccaggccgcggcgcctcccgctttcccccactccccgacccttcttcgcccccaaaatgaggaaacggagcaactcgctccaagttgtgcagccgggaccgcctcggggtgtgcagccggctcgcggaggccctcctgggggcgggcgcggggcgcggctcgggggcgccccctgagcagaaaacaggaagaaccaggctcggtccagtggcacccagctccctacctcctgtgccagccgactggcctgtggcaggccattcccagcgtccccgactgtgaccacttgctcagtgtgcctctcacctgcctcagtttccctctgggggcgatggcggggcgaggctctctggtttcctggcgggcatttcacggctgtgattctgctgaggaacttccccgggtgagcccccgcttcctccgagcctggcacccccctcccgtctcagccaggatgccaacgaggcgctgggccccgggcacccagtgtatcaccaaatgcgagcacacccgccccaagccaggggagctggccttccgcaagggcgacgtggtcaccatcctggaggcctgcgagaacaagagctggtaccgcgtcaagcaccacaccagtggacaggaggggctgctggcagctggggcgctgcgggagcgggaggccctctccgcagaccccaagctcagcctcatgccgtggttccacgggaagatctcgggccaggaggctgtccagcagctgcagcctcccgaggatgggctgttcctggtgcgggagtccgcgcgccaccccggcgactacgtcctgtgcgtgagctttggccgcgacgtcatccactaccgcgtgctgcaccgcgacggccacctcacaatcgatgaggccgtgttcttctgcaacctcatggacatggtggagcattacagcaaggacaagggcgctatctgcaccaagctggtgagaccaaagcggaaacacgggaccaagtcggccgaggaggagctggccagggcgggctggttactgaacctgcagcatttgacattgggagcacagatcggagagggagagtttggagctgtcctgcagggtgagtacctggggcaaaaggtggccgtgaagaatatcaagtgtgatgtgacagcccaggccttcctggacgagacggccgtcatgacgaagatgcaacacgagaacctggtgcgtctcctgggcgtgatcctgcaccaggggctgtacattgtcatggagcacgtgagcaagggcaacctggtgaactttctgcggacccggggtcgagccctcgtgaacaccgctcagctcctgcagttttctctgcacgtggccgagggcatggagtacctggagagcaagaagcttgtgcaccgcgacctggccgcccgcaacatcctggtctcagaggacctggtggccaaggtcagcgactttggcctggccaaagccgagcggaaggggctagactcaagccggctgcccgtcaagtggacggcgcccgaggctctcaaacacgggaagttcaccagcaagtcggatgtctggagttttggggtgctgctctgggaggtcttctcatatggacgggctccgtaccctaaaatgtcactgaaagaggtgtcggaggccgtggagaaggggtaccgcatggaaccccccgagggctgtccaggccccgtgcacgtcctcatgagcagctgctgggaggcagagcccgcccgccggccacccttccgcaaactggccgagaagctggcccgggagctacgcagtgcaggtgccccagcctccgtctcagggcaggacgccgacggctccacctcgccccgaagccaggagccctgaccccacccggtggggcccttggccccagaggaccgagagagtggagagtgcggcgtgggggcactgaccaggcccaaggagggtccaggcgggcaagtcatcctcctggtgcccacagcaggggctggcccacgtagggggctctgggcggcccgtggacaccccagacctgcgaaggatgatcgcccgataaagacggattctaaggactct

SEQ ID NO: 320626 - DNA, 1914 bp, Artificial Sequence
  derived and/or modified sequence
gggccggcggcggcggcggcgcgcggaggagaccgcagtgcggccggcgctaggacccgcgggggcctcccaggccgcggcgcctcccgctttcccccactccccgacccttcttcgcccccaaaatgaggaaacggagcaactcgctccaagttgtgcagccgggaccgcctcggggtgtgcagccggctcgcggaggccctcctgggggcgggcgcggggcgcggctcgggggcgccccctgagcaggtgagcccccgcttcctccgagcctggcacccccctcccgtctcagccaggatgccaacgaggcgctgggccccgggcacccagtgtatcaccaaatgcgagcacacccgccccaagccaggggagctggccttccgcaagggcgacgtggtcaccatcctggaggcctgcgagaacaagagctggtaccgcgtcaagcaccacaccagtggacaggaggggctgctggcagctggggcgctgcgggagcgggaggccctctccgcagaccccaagctcagcctcatgccgtggttccacgggaagatctcgggccaggaggctgtccagcagctgcagcctcccgaggatgggctgttcctggtgcgggagtccgcgcgccaccccggcgactacgtcctgtgcgtgagctttggccgcgacgtcatccactaccgcgtgctgcaccgcgacggccacctcacaatcgatgaggccgtgttcttctgcaacctcatggacatggtggagcattacagcaaggacaagggcgctatctgcaccaagctggtgagaccaaagcggaaacacgggaccaagtcggccgaggaggagctggccagggcgggctggttactgaacctgcagcatttgacattgggagcacagatcggagagggagagtttggagctgtcctgcagggtgagtacctggggcaaaaggtggccgtgaagaatatcaagtgtgatgtgacagcccaggccttcctggacgagacggccgtcatgacgaagatgcaacacgagaacctggtgcgtctcctgggcgtgatcctgcaccaggggctgtacattgtcatggagcacgtgagcaagggcaacctggtgaactttctgcggacccggggtcgagccctcgtgaacaccgctcagctcctgcagttttctctgcacgtggccgagggcatggagtacctggagagcaagaagcttgtgcaccgcgacctggccgcccgcaacatcctggtctcagaggacctggtggccaaggtcagcgactttggcctggccaaagccgagcggaaggggctagactcaagccggctgcccgtcaagtggacggcgcccgaggctctcaaacacgggaagttcaccagcaagtcggatgtctggagttttggggtgctgctctgggaggtcttctcatatggacgggctccgtaccctaaaatgtcactgaaagaggtgtcggaggccgtggagaaggggtaccgcatggaaccccccgagggctgtccaggccccgtgcacgtcctcatgagcagctgctgggaggcagagcccgcccgccggccacccttccgcaaactggccgagaagctggcccgggagctacgcagtgcaggtgccccagcctccgtctcagggcaggacgccgacggctccacctcgccccgaagccaggagccctgaccccacccggtggggcccttggccccagaggaccgagagagtggagagtgcggcgtgggggcactgaccaggcccaaggagggtccaggcgggcaagtcatcctcctggtgcccacagcaggggctggcccacgtagggggctctgggcggcccgtggacaccccagacctgcgaaggatgatcgcccgataaagacggattctaaggactct

SEQ ID NO: 320627 - DNA, 1524 bp, Artificial Sequence
  derived and/or modified sequence
atggccggccggggcagcctggtgagctggcgggccttccacggctgtgattccgctgaggagctccctcgagtgagtccacgcttcttgagggcgtggcaccctccacctgttagcgccaggatgccaacccgacggtgggcccctgggacacagtgtataaccaaatgtgagcacacccggcccaaaccaggagagctggcatttagaaaaggggacgtagtgaccatactggaggcttgcgagaacaaatcttggtatcgcgtgaagcaccacacttcgggccaggagggcctgctcgcagctggcgccttgcgcgagcgagaggcgctgagtgccgacccaaaactttctctgatgccctggttccatggcaaaatcagcggtcaggaagcggtacagcagctccagccacctgaagatggcttgtttctagtccgagagagcgctcgacatccaggtgattatgtactttgcgtgtcctttggaagagacgttatacattacagagttttgcaccgcgatggccatctcaccatcgacgaagccgttttcttctgtaacctgatggatatggtggaacattactccaaagacaagggggccatctgtacaaagctggtgcggccaaagcgcaagcatgggacgaagtccgccgaggaagaattggcccgggccggctggctgctgaatttgcagcatctgacactcggggcgcagatcggcgagggtgagtttggcgccgtgctccagggggagtacctcgggcagaaggttgcagtgaagaacattaaatgcgacgtgactgctcaggcctttttggatgaaactgcagttatgaccaagatgcagcacgagaacctggttcgactgttgggagtcatcctgcaccagggcctatatattgtcatggagcacgtgtccaaaggcaatcttgtcaacttcctccgaacccgcgggcgagcactagtgaacacagcgcagctgctccagttcagtctgcatgtggctgagggaatggagtatctggaaagcaagaaactcgtgcatcgggacctagccgctcgaaacatcctagtatctgaggacctggtggctaaggtatccgatttcgggctggctaaggctgaaaggaaaggtctcgattcatccagattacctgtgaaatggactgccccagaggccctcaaacatggcaagtttacctccaagtccgacgtgtggagctttggagtacttctttgggaagtgttctcttacggacgagcaccttacccgaaaatgtctcttaaagaagtgtcagaagcggtggagaaaggctaccggatggagccacctgaaggctgcccagggcccgtacatgtgctgatgtccagttgttgggaggcagagcctgccaggcgcccaccttttaggaagttggccgaaaagctggcccgcgagctccgctccgccggtgccccagcatctgtgtcaggccaggatgccgatgggagcacttctcctcggagtcaggagccttag

SEQ ID NO: 320628 - DNA, 1401 bp, Artificial Sequence
  derived and/or modified sequence
atgcccacccggcggtgggcccccggcacccagtgcatcaccaagtgtgagcacacccgcccaaaaccaggcgaattggcgtttcggaaaggagacgtggtcacaattctggaggcctgtgaaaacaaaagctggtatcgcgtcaaacaccatacatctggtcaggaaggcttactggctgcgggagctctacgggagagagaggccttgtcagccgatccaaaactgtcccttatgccatggttccacggtaaaatctcagggcaggaagccgtgcagcagttgcagcctcctgaagatgggctttttttggtaagagaaagcgcccgtcacccgggcgactacgtgctgtgcgtaagcttcggacgggacgtgattcactacagagtcttgcacagagatgggcacctcaccatcgatgaagctgtgttcttttgcaatctcatggatatggtggagcactactcgaaagacaaaggcgctatttgcacaaagcttgtgaggcccaaaaggaagcacggtaccaagagcgccgaggaagagctggccagggccggctggttactgaatttacagcatttgactctcggggctcagatcggcgagggcgagtttggggccgttctccagggggaatatttaggccaaaaggtagctgtgaagaatataaaatgtgatgtaaccgcacaggcattcctcgatgaaaccgccgtgatgactaaaatgcaacacgagaacctcgttcgtcttctgggagtgattctccaccaggggctctatattgtgatggagcatgtctccaaggggaacttggtcaacttcttgcggacaaggggacgcgcgctagtcaatacagcccagctcctacagttctccttgcatgttgcggagggaatggaatatctcgagtctaagaagttagttcaccgagatctggccgctcgtaatattctcgtgtcagaggatttagtcgcaaaggtgagcgattttggcctggctaaagccgaacggaagggtctggacagcagtagactgcctgtgaagtggaccgccccagaggcactgaagcatggcaagtttacctcgaaatctgacgtatggagcttcggggtgctcctgtgggaggtctttagctatggccgggcgccttatcctaagatgagccttaaggaggtcagcgaggcggtggagaagggttataggatggagccacctgaaggttgcccgggcccagtacatgttctgatgagctcatgttgggaggcagaaccagctagaaggcccccttttaggaaactcgcggagaagctggccagggagctgaggtccgccggcgccccggcatcagtttccgggcaagatgctgatggctctaccagcccacgctctcaggagccctag

SEQ ID NO: 320629 - DNA, 1524 bp, Artificial Sequence
  derived and/or modified sequence
atggctggaaggggttctttagttagctggagagcattccatggttgcgacagtgccgaagagttaccgagagttagccctaggtttctccgagcttggcaccctccacccgtgagcgctcgaatgcctacaagaagatgggccccagggacacagtgcatcaccaagtgcgaacacacccgcccaaagccgggagagctagcttttagaaagggggatgtagtgaccatcctcgaggcctgcgaaaataagtcttggtatcgcgtgaaacaccataccagcggccaagaggggcttttggccgctggcgctctgagggagcgggaggccttgtcagcggatcccaagctcagcctcatgccctggttccatgggaaaattagcgggcaggaagcagtccaacagcttcagccacccgaggatggattgtttttggtcagggagtccgcacggcacccgggtgattatgtgctatgcgtctccttcgggagagacgtcattcactacagagtgctgcacagagacggccatctcacaatcgatgaggccgttttcttctgtaatctcatggatatggtagagcactattccaaagataagggagcgatctgtacaaaactggtcagaccaaagcgtaagcatggcaccaagtctgctgaggaggaactcgccagagcgggatggctcctgaacttacagcatctgactctgggggcacagatcggggagggtgagttcggagcggtcctgcagggtgagtacttgggccagaaggttgctgtgaagaatattaagtgtgatgtgactgcccaggcatttctcgacgaaaccgccgtcatgacaaaaatgcagcacgaaaatctggtccgtctgctaggagtgattcttcatcagggcctgtatatagtgatggagcatgtgtcaaagggcaacctggtcaattttctgcgaactcgcggtcgtgcgttagtgaacaccgctcaactgctccagtttagtcttcatgtcgccgaaggaatggagtatctggaatcgaagaaactggtgcatcgggaccttgcagccagaaacattctggtttcggaggatctggtggccaaagtgtcggatttcggcctggccaaggctgaaaggaagggattggatagctcacgtctcccggtgaagtggaccgctcctgaagctcttaagcatggtaagtttaccagtaagtctgacgtctggtcctttggagtgctactctgggaagtcttctcctatggcagagccccttacccaaagatgtctctgaaagaagtgtccgaagctgttgaaaagggctacaggatggagccacctgaaggctgcccaggccctgtacatgtgctcatgagttcatgctgggaagctgaaccagcacgacggccaccttttcggaaattggcagagaaactagctagagaattgcggagcgccggagcccctgcctcagttagcggccaggacgccgacggatccacaagcccacgaagtcaggagccttag

SEQ ID NO: 320630 - DNA, 1401 bp, Artificial Sequence
  derived and/or modified sequence
atgcctacccggaggtgggccccaggcacacagtgcatcacaaagtgcgagcatacaaggccaaaaccgggtgaactcgccttccgcaaaggggacgtagtgactatcttggaggcttgcgagaataaaagttggtatcgagtcaagcatcacacaagcgggcaggagggcttgttggcagccggagcgctaagggagcgcgaggcgctgtcggctgacccgaaactatctcttatgccgtggtttcacggaaagatctcaggacaagaggccgtacagcagctgcagcccccagaagacggactcttcctcgtacgtgagagcgccaggcacccaggcgattatgtcctttgtgtgagcttcgggcgtgacgtgatccactatcgagttctgcacagggacgggcatttgacgattgatgaggcggtgtttttttgcaatctcatggacatggtagagcactattccaaggacaaaggagctatctgtactaaactcgtgagaccaaagcgcaaacacggaacaaagtctgcagaggaagagctggccagggcaggttggctactgaatctgcagcacttgactcttggtgcccagattggggaaggcgagttcggcgcagttctgcaaggggagtatttaggacagaaagtcgctgtcaagaacatcaagtgtgacgtgacagcacaggcattcctggacgagacagcagtgatgaccaagatgcagcacgagaatttggtgcggcttctcggggttatcctacatcaaggactgtacatcgtgatggaacatgtatccaagggaaacttagtgaatttcttgcggaccaggggaagagcgcttgtgaataccgcccagctgcttcagtttagcctacacgtcgcagagggaatggaatatttggagtcgaaaaagctggttcatcgagacctggctgcacgtaatattctcgtgtcggaagatctggtagcgaaagtctctgacttcgggctcgctaaggccgagcgaaaaggcctggacagcagccgccttcctgttaagtggacagcccctgaagcactgaaacacggaaagtttactagcaagtcggatgtgtggtcttttggagtcctcctgtgggaggtcttttcttatggcagggctccttaccctaaaatgagtcttaaggaggtctcggaggccgtggagaaagggtatagaatggaaccccctgaaggatgcccgggtcccgtgcacgttctcatgtcttcatgttgggaagcagagcccgctaggagaccaccttttagaaagctcgctgagaaactggccagagaattgcgaagtgcgggtgcccctgcatccgtctccgggcaggacgcagatggcagtacctccccgagaagccaggagccctag

SEQ ID NO: 320631 - DNA, 1524 bp, Artificial Sequence
  derived and/or modified sequence
atggccggcagaggcagcctggtgagctggagagccttccacggctgcgacagcgccgaggagctgcccagagtgagccccagattcctgagagcctggcaccccccccccgtgagcgccagaatgcccaccagaagatgggcccccggcacccagtgcatcaccaagtgcgagcacaccagacccaagcccggcgagctggccttcagaaagggcgacgtggtgaccatcctggaggcctgcgagaacaagagctggtacagagtgaagcaccacaccagcggccaggagggcctgctggccgccggcgccctgagagagagagaggccctgagcgccgaccccaagctgagcctgatgccctggttccacggcaagatcagcggccaggaggccgtgcagcagctgcagccccccgaggacggcctgttcctggtgagagagagcgccagacaccccggcgactacgtgctgtgcgtgagcttcggcagagacgtgatccactacagagtgctgcacagagacggccacctgaccatcgacgaggccgtgttcttctgcaacctgatggacatggtggagcactacagcaaggacaagggcgccatctgcaccaagctggtgagacccaagagaaagcacggcaccaagagcgccgaggaggagctggccagagccggctggctgctgaacctgcagcacctgaccctgggcgcccagatcggcgagggcgagttcggcgccgtgctgcagggcgagtacctgggccagaaggtggccgtgaagaacatcaagtgcgacgtgaccgcccaggccttcctggacgagaccgccgtgatgaccaagatgcagcacgagaacctggtgagactgctgggcgtgatcctgcaccagggcctgtacatcgtgatggagcacgtgagcaagggcaacctggtgaacttcctgagaaccagaggcagagccctggtgaacaccgcccagctgctgcagttcagcctgcacgtggccgagggcatggagtacctggagagcaagaagctggtgcacagagacctggccgccagaaacatcctggtgagcgaggacctggtggccaaggtgagcgacttcggcctggccaaggccgagagaaagggcctggacagcagcagactgcccgtgaagtggaccgcccccgaggccctgaagcacggcaagttcaccagcaagagcgacgtgtggagcttcggcgtgctgctgtgggaggtgttcagctacggcagagccccctaccccaagatgagcctgaaggaggtgagcgaggccgtggagaagggctacagaatggagccccccgagggctgccccggccccgtgcacgtgctgatgagcagctgctgggaggccgagcccgccagaagaccccccttcagaaagctggccgagaagctggccagagagctgagaagcgccggcgcccccgccagcgtgagcggccaggacgccgacggcagcaccagccccagaagccaggagccctag

SEQ ID NO: 320632 - DNA, 1401 bp, Artificial Sequence
  derived and/or modified sequence
atgcccaccagaagatgggcccccggcacccagtgcatcaccaagtgcgagcacaccagacccaagcccggcgagctggccttcagaaagggcgacgtggtgaccatcctggaggcctgcgagaacaagagctggtacagagtgaagcaccacaccagcggccaggagggcctgctggccgccggcgccctgagagagagagaggccctgagcgccgaccccaagctgagcctgatgccctggttccacggcaagatcagcggccaggaggccgtgcagcagctgcagccccccgaggacggcctgttcctggtgagagagagcgccagacaccccggcgactacgtgctgtgcgtgagcttcggcagagacgtgatccactacagagtgctgcacagagacggccacctgaccatcgacgaggccgtgttcttctgcaacctgatggacatggtggagcactacagcaaggacaagggcgccatctgcaccaagctggtgagacccaagagaaagcacggcaccaagagcgccgaggaggagctggccagagccggctggctgctgaacctgcagcacctgaccctgggcgcccagatcggcgagggcgagttcggcgccgtgctgcagggcgagtacctgggccagaaggtggccgtgaagaacatcaagtgcgacgtgaccgcccaggccttcctggacgagaccgccgtgatgaccaagatgcagcacgagaacctggtgagactgctgggcgtgatcctgcaccagggcctgtacatcgtgatggagcacgtgagcaagggcaacctggtgaacttcctgagaaccagaggcagagccctggtgaacaccgcccagctgctgcagttcagcctgcacgtggccgagggcatggagtacctggagagcaagaagctggtgcacagagacctggccgccagaaacatcctggtgagcgaggacctggtggccaaggtgagcgacttcggcctggccaaggccgagagaaagggcctggacagcagcagactgcccgtgaagtggaccgcccccgaggccctgaagcacggcaagttcaccagcaagagcgacgtgtggagcttcggcgtgctgctgtgggaggtgttcagctacggcagagccccctaccccaagatgagcctgaaggaggtgagcgaggccgtggagaagggctacagaatggagccccccgagggctgccccggccccgtgcacgtgctgatgagcagctgctgggaggccgagcccgccagaagaccccccttcagaaagctggccgagaagctggccagagagctgagaagcgccggcgcccccgccagcgtgagcggccaggacgccgacggcagcaccagccccagaagccaggagccctag

SEQ ID NO: 320633 - DNA, 399 bp, Artificial Sequence
  derived and/or modified sequence
ttcacccagacctacagaagaagcagacagcacgagcagctgcccggccagagacacatggacctgctgaccggctacagcaagctgatccagagcagactgaagctgctgctgcacctgggcagccagccccccgtgggcaagaccttcttcttcagctgctggtgccaccccctgttccacggcagcaagaccacccccaacgtgtggtacaagttcagcgagaccgccctgagcatcctgaacagctgccaggccagccagctgggcgtgagaaagatgcccggcgacatgagcagcagccccagagtgagagagttcagcgccctggtggccatcaaggagaagatccacatcctgcccaccaacgccaaggtgggcagcaagttcggcagctag

SEQ ID NO: 320634 - DNA, 399 bp, Artificial Sequence
  derived and/or modified sequence
ttcacccagacctaccgccgcagccggcagcacgagcagctgcccggccagaggcacatggacctgctgaccggctacagcaagctgatccagagccggctgaagctgctgctgcacctgggcagccagccccctgtgggcaagaccttcttcttcagctgctggtgccaccccctcttccacggcagcaagaccacccccaacgtgtggtacaagttcagcgagacagccctgagcatcctgaacagctgccaggccagccagctgggcgtgaggaagatgcctggggacatgagcagcagcccccgggtgcgggagttcagcgccctggtggccatcaaggagaagatccacatcctgcccaccaatgccaaggtgggcagcaagtttggcagctag

SEQ ID NO: 320635 - protein, 502 aa, Artificial Sequence
  derived and/or modified sequence
MDKALLCSVCKMTCHKKCVHKIQSHCSYTYGRKGEPGVEPGHFGVCVDSLTSDKASVPIVLEKLLEHVEMHGLYTEGLYRKSGAANRTRELRQALQTDPAAVKLENFPIHAITGVLKQWLRELPEPLMTFAQYGDFLRAVELPEKQEQLAAIYAVLEHLPEANHNSLERLIFHLLAVALLEDVNRMSPGALAIIFAPCLLRCPDNSDPLTSMKDVLKITTCVEMLIKEQMRKYKVKMEEISQLEAAESIAFRRLSLLRQNAPWPLKLGFSSPYEGVLNKSPKTRDIQEEELEVLLEEEAAGGDEDREKEILIERIQSIKEEKQDITYRLPELDPRGSDEENLDSETSASTESLLEERAGRGASEGPPAPALPCPGAPTPSPLPTVAAPPRRRPSSFVTVRVKTPRRTPIMPTANIKLPPGLPSHLPRWAPGAREAAAPVRRREPPARRPDQIHSVYITPGADLPVQGALEPLEEDGQPPGAKRRYSDPPTYCLPPASGQTNG

SEQ ID NO: 320636 - DNA, 1509 bp, Artificial Sequence
  derived and/or modified sequence
atggataaggctctgttatgctccgtttgtaaaatgacatgccataaaaagtgcgtgcacaaaattcaaagtcactgcagttacacctacggacggaagggagagccaggagtagagcctggccactttggagtgtgtgtcgactccctgacttctgacaaggcttcagttcccattgtcctcgaaaaactgctcgagcacgtggagatgcacgggctctacaccgagggtctgtaccgcaaatctggcgccgccaacaggactagagagctgcggcaggctctccagacggaccctgctgcagtgaagctcgaaaacttccctatccatgccatcacaggagtcctaaagcagtggctgcgagaacttccggaacccctgatgacgtttgctcagtacggggactttttacgagctgtggaattacctgagaaacaggagcagctcgcagctatctacgccgtcttagagcacttgccagaggccaatcacaactctcttgaacgactgattttccatctgctcgctgtcgctctcctcgaagatgtgaatcgcatgtcccccggcgcgctggccattatttttgccccatgtcttcttaggtgtcccgacaattctgatcccctcaccagcatgaaagacgtgctcaaaattacaacttgtgtagaaatgctgatcaaggagcagatgcgtaagtacaaggtcaaaatggaagagatttcccagctggaggctgccgagtcgattgcgtttcggagactgagcctcctgcgtcagaacgcaccgtggccactaaagctggggtttagctccccatacgagggcgtcctaaataaaagtccgaagaccagggacatccaggaagaagaactcgaggttttactggaggaggaggctgcaggaggcgatgaggatcgggaaaaagaaatcctgattgagcgaatccagtcaattaaagaggagaagcaagatataacttataggctgcccgagctcgacccaagaggcagtgatgaggagaatctggattctgagacaagcgctagtaccgagtcactcttagaagaaagggccggccggggggcctccgaaggccccccagcccccgctttaccctgccctggagccccaactccatcccctctgcccaccgtagccgcgccccctaggcgtcgccctagcagttttgtgactgtgcgcgtcaagacacccaggaggaccccaataatgcccactgctaacataaagctgcctccgggtctgccaagccatctgcctcgctgggctcctggagcccgagaggccgccgctcctgttcggcgtcgcgagcccccagcccggagacccgatcagatccactcagtctacattaccccaggcgcagaccttcctgtgcagggggcccttgagcctttagaagaagacggtcagccaccaggagccaagcgcagatacagcgatccgccaacctattgcctcccgccagcctctggacagacaaatgggtag

SEQ ID NO: 320637 - DNA, 1509 bp, Artificial Sequence
  derived and/or modified sequence
atggacaaggccctgctgtgcagcgtgtgcaagatgacctgccacaagaagtgtgtgcacaagatccagagccactgcagctacacctacggcaggaaaggagagcccggggtggagcccggccactttggagtgtgtgtggacagcctgaccagtgacaaggcctctgtgcccatcgtgctggagaagctgctggagcacgtggagatgcacggcctgtacacagagggcctgtacaggaagagcggggccgccaacagaacccgggagctgcggcaggccctgcagacagatcctgctgctgtgaagctggagaacttccccatccacgccatcactggagtgctgaagcagtggctgcgggagctgcctgagcccctgatgacctttgcccagtatggagacttcctgcgggctgtggagctgcctgagaagcaggagcagctggccgccatctatgctgtgctggagcacctgcctgaggccaaccacaacagcctggagcggctcatcttccacctgctggccgtggccctgctggaggatgtgaacaggatgagccctggggccctggccatcatctttgccccctgcctgctgcgctgcccagacaacagcgaccccctgacctccatgaaggatgtgctgaagatcaccacctgtgtggagatgctgatcaaggagcagatgaggaagtacaaggtgaagatggaggagatcagccagctggaggccgctgagagcatcgccttccggcggctgagcctgctgcggcagaatgccccctggcccctgaagctgggcttcagcagcccctatgaaggagtgctgaacaagagccccaagacccgggacatccaggaggaggagctggaggtgctgctggaggaggaggccgctggaggagatgaggaccgggagaaggagatcctgattgaaagaatccagagcatcaaggaggagaagcaggacatcacctaccgcctgcctgagctggacccccggggcagtgatgaggagaacctggacagcgagaccagcgccagcacagagagcctgctggaggagcgggccggccgcggggccagcgagggccccccagccccagccctgccctgccctggggcccccacccccagccccctgcccaccgtggccgccccacccaggagaagacccagcagctttgtgacagtgcgggtgaagacccccaggaggacccccatcatgcccacagccaacatcaagctgcccccaggcctgcccagccacctgccccgctgggcccctggggcccgggaggccgccgcccctgtgagaagaagagagcccccagcccggcggccagaccagatccacagcgtgtacatcaccccaggagctgacctgcctgtgcagggcgccctggagcccctggaggaggatggccagcccccaggggccaagaggcgctacagcgacccccccacctactgcctgcccccagccagcggccagaccaatggatag

SEQ ID NO: 320638 - DNA, 1509 bp, Artificial Sequence
  derived and/or modified sequence
atggacaaggccctgctgtgcagcgtgtgcaagatgacctgccacaaaaaatgtgtgcacaaaattcaatcacactgttcatacacctacggcagaaaaggcgaaccaggcgtggagcccggacactttggtgtgtgcgtggactccctcactagcgacaaggcatcagtacctatcgtgcttgagaaactgctcgagcatgtagaaatgcatggcctgtatacagaagggctgtacagaaagagcggcgccgcaaataggactagagagttgagacaggccctacagactgatccagctgccgtaaaactggaaaattttcctatacatgcaattacaggtgtgctgaaacaatggctgcgcgagctcccagagcctctgatgacatttgcccagtacggcgatttcctgcgcgccgtagagctgcccgagaagcaggagcagctggccgccatttatgctgtcctagagcaccttcccgaggctaatcacaatagcctcgaacgtctgatattccatctactagctgtagctctgctggaggacgtgaatagaatgtctcctggggcccttgctattatcttcgctccctgcctactaagatgcccggacaactccgacccgttgacttcgatgaaggatgtactcaagattacaacgtgtgtggagatgttgataaaagagcagatgcgaaagtataaggtgaaaatggaagaaataagtcagctcgaggctgctgagtccattgcttttcggcggttgagcctattgcgacagaacgccccatggcctctcaagctggggttttcaagtccttatgaaggcgtcctcaataagagtcccaagacccgcgacatccaagaggaggaacttgaggtcttgttggaagaggaagctgccggcggggacgaagacagagaaaaggagattctgattgagcggatccagtcaatcaaggaagaaaagcaagacatcacctataggctgccggaactggatcctagaggcagcgatgaagagaacctcgactccgaaacctcggcctccactgaaagtctgctcgaagaaagagcgggacgcggcgcttccgagggaccccctgcaccggccctgccttgcccaggagcaccgacacctagccccctgcctactgtcgcggctccccctcgtcgccgaccaagttccttcgtgaccgtccgtgtgaagacacctcggcgcactcccattatgcccacggcgaacatcaaactccctccaggtctccccagccacctacctcgctgggccccaggcgcccgagaggctgctgcaccggtgagaaggagagagcccccagcaaggcgcccagatcaaatccatagcgtttacataaccccgggagctgaccttccggtgcaaggagccttagagccactggaggaagacggacaaccacccggggcaaagcgcagatactccgatccccctacctactgtcttcccccagcatcagggcagaccaacggttag

SEQ ID NO: 320639 - DNA, 1509 bp, Artificial Sequence
  derived and/or modified sequence
atggacaaggctcttctctgtagtgtgtgcaaaatgacatgccacaaaaaatgcgtccacaagatccagtctcattgttcctatacctatggcagaaagggagagccaggtgttgagccagggcattttggagtctgcgttgattctcttacctcagataaggcatccgttccgattgtgttagaaaagttactggagcatgtggaaatgcacgggctgtacaccgaggggttgtacaggaaatcgggggcagcgaacaggacccgggagctccggcaggcgctgcagacagacccggctgctgtgaaactcgaaaattttccaattcatgccatcactggggtcctgaaacaatggcttagggaactcccggaaccattgatgacgttcgctcagtatggtgattttttgcgcgctgtggagctccccgagaagcaagagcagctggctgctatttatgctgtgctcgaacatctgcctgaagccaatcacaactcgcttgaacggctaattttccacctcctggccgtggccctgctggaggatgtgaataggatgagccccggagcgctcgctatcatatttgccccatgcctgttaaggtgcccagacaactccgacccgctgacctctatgaaagatgtgttaaaaattaccacatgtgtggagatgttgataaaggagcagatgcggaaatacaaagtgaagatggaagaaatcagtcagttagaggccgcagagagtatcgcatttcggaggctcagtctgcttcgacagaacgccccatggccactcaagcttggcttttcttcaccttacgaaggagtcctaaataaatcacccaaaacccgggatattcaggaagaagagcttgaggtgctgcttgaggaggaggcggcagggggtgatgaggatcgcgagaaagagattctgatagaacggatacagtcgattaaggaagaaaagcaggacatcacttatcggctccccgagttggacccgcgtgggtcagacgaagagaacctcgacagcgaaaccagcgccagtacggaaagcctcctggaagaacgggctggtaggggcgctagcgagggccctcccgcacccgcactcccctgccccggagccccaacaccttcccctctgcccaccgttgccgctcctcccaggagacgccctagctcgtttgtcactgtgcgagttaaaacacctcgaagaacccccatcatgccaaccgctaatatcaaattacccccaggccttccttcacatcttccacgatgggcacccggtgctagagaagccgctgcgcctgtgaggaggagagaaccaccagcccgtcgccctgaccagatccactcggtgtatataactccgggtgccgatctccctgtgcagggcgcactggagccattggaggaggatgggcagccacccggagccaagaggcggtactctgacccacctacttattgtctccccccagcgtccgggcagactaatggctag

SEQ ID NO: 320640 - DNA, 1509 bp, Artificial Sequence
  derived and/or modified sequence
atggacaaggccctgctgtgcagcgtgtgcaagatgacctgccacaagaagtgcgtgcacaagatccagagccactgcagctacacctacggcagaaagggcgagcccggcgtggagcccggccacttcggcgtgtgcgtggacagcctgaccagcgacaaggccagcgtgcccatcgtgctggagaagctgctggagcacgtggagatgcacggcctgtacaccgagggcctgtacagaaagagcggcgccgccaacagaaccagagagctgagacaggccctgcagaccgaccccgccgccgtgaagctggagaacttccccatccacgccatcaccggcgtgctgaagcagtggctgagagagctgcccgagcccctgatgaccttcgcccagtacggcgacttcctgagagccgtggagctgcccgagaagcaggagcagctggccgccatctacgccgtgctggagcacctgcccgaggccaaccacaacagcctggagagactgatcttccacctgctggccgtggccctgctggaggacgtgaacagaatgagccccggcgccctggccatcatcttcgccccctgcctgctgagatgccccgacaacagcgaccccctgaccagcatgaaggacgtgctgaagatcaccacctgcgtggagatgctgatcaaggagcagatgagaaagtacaaggtgaagatggaggagatcagccagctggaggccgccgagagcatcgccttcagaagactgagcctgctgagacagaacgccccctggcccctgaagctgggcttcagcagcccctacgagggcgtgctgaacaagagccccaagaccagagacatccaggaggaggagctggaggtgctgctggaggaggaggccgccggcggcgacgaggacagagagaaggagatcctgatcgagagaatccagagcatcaaggaggagaagcaggacatcacctacagactgcccgagctggaccccagaggcagcgacgaggagaacctggacagcgagaccagcgccagcaccgagagcctgctggaggagagagccggcagaggcgccagcgagggcccccccgcccccgccctgccctgccccggcgcccccacccccagccccctgcccaccgtggccgccccccccagaagaagacccagcagcttcgtgaccgtgagagtgaagacccccagaagaacccccatcatgcccaccgccaacatcaagctgccccccggcctgcccagccacctgcccagatgggcccccggcgccagagaggccgccgcccccgtgagaagaagagagccccccgccagaagacccgaccagatccacagcgtgtacatcacccccggcgccgacctgcccgtgcagggcgccctggagcccctggaggaggacggccagccccccggcgccaagagaagatacagcgacccccccacctactgcctgccccccgccagcggccagaccaacggctag

SEQ ID NO: 320641 - protein, 197 aa, Artificial Sequence
  derived and/or modified sequence
MQRWKAAALASVLCSSVLSIWMCREGLLLSHRLGPALVPLHRLPRTLDARIARLAQYRALLQGAPDAMELRELTPWAGRPPGPRRRAGPRRRRARARLGARPCGLRELEVRVSELGLGYASDETVLFRYCAGACEAAARVYDLGLRRLRQRRRLRRERVRAQPCCRPTAYEDEVSFLDAHSRYHTVHELSARECACV

SEQ ID NO: 320642 - DNA, 594 bp, Artificial Sequence
  derived and/or modified sequence
atgcagcggtggaaagccgccgcacttgcatctgtgctgtgttcttccgtccttagcatatggatgtgcagggaagggttactgctgagccacagactgggtccagctctggtacctttacatcgcctgccaaggacgctggacgcgcgtattgctcgactcgcccaatatagagctctgcttcaaggggccccagacgccatggagctcagggagctgacgccttgggctggacgacccccaggtccacgccgacgggccggcccacggcggcgacgtgcgagagccaggctaggcgccaggccgtgcggactgcgtgaactggaagttagggtgagcgagctgggacttgggtacgcctctgatgagacggtcctattccgctattgtgcgggtgcctgcgaagccgccgcgcgtgtttatgatctgggcctgagacgcctgaggcagcgccgaaggttgaggcgggaacgggtacgggcacagccttgctgtaggcccacagcctacgaggacgaggtatcatttctagacgctcacagccggtaccacacggtgcacgagctatctgcacgagaatgcgcatgtgtgtag

SEQ ID NO: 320643 - DNA, 594 bp, Artificial Sequence
  derived and/or modified sequence
atgcagcgctggaaggctgctgccctggcctctgtgctgtgcagctctgtgctgagcatctggatgtgccgggagggcctgctgctgagccaccggctgggccctgccctggtgcccctgcaccggctgcccaggaccctggatgccagaattgcccggctggcccagtaccgggccctgctgcagggcgccccagatgccatggagctgcgggagctgaccccctgggccggccggcccccaggccccaggagaagagctggccccaggagaagaagagcccgggcccggctgggcgcccggccctgtggcctgcgggagctggaggtgcgggtgtctgagctgggcctgggctacgccagtgatgagaccgtgctcttccgctactgtgccggggcctgtgaggccgccgcccgggtgtatgacctgggcctgcggcggctgcggcagaggcggcggctgcggcgggagcgggtgcgggcccagccctgctgccggcccacagcctatgaagatgaggtgtccttcctggatgcccacagccgctaccacacagtgcatgagctgagcgccagagaatgtgcctgtgtgtag

SEQ ID NO: 320644 - DNA, 594 bp, Artificial Sequence
  derived and/or modified sequence
atgcagcggtggaaggccgccgccctggccagcgtgctgtgcagcagcgtgctctctatctggatgtgtcgggagggcctgttattaagccaccggcttggtcccgccttggtgccattgcatcggttaccccgcaccctggacgccagaatcgctaggctggctcagtatcgggctttactgcagggcgccccagatgctatggagttacgggaactaactccgtgggccgggcgacctccaggcccccggcgtcgggcgggaccccgccggcgaagagcgcgagcacggttaggggcccgtccgtgtggccttcgggaactggaggtgcgtgttagcgagctcgggctgggctacgccagtgatgagaccgtcctttttcggtactgcgctggagcctgcgaggcagccgctagagtctacgatcttggactacgtaggcttcgtcagcggcggaggttgcgccgtgaacgggtgagggcccagccgtgttgccggcccacggcatatgaggacgaggttagttttctagacgcccatagccggtatcatacggttcatgaactttccgctcgagagtgtgcgtgtgtatag

SEQ ID NO: 320645 - DNA, 1103 bp, Artificial Sequence
  derived and/or modified sequence
ccacactcagtctggcctcggggcctttgcactggctgtgtcccctgcctgtgatgccattctcctctgcctggccaactcctacgtttattcaagtctggaccttgtcatcggctcctcaggaaggcactccgggacccccagatgggggcggttccctgtgactcctggcacggaggccaaccccttccttgttcaatggttccttgagggaccattcccatgtgattatcgaccattcggcaggcgttcaaagtcaaaggccccacactgagtcctggcccagcgccctgtgcccgttggctgctggagggacagacggggcgtgcggctgaccatcccgtgcccgcaggctgaggatgcagcgctggaaggcggcggccttggcctcagtgctctgcagctccgtgctgtccatctggatgtgtcgagagggcctgcttctcagccaccgcctcggacctgcgctggtccccctgcaccgcctgcctcgaaccctggacgcccggattgcccgcctggcccagtaccgtgcactcctgcagggggccccggatgcgatggagctgcgcgagctgacgccctgggctgggcggcccccaggtccgcgccgtcgggcggggccccggcggcggcgcgcgcgtgcgcggttgggggcgcggccttgcgggctgcgcgagctggaggtgcgcgtgagcgagctgggcctgggctacgcgtccgacgagacggtgctgttccgctactgcgcaggcgcctgcgaggctgccgcgcgcgtctacgacctcgggctgcgacgactgcgccagcggcggcgcctgcggcgggagcgggtgcgcgcgcagccctgctgccgcccgacggcctacgaggacgaggtgtccttcctggacgcgcacagccgctaccacacggtgcacgagctgtcggcgcgcgagtgcgcctgcgtgtgaccctacctcactcggccggcgcggcggccactccccccgcctcgacggcaccactggccggccccgcgaaagactgcgcgtgcgtagagcacgccggcgcggccccgggactctcgcgataactgtactgagataaagtgtggcaactcg

SEQ ID NO: 320646 - DNA, 594 bp, Artificial Sequence
  derived and/or modified sequence
atgcaacgttggaaggccgcagccctggcatccgtgttatgctcttctgtgttaagtatatggatgtgtagagaggggctcttgctctctcaccgcctcggccctgccttggttccactacaccgacttccacggactcttgatgctaggattgcccgactggcacagtacagggcacttctccagggcgcacccgatgccatggagctacgtgaacttaccccctgggccggaagacctcccggacctcggaggcgggctgggccacggcgtaggagagcaagggcccgtctgggggctcgaccctgtgggctgcgcgagctggaagtgagagtgagcgagttgggcctgggttatgccagcgacgagaccgtgctctttagatattgtgccggagcttgcgaggccgcagctcgggtgtacgatctggggctgaggcgcctacggcagcgaagacggttacgccgagagcgggttagagcccagccatgctgtaggcccaccgcatatgaggacgaagtgagtttcctggatgcccattccagataccacacggtgcacgaactcagcgctcgagagtgcgcctgtgtctag

SEQ ID NO: 320647 - DNA, 594 bp, Artificial Sequence
  derived and/or modified sequence
atgcagagatggaaggccgccgccctggccagcgtgctgtgcagcagcgtgctgagcatctggatgtgcagagagggcctgctgctgagccacagactgggccccgccctggtgcccctgcacagactgcccagaaccctggacgccagaatcgccagactggcccagtacagagccctgctgcagggcgcccccgacgccatggagctgagagagctgaccccctgggccggcagaccccccggccccagaagaagagccggccccagaagaagaagagccagagccagactgggcgccagaccctgcggcctgagagagctggaggtgagagtgagcgagctgggcctgggctacgccagcgacgagaccgtgctgttcagatactgcgccggcgcctgcgaggccgccgccagagtgtacgacctgggcctgagaagactgagacagagaagaagactgagaagagagagagtgagagcccagccctgctgcagacccaccgcctacgaggacgaggtgagcttcctggacgcccacagcagataccacaccgtgcacgagctgagcgccagagagtgcgcctgcgtgtag

SEQ ID NO: 320648 - DNA, 438 bp, Artificial Sequence
  derived and/or modified sequence
atgggtccatggccacgggattggctggggaagggctggcgtttaggaagctgcgaggcccgggctggcgccaaagaagtttctgtgatccgccatggcgctcccaaccctgcacaatcacacttacacgtacaggctcgcgcccaggtgcactccgaggatgggcattcccttccccctgtggtagacggtgaggatgaagtgcttagtctgttggtattcgtccaggactctcaagagtgctgtcggcaagccgtccaagggaggcagggtcggggtgtgacgtggggcctgggactgccctcatatcatctcagaacattgctgtcaccggtgtgcgtgcccgctcgggaccagcgggcacccaggaaatgctgtgaggcagtcttggcctgcccactggtcgaaaccctcgtgacaaccttactgactcgatag

SEQ ID NO: 320649 - DNA, 1633 bp, Artificial Sequence
  derived and/or modified sequence
tgccgggagagtgaggccgcgggggctgggaagggaccggtgtatgggggacagcaggcgaaggtcactcgggaaccagcccagctctgaggctgcgggcaggtcggaaagggagcaggacggcgacccccgtggcctccagagctctgtgtacgagagccggcgggtcacagaccccgaacgccaggacctggacaatgcagagctgggaccagaagacccagaagaggagcttccccccgaggaggtggccggggaggagttcccggagaccctggatcccaaagaggcactttctgagttggagagagtcctggacaaggacttggaagaggacattcctgaaatcagccggctgtccatcagccagaagctccccagcaccaccatgaccaaagcaaggaagaggaggaggcggaggaggctcatggagctggcagagcccaagataaactggcaagtcctgaaagacaggaagggacgctgtggtaaggggtatgcctggatctccccatgtaagatgagcttgcacttctgtctctgctggccctctgtgtactggaccgagcggttccttgaggacaccaccctcaccatcacagtgcccgcggtgtcccgccgcgtggaggaactgtctcggcccaagagattctacctggaatattacaacaacaacaggacgactcctgtctggcccattcctcggtcctccctggaatacagagcgtcgagtcgcctgaaggaactggccgccccgaagattcgtgataacttctggagcatgcccatgtctgaggtgtcccaggtatccagggcagcccaaatggcagtccccagctcgcggatcctccagttgtcaaagccgaaggccccagccaccctcttggaagagtgggaccccgtgccaaaacccaagccacatgtgtcagaccataaccgcctccttcacttggccaggcccaaagctcagtcggacaagtgcgttcctgaccgagatcctcgctgggaggtgctggatgtcaccaagaaggtggtggccagcccccggatcatctccctggccaagcccaaagtgcgcaagggcctcaacgagggatacgacaggcgtcccctcgcctctatgagcttgccacccccaaaagcatcaccagaaaagtgtgatcaacccaggcctggcctctaagacctccgctcccagtaaacaccctcaggcaccctaaccctgtgtatgtgattattctgagctttttggcctggagaagggagggcgggctagaaggccaaaagaaggatgaggaggacaataatatttatttttgcatccaacctgcgacttgtccagctgtttattttccgagtcactttcattgaccatctcgagcgccttctgaatctcttcagtccagacttattcgtccattcctgagggcccacgggaccgtcggagtcggaacgacagccacagtcaaaccagccgacgctcctgctgaggggccacgggaccgtcggagtcggaacgacagccacagtcaaaccagccgacgctcctgctgaggggccacgggaccgtcggagtcggaacgacagccacagtcaaagcagccgacgctcctgctgagggcccacgggaccg

SEQ ID NO: 320650 - protein, 323 aa, Artificial Sequence
  derived and/or modified sequence
MVLPSDQGFKLLGNVLQGPEPYRLLTSGLRLHQELENLNKWGLNIFCVSDYAGGRSLTCIMYMIFQERDLLKKFRIPVDTMVTYMLTLEDHYHADVAYHNSLHAADVLQSTHVLLATPALDAVFTDLEILAALFAAAIHDVDHPGVSNQFLINTNSELALMYNDESVLENHHLAVGFKLLQEDNCDIFQNLSKRQRQSLRKMVIDMVLATDMSKHMTLLADLKTMVETKKVTSSGVLLLDNYSDRIQVLRNMVHCADLSNPTKPLELYRQWTDRIMAEFFQQGDRERERGMEISPMCDKHTASVEKSQVQARGIDGRAQGEFY

SEQ ID NO: 320651 - DNA, 162 bp, Artificial Sequence
  derived and/or modified sequence
atggaggcagcgggaggctttcaggtgcattttcacccctccaacggagacggacggtttattgaaacctcctccgcagccgatctggaggttataagttatagcagcaaagtcagcgtgaccgagcggtgcttcattaaagtgtgcacagtactcttttag

SEQ ID NO: 320652 - DNA, 972 bp, Artificial Sequence
  derived and/or modified sequence
atggtcttgccctctgatcagggatttaagctgctgggcaacgtgctccaaggcccagaaccataccgcctgcttacttccggactacgattacatcaagagctcgagaatctcaacaaatgggggttgaatatcttctgcgtcagcgactatgcggggggccggtcgctgacatgcattatgtacatgattttccaagaaagggatctgctaaaaaagttcagaatcccagtcgataccatggtgacctatatgctgactcttgaagatcactaccacgccgatgtggcctaccacaacagcctccacgccgccgacgtgctgcagtccacccatgttctcttggctaccccagccttagatgccgtgttcaccgatctggagattctggccgcgcttttcgcagctgctattcacgacgtcgatcatccaggcgtatctaatcagttcctgattaacactaacagcgaattagccctgatgtacaatgatgagtccgtgttggagaatcaccatctggctgtgggcttcaagttactacaggaagataattgcgacatttttcagaacctttccaagcgccagcgacagtcgctcaggaagatggttattgacatggtattggccaccgatatgtctaagcatatgacccttttggcagacctgaagactatggttgaaacaaagaaagtgaccagctcgggggtcctcctcttggataactattccgaccggatccaggtcctgaggaacatggtccactgcgccgatctaagcaaccccacgaagccccttgagttatacaggcagtggacggaccggatcatggccgagttcttccaacagggagacagagagagagagagaggaatggagatttctcccatgtgtgacaagcacacagctagtgtcgaaaaaagccaggtgcaggcccgcggcatcgacgggcgagcgcagggagaattctattag

SEQ ID NO: 320653 - DNA, 972 bp, Artificial Sequence
  derived and/or modified sequence
atggtgctgcccagcgaccagggcttcaagctgctgggcaatgtgctgcagggccctgagccctaccgcctgctgaccagcggcctgcggctgcaccaggagctggagaacctgaacaagtggggcctgaacatcttctgtgtgtctgactatgctgggggccgcagcctgacctgcatcatgtacatgatcttccaggagcgggacctgctgaagaagttccgcatccctgtggacaccatggtgacctacatgctgaccctggaggaccactaccacgcagatgtggcctaccacaacagcctgcacgccgcagatgtgctgcagagcacccacgtgctgctggccaccccagccctggatgctgtgttcacagacctggagatcctggccgccctgtttgctgctgccatccatgatgtggaccaccctggggtgagcaaccagttcctgatcaacaccaacagcgagctggccctgatgtacaatgatgagagcgtgctggagaaccaccacctggccgtgggcttcaagctgctgcaggaggacaactgtgacatcttccagaacctgagcaagaggcagaggcagagcctgaggaagatggtgattgacatggtgctggccacagacatgagcaagcacatgaccctgctggccgacctgaagaccatggtggagaccaagaaggtgaccagcagcggcgtgctgctgctggacaactacagcgaccgcatccaggtgctgaggaacatggtgcactgtgccgacctgagcaaccccaccaagcccctggagctgtaccggcagtggacagaccgcatcatggccgagttcttccagcagggcgaccgggagcgggagcggggcatggagatcagccccatgtgtgacaagcacacagcctctgtggagaagagccaggtgcaggcccggggcattgatggccgggcccagggcgagttctactag

SEQ ID NO: 320654 - DNA, 972 bp, Artificial Sequence
  derived and/or modified sequence
atggtgctgcccagcgaccagggcttcaagctgctgggcaacgtgctccagggtccagagccttatcgactacttaccagcggtttgcggctccaccaggagctcgaaaatctaaacaagtggggtctgaacatcttctgtgtcagcgactacgcagggggtcgtagcctgacctgtatcatgtacatgattttccaggagagggatctgctgaagaaatttagaataccagtcgataccatggtgacttacatgctgacactggaagaccactatcacgccgatgtcgcttaccataatagcctccatgcagcggacgttcttcagagtacacatgtgctgttggcgacgccagctctcgatgccgtgttcacagacctggaaatcctcgctgcgttgtttgccgccgctatccacgacgtcgaccatcccggagtgtctaatcagttcctgatcaatacaaatagcgagctggcattgatgtacaacgacgagtccgtgctcgaaaaccatcacctcgcggtcggattcaaactactacaggaggacaattgcgacatattccaaaatctgtctaaacggcagaggcaaagtctccgaaagatggtcatcgacatggtgcttgcaacggatatgtctaaacatatgaccttgctggccgacctaaagacaatggtggagactaagaaagtcactagcagcggagtcctattactcgacaactactccgataggatacaggtccttcgaaatatggtgcactgcgcagatttatccaaccctactaaaccccttgagctgtaccgacagtggacggacagaattatggcagaattctttcaacagggagatcgggaaagagagcgtggaatggagatctctcccatgtgtgataagcacaccgcctcggtggaaaaatcccaggtgcaggcacggggcattgatgggcgggcgcagggggagttttactag

SEQ ID NO: 320655 - DNA, 969 bp, Artificial Sequence
  derived and/or modified sequence
atggtgcttccttcagaccaaggcttcaaactcctaggaaatgttctccagggccctgagccttacaggcttctgacctctggcctccgtctccaccaggaactggagaacctgaacaagtggggcctgaacatcttttgcgtgtcggattacgctggaggccgctcactcacctgcatcatgtacatgatattccaggagcgggacctgctgaagaaattccgcatccctgtggacacgatggtgacatacatgctgacgctggaggatcactaccacgctgacgtggcctaccataacagcctgcacgcagctgacgtgctgcagtccacccacgtactgctggccacgcctgcactagatgcagtgttcacggacctggagattctcgccgccctcttcgcggctgccatccacgatgtggatcaccctggggtctccaaccagttcctcatcaacaccaattcggagctggcgctcatgtacaacgatgagtcggtgctcgagaatcaccacctggccgtgggcttcaagctgctgcaggaggacaactgcgacatcttccagaacctcagcaagcgccagcggcagagcctacgcaagatggtcatcgacatggtgctggccacggacatgtccaagcacatgaccctcctggctgacctgaagaccatggtggagaccaagaaagtgaccagctcaggggtcctcctgctagataactactccgaccgcatccaggtcctccggaacatggtgcactgtgccgacctcagcaaccccaccaagccgctggagctgtaccgccagtggacagaccgcatcatggccgagttcttccagcagggtgaccgagagcgcgagcgtggcatggaaatcagccccatgtgtgacaagcacactgcctccgtggagaagtctcaggtacaggctcggggcattgatggacgggcacagggtgagttttat

SEQ ID NO: 320656 - DNA, 972 bp, Artificial Sequence
  derived and/or modified sequence
atggtccttccgtccgaccagggcttcaaactgttggggaatgttctgcagggacctgagccctatcgccttctcacgtccggactcaggctacatcaagagctggagaacctgaacaaatggggcctcaatattttttgcgtctccgactacgcgggaggaaggagcttgacctgcattatgtacatgatcttccaggagagagatctcctgaagaaatttcggatacccgtggacaccatggtaacctacatgctcacactcgaggaccattaccacgccgacgtggcctatcataacagtttgcacgcagctgacgtcctgcagagtactcacgtcctgctcgccactcccgcattggatgccgtgtttactgacctggagattctggctgccctcttcgctgccgctatccatgacgtggaccacccgggtgtctctaatcagttcctaataaacactaattcagaactcgcactgatgtacaacgacgagtcggtgctggaaaatcaccaccttgcagtcggattcaaattattacaggaggacaactgcgatatttttcagaatctgagtaagaggcaacgccagtccctgaggaagatggtgatcgacatggttctcgccacagatatgtccaagcacatgaccctgcttgccgacctaaagaccatggtggaaactaagaaagtaacatctagcggagtactcctgctggataattattcagacaggatccaagtcctgcgcaacatggtccactgtgctgacctgtctaatccgaccaaaccacttgagctttacagacagtggacggatcgtataatggctgagttcttccagcagggagacagggagcgtgagcgaggcatggagatcagccctatgtgtgataaacatacggcaagtgtggagaaaagtcaggtacaggctcgagggattgatggccgagcccagggtgaattctactag

SEQ ID NO: 320657 - DNA, 972 bp, Artificial Sequence
  derived and/or modified sequence
atggtgctgcccagcgaccagggcttcaagctgctgggcaacgtgctgcagggccccgagccctacagactgctgaccagcggcctgagactgcaccaggagctggagaacctgaacaagtggggcctgaacatcttctgcgtgagcgactacgccggcggcagaagcctgacctgcatcatgtacatgatcttccaggagagagacctgctgaagaagttcagaatccccgtggacaccatggtgacctacatgctgaccctggaggaccactaccacgccgacgtggcctaccacaacagcctgcacgccgccgacgtgctgcagagcacccacgtgctgctggccacccccgccctggacgccgtgttcaccgacctggagatcctggccgccctgttcgccgccgccatccacgacgtggaccaccccggcgtgagcaaccagttcctgatcaacaccaacagcgagctggccctgatgtacaacgacgagagcgtgctggagaaccaccacctggccgtgggcttcaagctgctgcaggaggacaactgcgacatcttccagaacctgagcaagagacagagacagagcctgagaaagatggtgatcgacatggtgctggccaccgacatgagcaagcacatgaccctgctggccgacctgaagaccatggtggagaccaagaaggtgaccagcagcggcgtgctgctgctggacaactacagcgacagaatccaggtgctgagaaacatggtgcactgcgccgacctgagcaaccccaccaagcccctggagctgtacagacagtggaccgacagaatcatggccgagttcttccagcagggcgacagagagagagagagaggcatggagatcagccccatgtgcgacaagcacaccgccagcgtggagaagagccaggtgcaggccagaggcatcgacggcagagcccagggcgagttctactag

SEQ ID NO: 320658 - DNA, 2674 bp, Artificial Sequence
  derived and/or modified sequence
cgggttcctgagaattgtcaatcaggcgcgaggcagagaggagggtgtgacgttccaggagctagtggcctcttcaccctggtgacctctgttccgtattctgtcactgagagacgccctgggacatctgtggtggcttttgtcgcgctgggacctaccctgactacgggagttgggaggacccgggacaccgcacagccgggaaatggactcagtggcctttgaggatgtggctgtgaacttcacccatgaggagtgggctttgctgggtccatcacagaagaatctctacagagatgtgatgcgagaaaccattaggaacctgaactgtataggaatgaaatgggaaaaccagaacattgatgatcagcaccaaaatctcaggagaaatccaaggtgtgatgtggtagagagatttggtaaaagtaaagatggtagtcagtgtggagaaaccttaagccagattcgaaatagtattgtaaacaagaacactcccgccagagtagatgcatgtggaagcagtgtgaatggagaagtcataatgggtcattcatccctgaattgctacatcagagttgatactggacacaaacaccgggagtgtcatgaatatgcagagaagtcatatacacataagcagtgtgggaaaggcttaagttatcgccactcctttcaaacatgtgaaaggcctcacactggaaagaaaccctatgattgtaaggaatgtggaaaaaccttcagttctcctggaaaccttcgaagacatatggtagtaaaaggtggagatggaccttataaatgtgaattgtgtgggaaagcctttttttggcccagtttattacgtatgcatgaaagaactcacactggagagaaaccatatgaatgtaagcagtgttctaaagccttccctgtttacagttcctatctaagacatgaaaaaatacacactggggagaaaccgtatgaatgtaagcagtgttctaaagccttccctgattacagttcatatctaagacatgaaagaactcacactggagagaaaccctacaaatgtaaacaatgtgggaaagccttcagtgtttccggttcccttcgagtacatgaaagaattcacactggagagaaaccctatacatgtaaacagtgtgggaaagcgttttgtcatcttggaagctttcaaagacacatgataatgcacagtggagatggacctcataaatgtaagatatgtgggaaaggctttgattttcctggttcagcacgaattcatgaaggaactcacactctagagaaaccctatgaatgtaagcaatgtgggaaattgttatctcatcgctcaagctttcgaagacacatgatggcacacactggagatggccctcataaatgcacagtatgtgggaaagcctttgattctcctagtgtatttcaaagacatgaaaggactcacactggagagaaaccctatgaatgcaagcaatgtgggaaagccttccgtacttccagttcccttcgaaaacatgaaacaacacacactggagagcaaccctataaatgtaaatgtggaaaagcttttagtgatttattttcctttcaaagtcatgaaacaacacacagtgaagaggagccttatgaatgtaaggagtgtgggaaagcatttagttcttttaaatacttttgtcgccatgaaaggactcacagtgaagaaaaatcttatgagtgtcaaatttgtggcaaagccttcagtcgtttcagttacttaaaaactcatgaaaggactcacacggcagagaagccatatgaatgtaagcaatgcaggaaagcattcttttggccctctttccttctaagacatgaaaggactcacactggagaaagaccctatgaatgtaaacactgtggtaaagccttcagtcgttccagtttctgtcgagaacatgaaagaactcacactggagagaagccctatgaatgtaaggaatgtgggaaagccttcagttctctcagttcctttaatagacataaaaggacacactggaaggatattctataagtgtatggaatgtgggaaagcattcattggttttatcacattcagatacttgaaagaaataaatcctgtgaatgtaaacgtggtaaagccttaagaagtttccaggctgggcgcagcggctcacacctgtaatcccagcactttgagaggccgaggagggcagatcacgaggccaggagatcgagaccagcctggctaacatgggaaaccctgtctctactaaaaatacggaaaaaaaaaaaaatagccaggcatagttgctcacacctgtagtcctagctactcaggaggctgaggcaggagaatcccttgaacccgggaggtggaggttgcagtgagccgagattgcactactgcactccagcttgggtgctagagcgagactccatctcaaaaaaaaaaaaaaaagtttccatttctttcaaatagagttgctgcctgctatatgcaagaagattggttccagtacaccctgagtatacctaaatccacagatgccagctcttttataaaatggaatattcgcatgtacctacccacattctcctgtatactctataaatgtctagattaattaaaatatctcatgcattgtaaaaaaaaaaaaaaaaaaaaaaaaaa

SEQ ID NO: 320659 - DNA, 2119 bp, Artificial Sequence
  derived and/or modified sequence
aattgtcaatcaggcgcgaggcagagaggagggtgtgacgttccaggagctagtggcctcttcaccctggtgacctctgttccgtattctgtcactgagagacgccctgggacatctgtggtggcttttgtcgcgctgggacctaccctgactacgggagttgggaggacccgggacaccgcacagccgggaaatggactcagtggcctttgaggatgtggctgtgaacttcacccatgaggagtgggctttgctgggtccatcacagaagaatctctacagagatgtgatgcgagaaaccattaggaacctgaactgtataggaatgaaatgggaaaaccagaacattgatgatcagcaccaaaatctcaggagaaatccaaggtgtgatgtggtagagagatttggtaaaagtaaagatggtagtcagtgtggagaaaccttaagccagattcgaaatagtattgtaaacaagaacactcccgccagagtagatgcatgtggaagcagtgtgaatggagaagtcataatgggtcattcatccctgaattgctacatcagagttgatactggacacaaacaccgggagtgtcatgaatatgcagagaagtcatatacacataagcagtgtgggaaaggcttaagttatcgccactcctttcaaacatgtgaaaggcctcacactggaaagaaaccctatgattgtaaggaatgtggaaaaaccttcagttctcctggaaaccttcgaagacatatggtagtaaaaggtggagatggaccttataaatgtgaattgtgtgggaaagcctttttttggcccagtttattacgtatgcatgaaagaactcacactggagagaaaccatatgaatgtaagcagtgttctaaagccttccctgtttacagttcctatctaagacatgaaaaaatacacactggggagaaaccgtatgaatgtaagcagtgttctaaagccttccctgattacagttcatatctaagacatgaaagaactcacactggagagaaaccctacaaatgtaaacaatgtgggaaagccttcagtgtttccggttcccttcgagtacatgaaagaattcacactggagagaaaccctatacatgtaaacagtgtgggaaagcgttttgtcatcttggaagctttcaaagacacatgataatgcacagtggagatggacctcataaatgtaagatatgtgggaaaggctttgattttcctggttcagcacgaattcatgaaggaactcacactctagagaaaccctatgaatgtaagcaatgtgggaaattgttatctcatcgctcaagctttcgaagacacatgatggcacacactggagatggccctcataaatgcacagtatgtgggaaagcctttgattctcctagtgtatttcaaagacatgaaaggactcacactggagagaaaccctatgaatgcaagcaatgtgggaaagccttccgtacttccagttcccttcgaaaacatgaaacaacacacactggagagcaaccctataaatgtaaatgtggaaaagcttttagtgatttattttcctttcaaagtcatgaaacaacacacagtgaagaggagccttatgaatgtaaggagtgtgggaaagcatttagttcttttaaatacttttgtcgccatgaaaggactcacagtgaagaaaaatcttatgagtgtcaaatttgtggcaaagccttcagtcgtttcagttacttaaaaactcatgaaaggactcacacggcagagaagccatatgaatgtaagcaatgcaggaaagcattcttttggccctctttccttctaagacatgaaaggactcacactggagaaagaccctatgaatgtaaacactgtggtaaagccttcagtcgttccagtttctgtcgagaacatgaaagaactcacactggagagaagccctatgaatgtaaggaatgtgggaaagccttcagttctctcagttcctttaatagacataaaaggacacactggaaggatattctataagtgtatggaatgtgggaaagcattcattggttttatcacattcagatacttgaaagaaataaatcctgtgaatgtaaa

SEQ ID NO: 320660 - DNA, 2372 bp, Artificial Sequence
  derived and/or modified sequence
tggcctcttcaccctggtgacctctgttccgtattctgtcactgagagacgccctgggacatctgtggtggcttttgtcgcgctgggacctaccctgactacgggagttgggaggacccgggacaccgcacagccgggaaatggactcagtggcctttgaggatgtggctgtgaacttcacccatgaggagtgggctttgctgggtccatcacagaagaatctctacagagatgtgatgcgagaaaccattaggaacctgaactgtataggaatgaaatgggaaaaccagaacattgatgatcagcaccaaaatctcaggagaaatccaaggtgtgatgtggtagagagatttggtaaaagtaaagatggtagtcagtgtggagaaaccttaagccagattcgaaatagtattgtaaacaagaacactcccgccagagtagatgcatgtggaagcagtgtgaatggagaagtcataatgggtcattcatccctgaattgctacatcagagttgatactggacacaaacaccgggagtgtcatgaatatgcagagaagtcatatacacataagcagtgtgggaaaggcttaagttatcgccactcctttcaaacatgtgaaaggcctcacactggaaagaaaccctatgattgtaaggaatgtggaaaaaccttcagttctcctggaaaccttcgaagacatatggtagtaaaaggtggagatggaccttataaatgtgaattgtgtgggaaagcctttttttggcccagtttattacgtatgcatgaaagaactcacactggagagaaaccatatgaatgtaagcagtgttctaaagccttccctgtttacagttcctatctaagacatgaaaaaatacacactggggagaaaccgtatgaatgtaagcagtgttctaaagccttccctgattacagttcatatctaagacatgaaagaactcacactggagagaaaccctacaaatgtaaacaatgtgggaaagccttcagtgtttccggttcccttcgagtacatgaaagaattcacactggagagaaaccctatacatgtaaacagtgtgggaaagcgttttgtcatcttggaagctttcaaagacacatgataatgcacagtggagatggacctcataaatgtaagatatgtgggaaaggctttgattttcctggttcagcacgaattcatgaaggaactcacactctagagaaaccctatgaatgtaagcaatgtgggaaattgttatctcatcgctcaagctttcgaagacacatgatggcacacactggagatggccctcataaatgcacagtatgtgggaaagcctttgattctcctagtgtatttcaaagacatgaaaggactcacactggagagaaaccctatgaatgcaagcaatgtgggaaagccttccgtacttccagttcccttcgaaaacatgaaacaacacacactggagagcaaccctataaatgtaaatgtggaaaagcttttagtgatttattttcctttcaaagtcatgaaacaacacacagtgaagaggagccttatgaatgtaaggagtgtgggaaagcatttagttcttttaaatacttttgtcgccatgaaaggactcacagtgaagaaaaatcttatgagtgtcaaatttgtggcaaagccttcagtcgtttcagttacttaaaaactcatgaaaggactcacacggcagagaagccatatgaatgtaagcaatgcaggaaagcattcttttggccctctttccttctaagacatgaaaggactcacactggagaaagaccctatgaatgtaaacactgtggtaaagccttcagtcgttccagtttctgtcgagaacatgaaagaactcacactggagagaagccctatgaatgactcagtgacctttgaagatgtggctgtgaacttcacccaggaggaatggactttgctggatccttcacagaaaaaactctacagagacgtgatgtgggaaaccttcaggaacctggccactataggaacaaaacaaaaagaatggaacattgaagagcagtacaaaaaccaggggagaaatctcagaaatcatatggtagagagactctgtgaaagtaaagaaggtagtcatggcggagaaggtttcagccagattgcaaatctcagtctgaacaagaaaactccttctggaggaaagctttgggaaagcagtgtatgtggaaaagtcttgagccatcattcatcccttaacaggcacattagatcttacaccagacacaaactgtataagtgtcaggaatatggagagaagccatataaatgtaagaaatgtgggaaacccttcagttatctgcagtcttt

SEQ ID NO: 320661 - DNA, 1012 bp, Artificial Sequence
  derived and/or modified sequence
catgaaggaactcacactctagagaaaccctatgaatgtaagcaatgtgggaaattgttatctcatcgctcaagctttcgaagacacatgatggcacacactggagatggccctcataaatgcacagtatgtgggaaagcctttgattctcctagtgtatttcaaagacatgaaaggactcacactggagagaaaccctatgaatgcaagcaatgtgggaaagccttccgtacttccagttcccttcgaaaacatgaaacaacacacactggagagcaaccctataaatgtaaatgtggaaaagcttttagtgatttattttcctttcaaagtcatgaaacaacacacagtgaagaggagccttatgaatgtaaggagtgtgggaaagcatttagttcttttaaatacttttgtcgccatgaaaggactcacagtgaagaaaaatcttatgagtgtcaaatttgtgcaaagccttcagtcgtttcagttacttaaaaactcatgaaagactcacacggcagagaagccatatgaatgtaagcaatgcaggaaagcattcttttggccctctttccttctaagacatgaaaggactcacactggagaaagaccctatgaatgtaaacactgtggtaaagccttcagtcgttccagtttctgtcgagaacactgaaagaactcacatgagagaagccctatgaatgtaaggaatgtgggaaagccttcagttctctcagttcctttaatagacataaaaggacacactggaagatattctataagtgtatgaatgtgggaaagcattcattggttttatcacattcagatacttgaaagaaataaatcctgtgaatgtaaacgtggtaaagccttaagaagtttccaggctgggcgcagcggctcacacctgtaatcccagcactttgagaggccgaggagggcagatcacgaggccaggagatcgagaccagcctggctaacatgggaaaccctgtctctactaaaaatacgg

SEQ ID NO: 320662 - DNA, 189 bp, Artificial Sequence
  derived and/or modified sequence
atgctgcaggtggtgcaggagggcaaccccgcccccttcatcatcaacaccgtgaagagaggcagaagagacagagagagacagagaaccccctgggccccccaccccctgggcttccagggcagaagatacatctacgagagccccaaccacagaggcaaggacagcagcttcctggcccagaagtag

SEQ ID NO: 320663 - DNA, 123 bp, Artificial Sequence
  derived and/or modified sequence
atgttactcagggagataacctacagcattactccactgtcacttcacggcacttcactcctgaactgcaattggagggctacaggtctcgtaacgcttgagggccatcggccattccaatag

SEQ ID NO: 320664 - DNA, 2641 bp, Artificial Sequence
  derived and/or modified sequence
ggcccgccccgattgcgctgtggctgcgcctggtcttggccctggcccttgtccgcccccgggctgtggggtgggccccggtccgagcccccatctatgtcagcagctgggccgtccaggtgtcccagggtaaccgggaggtcgagcgcctggcacgcaaattcggcttcgtcaacctggggccggtgggtgggaccgggatagacgggaagtgggggcttggaggggactgaacaaccctagaccccgacaagggggagggagcccacaaggtcttctaaatatcaagagtcccagcccacccctgcctcagccaagctcagcttctgggactcccagagagcacctgctggggaaggacaaagaagggggctgttaccggccctcgggggcttcagcaggggagccgggtcccatcggtgcggccgcttccccacatccccagatcttccctgacgggcagtactttcacctgcggcaccggggcgtggtccagcagtccctgaccccgcactggggccaccgcctgcacctgaagaaaaaccccaaggtgcagtggttccagcagcagacgctgcagcggcgggtgaaacgctctgtcgtggtgcccacggacccctggttctccaagcagtggtacatgaacagcgaggcccaaccagacctgagcatcctgcaggcctggagtcaggggctgtcaggccagggcatcgtggtctctgtgctggacgatggcatcgagaaggaccacccggacctctgggccaactacgaccccctggccagctatgacttcaatgactacgacccggacccccagccccgctacacccccagcaaagagaaccggcgtacggatgctggacggtaccatcaccgatgtcatcgaggcccagtcgctgagcctgcagccgcagcacatccacatttacagcgccagctggggtcccgaggacgacggccgcacggtggacggccccggcatcctcacccgcgaggccttccggcgtggtgtgaccaagggccgcggcgggctgggcacgctcttcatctgggcctcgggcaacggcggcctgcactacgacaactgcaactgcgacggctacaccaacagcatccacacgctttccgtgggcagcaccacccagcagggccgcgtgccctggtacagcgaagcctgcgcctccaccctcaccaccacctacagcagcggcgtggccaccgacccccagatcgtcaccacggacctgcatcacgggtgcacagaccagcacacgggcacctcggcctcagccccactggcggccggcatgatcgccctagcgctggaggccaacccgttcctgacgtggagagacatgcagcacctggtggtccgcgcgtccaagccggcgcacctgcaggccgaggactggaggaccaacggcgtggggcgccaagtgagccatcactacggatacgggctgctggacgccgggctgctggtggacaccgcccgcacctggctgcccacccagccgcagaggaagtgcgccgtccgggtccagagccgccccacccccatcctgccgctgatctacatcagggaaaacgtatcggcctgcgccggcctccacaactccatccgctcgctggagcacgtgcaggcgcagctgacgctgtcctacagccggcgcggagacctggagatctcgctcaccagccccatgggcacgcgctccacactcgtggccatacgggacgttgtaccgctacacgctgctgctctatgggacggccgaggacatgacagcgcggcctacaggcccccaggtgaccagcagcgcgtgtgtgcagcgggacacagaggggctgtgccaggcgtgtgacggccccgcctacatcctgggacagctctgcctggcctactgccccccgcggttcttcaaccacacaaggctggtgaccgctgggcctgggcacacggcggcgcccgcgctgagggtctgctccagctgccatgcctcctgctacacctgccgcggcggctccccgagggactgcacctcctgtcccccatcctccacgctggaccagcagcagggctcctgcatgggacccaccacccccgacagccgcccccggcttagagctgccgcctgtccccaccaccgctgcccagcctcggccatggtgctgagcctcctggccgtgaccctcggaggccccgtcctctgcggcatgtccatggacctcccactatacgcctggctctcccgtgccagggccacccccaccaaaccccaggtctggctgccagctggaacctgaagttgtcagctcagaaagcgaccttgcccccgcctgggtccctgacaggcactgctgccatgctgcctccccaggctggccccagaggagcgagcaccagcacccgacgcctggcctgccagggatgggccccgtggaaccccgaagcctggcgggagagagagagagagaagtctcctctgcattttgggtttgggcgggagtgggctggggggagaggctggagcaccccaaaagccaggggaaagtggagggagagaaacgtgacactgtccgcctcgggcaccgcgtccaacctcagagtttgcaaataaaggttgcttagaaggtg

SEQ ID NO: 320665 - protein, 378 aa, Artificial Sequence [sequence omitted]

SEQ ID NO: 320666 - DNA, 1137 bp, Artificial Sequence
  derived and/or modified sequence
atggcctctcggaggactacacggacgagcggaccaaccaccactccgtggcccgcgatgacctccatgaccaccactcgcacaccttccccggccacccctcccgctaagagaacgggggtcaggatgcttgatggcaccatcaccgatgtcatcgaagctcagagcctgtctctgcaacctcagcatatccatatctactctgcttcttggggacccgaggacgatggacgcactgtggatggccctggaatcctgactcgggaagcattcagacgaggagtgactaagggtagaggcggattgggcaccctgttcatatgggcctcaggtaacgggggcttacactatgacaactgtaactgtgatggttacacaaactccattcatacgctcagtgtagggtctactacccagcaggggcgggtgccatggtactcagaagcctgcgcaagtacgctgaccactacatattcctctggtgtggctacggacccacagatcgtcaccaccgaccttcatcacggttgtacagatcagcatacgggcacatccgccagcgcccctctggccgcaggtatgattgctttagcattagaagctaatccgtttctcacttggcgtgacatgcaacaccttgtggtgagagcatccaaaccagcccacttgcaagcggaggattggcgaactaacggagttggtaggcaggtttcccaccactacgggtatgggttgctcgatgcaggccttttggttgacactgcccgtacctggctccctactcaaccacagaggaagtgtgccgtcagggtgcagtcccgtcctacaccgattctgccgttaatttacatcagggagaatgtgtcggcatgcgccggccttcacaacagcatccgttccctcgagcacgtgcaagcccagcttacattatcttatagtagaaggggagatttggagattagcttgaccagtcctatgggcacgcgaagcactttagtggcaatcagagacgtggtcccccttcacgccgcagctctgtgggacgggcgggggcatgactctgctgcctatcgaccgcctggcgatcagcagcgcgtttgcgccgctgggcacagaggcgctgtccccggcgtttag

SEQ ID NO: 320667 - DNA, 1137 bp, Artificial Sequence
  derived and/or modified sequence
atggccagcaggaggaccaccaggaccagcggccccaccaccaccccctggccagccatgacctccatgaccaccaccaggacccccagccctgccaccccaccagccaagaggactggagtgaggatgctggatggcaccatcacagatgtgattgaggcccagagcctgagcctgcagccccagcacatccacatctacagcgcctcctggggcccagaagatgatggccgcacagtggatggccctggcatcctgacccgggaggccttccggcggggcgtgaccaagggccggggcggcctgggcaccctcttcatctgggccagcggaaatggaggcctgcactatgacaactgcaactgtgatggctacaccaacagcatccacaccctgtctgtgggcagcaccacccagcagggccgggtgccctggtacagcgaggcctgtgccagcaccctgaccaccacctacagcagcggcgtggccacagacccccagatcgtgaccacagacctgcaccacggctgcacagaccagcacacaggcaccagcgccagcgcccccctggccgccggcatgattgccctggccctggaggccaaccccttcctgacctggagggacatgcagcacctggtggtgcgggccagcaagccagcccacctgcaggccgaggactggaggaccaatggagtgggccggcaggtgagccaccactacggctacggcctgctggatgctggcctgctggtggacacagcccggacctggctgcccacccagccccagaggaaatgtgctgtgcgggtgcagagccggcccacccccatcctgcccctcatctacatccgggagaatgtgtctgcctgtgccggcctgcacaacagcatccgcagcctggagcacgtgcaggcccagctgaccctgagctacagccggcggggggacctggagatcagcctgaccagccccatgggcaccaggagcaccctggtggccatcagagatgtggtgcccctgcatgctgctgccctgtgggatggccggggccatgacagcgctgcctacagacctcctggggaccagcagagggtgtgtgccgccggccacagaggagctgtgcctggggtgtag

SEQ ID NO: 320668 - DNA, 1137 bp, Artificial Sequence
  derived and/or modified sequence
atggccagccggcggaccacccggaccagcggccccaccaccaccccgtggccagccatgaccagcatgactacgactcgaacaccctcacccgccactccgcctgcaaaacgtacaggagttagaatgctcgacggaaccatcactgatgtgattgaggcacagagtctcagcctgcaacctcaacacatacacatttattctgctagctggggccccgaagatgatggaaggacagtagacggtcctggcatcctgaccagagaagcctttcgcaggggcgtcacaaaaggccgcggtgggttgggcactctgtttatctgggcttctggcaacggtggactgcactacgataactgcaactgcgatgggtacacgaactctattcataccctgagcgtcggctcaacgactcagcagggcagagtgccttggtacagtgaggcatgtgcatccactctgactaccacatattcatccggagtggccacggatccacaaatcgtcaccacagatctgcatcacggctgtacggaccaacacaccggtacttctgcctctgctcctttagccgctggcatgatcgccctggccttggaagcaaatcccttcctgacctggagggacatgcagcatctggtggtgcgggcatctaagcccgcccacttacaggccgaagactggaggacaaatggcgtcggcaggcaagtgagtcatcactacggatacgggttactggacgctggcctgttagtggacaccgcacgaacttggctgcctactcagccacaaaggaaatgtgcagtaagggtgcagagccgccccacgcctattttgcccctcatttacatccgggaaaacgtgtccgcctgtgccggcctccacaattcaattcggtctttagaacatgtgcaagcccagctaaccctgtcttactcacggcgcggtgatcttgagattagcctcacctccccaatggggacgaggtcaacactggttgctattcgcgatgtcgtccctctgcacgcggccgcgttgtgggacggcagaggccacgacagtgcggcatacagaccccctggcgatcagcagcgggtgtgcgccgccggtcataggggtgctgtgcctggcgtgtag

SEQ ID NO: 320669 - DNA, 1137 bp, Artificial Sequence
  derived and/or modified sequence
atggctagcagacggacaacaagaacctctggacccacaacaacaccttggcctgcgatgaccagcatgaccactacccggacaccaagccccgcaacacctcccgctaaacgcactggggtgcggatgctggacgggacaattaccgatgtaattgaggctcaatctctctcgctgcaacctcagcacattcatatctactccgcctcgtggggtcctgaggacgacggacgaacggtggacggtccaggaatcctgaccagagaagctttccgccgtggcgtcactaagggacgtggcggactgggtactcttttcatctgggcatcggggaatgggggtctgcattacgataattgtaactgtgatgggtacaccaatagcatccacaccctttctgtcggctcgacgacacagcagggcagagttccttggtactctgaggcctgcgcaagcacccttactaccacctacagctccggggtggcgactgacccccagatcgtaacaactgacctgcaccacggatgcactgatcagcatactggtacatctgcatctgcccctctggcagctgggatgatcgccctggcactggaagcaaatccattcctgacctggcgcgatatgcaacacttggtggtcagagcctcaaagcctgctcacctacaagctgaagattggcgcactaacggcgttggcaggcaggttagtcatcattatgggtacggacttctggacgctggacttctggtcgacaccgccaggacatggttacctacacagccgcagcgaaaatgcgctgtcagagtgcagagcaggcccacgcccattctgcccctgatctacatcagagagaatgtatccgcgtgtgccggactgcataacagtattcgcagtttagaacacgtccaggcacagctgacgctgagctactcccgcaggggggacctggagattagtctgacgtccccgatgggcacacggagcaccctggtggccattcgggatgtcgtcccactgcacgctgcggctttatgggacgggagagggcacgactcagcggcttatcgcccacctggggaccaacagcgagtgtgcgccgcaggacataggggcgcagttccaggagtgtag

SEQ ID NO: 320670 - DNA, 1137 bp, Artificial Sequence
  derived and/or modified sequence
atggccagcagaagaaccaccagaaccagcggccccaccaccaccccctggcccgccatgaccagcatgaccaccaccagaacccccagccccgccaccccccccgccaagagaaccggcgtgagaatgctggacggcaccatcaccgacgtgatcgaggcccagagcctgagcctgcagccccagcacatccacatctacagcgccagctggggccccgaggacgacggcagaaccgtggacggccccggcatcctgaccagagaggccttcagaagaggcgtgaccaagggcagaggcggcctgggcaccctgttcatctgggccagcggcaacggcggcctgcactacgacaactgcaactgcgacggctacaccaacagcatccacaccctgagcgtgggcagcaccacccagcagggcagagtgccctggtacagcgaggcctgcgccagcaccctgaccaccacctacagcagcggcgtggccaccgacccccagatcgtgaccaccgacctgcaccacggctgcaccgaccagcacaccggcaccagcgccagcgcccccctggccgccggcatgatcgccctggccctggaggccaaccccttcctgacctggagagacatgcagcacctggtggtgagagccagcaagcccgcccacctgcaggccgaggactggagaaccaacggcgtgggcagacaggtgagccaccactacggctacggcctgctggacgccggcctgctggtggacaccgccagaacctggctgcccacccagccccagagaaagtgcgccgtgagagtgcagagcagacccacccccatcctgcccctgatctacatcagagagaacgtgagcgcctgcgccggcctgcacaacagcatcagaagcctggagcacgtgcaggcccagctgaccctgagctacagcagaagaggcgacctggagatcagcctgaccagccccatgggcaccagaagcaccctggtggccatcagagacgtggtgcccctgcacgccgccgccctgtgggacggcagaggccacgacagcgccgcctacagaccccccggcgaccagcagagagtgtgcgccgccggccacagaggcgccgtgcccggcgtgtag

SEQ ID NO: 320671 - DNA, 309 bp, Artificial Sequence
  derived and/or modified sequence
atggccaacacccagctggaccacctgcactacaccaccgagttcaccagaaacgacctgctgatcatctgcaagaagttcaacctgatgctgatggacgaggacatcatcagcctgctggccatcttcatcaagatgtgcctgtggctgtggaagcagttcctgaagagaggcagcaagtgcagcgagaccagcgagctgctggagaaggtgaagctgcagctggccttcaccgcctacaagtacgtggacatctgcttccccgagcagatggcctacagcagatacatcagatggtacatccactag

SEQ ID NO: 320672 - DNA, 309 bp, Artificial Sequence
  derived and/or modified sequence
atggccaacacccagctggaccacctgcactacaccacagagttcaccagaaatgacctgctgatcatctgcaagaagttcaacctgatgctgatggatgaggacatcatcagcctgctggccatcttcatcaagatgtgcctgtggctgtggaagcagttcctgaagaggggcagcaagtgcagcgagaccagcgagctgctggagaaggtgaagctgcagctggccttcaccgcctacaagtatgtggacatctgcttccctgagcagatggcctacagccgctacatccgctggtacatccactag

SEQ ID NO: 320673 - protein, 608 aa, Artificial Sequence
  derived and/or modified sequence
MTEEACRTRSQKRALERDPTEDDVESKKIKMERGLLASDLNTDGDMRVTPEPGAGPTQGLLRATEATAMAMGRGEGLVGDGPVDMRTSHSDMKSERRPPSPDVIVLSDNEQPSSPRVNGLTTVALKETSTEALMKSSPEERERMIKQLKEELRLEEAKLVLLKKLRQSQIQKEATAQKPTGSVGSTVTTPPPLVRGTQNIPAGKPSLQTSSARMPGSVIPPPLVRGGQQASSKLGPQASSQVVMPPLVRGAQQIHSIRQHSSTGPPPLLLAPRASVPSVQIQGQRIIQQGLIRVANVPNTSLLVNIPQPTPASLKGTTATSAQANSTPTSVASVVTSAESPASRQAAAKLALRKQLEKTLLEIPPPKPPAPEMNFLPSAANNEFIYLVGLEEVVQNLLETQGRMSAATVLSREPYMCAQCKTDFTCRWREEKSGAIMCENCMTTNQKKALKVEHTSRLKAAFVKALQQEQEIEQRLLQQGTAPAQAKAEPTAAPHPVLKQASSQLSRGSATTPRGVLHTFSPSPKLQNSASATALVSRTGRHSERTVSAGKGSATSNWKKTPLSTGGTLAFVSPSLAVHKSSSAVDRQREYLLDMIPPRSIPQSATWK

SEQ ID NO: 320674 - protein, 436 aa, Artificial Sequence
  derived and/or modified sequence
MIKQLKEELRLEEAKLVLLKKLRQSQIQKEATAQKTSSARMPGSVIPPPLVRGGQQASSKLGPQASSQVVMPPLVRGAQQIHSIRQHSSTGPPPLLLAPRASVPSVQIQGQRIIQQGLIRVANVPNTSLLVNIPQPTPASLKGTTATSAQANSTPTSVASVVTSAESPASRQAAAKLALRKQLEKTLLEIPPPKPPAPEMNFLPSAANNEFIYLVGLEEVVQNLLETQAGRMSAATVLSREPYMCAQCKTDFTCRWREEKSGAIMCENCMTTNQKKALKVEHTSRLKAAFVKALQQEQEIEQRLLQQGTAPAQAKAEPTAAPHPVLKQASSQLSRGSATTPRGVLHTFSPSPKLQNSASATALVSRTGRHSERTVSAGKGSATSNWKKTPLSTGGTLAFVSPSLAVHKSSSAVDRQREYLLDMIPPRSIPQSATWK

SEQ ID NO: 320675 - protein, 139 aa, Artificial Sequence
  derived and/or modified sequence
MTEEACRTRSQKRALERDPTEDDVESKKIKMERGLLASDLNTDGDMRVTPEPGAGPTQGLLRATEATAMAMGRGEGLVGDGPVDMRTSHSDMKSERRPPSPDVIVLSDNEQPSSPRVNGLTTVALKETSTEALMKSSPE

SEQ ID NO: 320676 - protein, 93 aa, Artificial Sequence
  derived and/or modified sequence
MTEEACRTRSQKRALERDPTEDDVESKKIKMERGLLASDLNTDGDMRVTPEPGAGPTQGLLRATEATAMAMGRGEGLVGDGPVDMRTSHSDMK

SEQ ID NO: 320677 - DNA, 1827 bp, Artificial Sequence
  derived and/or modified sequence
atgactgaggaagcatgtaggacgcggagccagaagcgagccctcgagcgggaccccacggaggacgatgtggaatccaaaaagatcaagatggagcggggccttttagcaagtgatctcaacacggatggtgacatgagagtcacccccgaacctggagcaggtccaacccagggcctgcttagagctaccgaggcgaccgctatggcgatgggccgaggggaaggcttggtgggggacggacccgtggatatgcgaacttctcactctgacatgaagtccgagaggcgcccacccagccccgacgtcattgttttgtcagacaacgagcaaccaagcagtccccgcgttaacggtctgaccacagtggccctgaaagaaacctcgaccgaagcccttatgaaatcaagccccgaagagcgggagcggatgatcaaacaactgaaagaagagctgcgccttgaggaggcaaagcttgtcctgctgaagaagctcagacagagccagatccagaaagaagctaccgctcagaagcctacgggctccgtcgggagcactgtgacaactcctcctccgcttgtgcggggtactcagaacatcccagcaggcaagcccagcctccagacatcatcagctagaatgcctggctctgtgattcctccacccctggtgcgaggcgggcagcaagcctctagcaagctcggtccacaggcctctagccaggtggtgatgccaccactcgtacggggcgcccagcagatccacagtatcaggcagcacagttctactggaccccctcccctgttactggctccccgtgccagcgtgccatccgttcagatccagggccagcgaataatacaacaaggcctgatcagggtagctaacgtgccaaacactagtctgctggtcaacattccacagccaactccagcctcgctgaagggtactaccgccaccagcgctcaggccaatagcacccctacctcggtagcttccgtcgtgaccagcgccgagagccctgcttcaaggcaggcagcagctaagttagcgctcaggaaacagctggagaagaccctgctcgagattcctccaccaaagccacctgctccagaaatgaatttcttgccctccgcggccaacaacgaattcatatatctggtcgggctcgaggaagtggtacagaatctcttagagactcaggggcgcatgtccgctgccactgttctgtccagagagccctacatgtgtgctcaatgtaagactgatttcacctgccggtggagagaggaaaaatccggcgcgataatgtgcgagaactgtatgaccacaaatcagaagaaggcattgaaagtcgagcacacttcacggctgaaggcggcctttgtgaaggcgctgcagcaagaacaggaaatcgagcagcgcctgctgcagcagggcacagctcctgcccaagccaaggctgaaccgaccgctgcccctcatccagtgctgaaacaggcatcctcccaattaagcaggggctccgccactacaccacgtggagttctccatacttttagcccgagtccaaagctgcagaacagcgcgtcggcaacagctctggtaagccgaacaggaaggcactcagaaaggacagtgtcagccggtaaaggctcggccaccagtaattggaagaaaacacctcttagcactgggggaacccttgcattcgtgtcccccagcctggcggtgcacaagtccagttccgctgtcgatcgacagagggagtatctgctggacatgatcccacctcggagcatcccacagtccgcaacctggaaatag

SEQ ID NO: 320678 - DNA, 534 bp, Artificial Sequence
  derived and/or modified sequence
atgacagaagaggcatgcagaacacgcagccaaaaacgggctctggagcgagatccgaccgaggacgatgttgagtcgaaaaaaattaagatggaaagaggtctactcgccagtgacctcaatacagacggagatatgagggtgacacctgaacccggcgccggccctactcagggcctcctccgagctaccgaggccactgccatggccatgggcagaggtgaagggctggtgggggatggcccagttgatatgcgcacctcccattctgacatgaagagcgagcgtcggccacctagtcccgacgtcatcgtgttatcagataacgagcagccctcctcacctagggtcaacggcctcaccaccgtggcgcttaaagagaccagcacagaagccttgatgaagagcagcccagaagagcgcgagagaatgattaagcagctgaaagaagaactgcggctcgaagaagccaagctggtgctcctgaaaaagctgcggcagtcccagatccagaaggaggccacagcccagtag

SEQ ID NO: 320679 - DNA, 381 bp, Artificial Sequence
  derived and/or modified sequence
atgactgaggaggcctgcaggactcgctcacagaaacgcgcgcttgagcgtgatccaacggaggatgacgttgaatccaaaaagattaaaatggagaggggtctgcttgcttctgacttaaacacagatggtgacatgagagtgacacccgaacccggcgcaggtccaacgcaaggcctgttgcgggccacagaagcgaccgctatggccatgggaaggggagagggcctggtgggcgacgggcccgttgatatgagaacttcacacagcgacatgaagagcgaacggcgcccacctagtccagatgtgatagttctgagtgacaacgaacagccttccagtcccagggtgaatgggctgaccacagtggcattgaagtag

SEQ ID NO: 320680 - DNA, 1311 bp, Artificial Sequence
  derived and/or modified sequence
atgattaaacaacttaaggaagagcttcgattagaagaggcaaagctggtactgctcaagaaactgagacagtcacagatccagaaagaggccaccgcgcagaaaacatcgtccgcccgcatgcccggaagcgtcataccaccacccctggtgcgcggcggacaacaggcctcatcaaaattgggacctcaagcctctagccaggtggtcatgccccccctggtcagaggcgcccaacaaatccattccatacggcagcacagcagcacagggcctccccctctacttctcgcccctagagccagcgtcccatccgtgcaaattcaagggcagcgcattattcagcaggggctgatcagggtcgctaacgtgcctaatacatccctactcgtcaatataccccagcccacacccgcctctcttaagggaaccacagccacgtcagctcaggccaatagcacgccaaccagcgtggccagtgttgtcacgtctgcagaatcccctgcatcccgacaggccgcagccaaactcgctctgaggaagcagctggagaagacactcctagagatcccgccgccaaagccccccgctccagagatgaactttctgccctccgctgcaaataatgagtttatctacctcgtggggctagaagaagtggtccagaaccttctcgagacccaagctggccgtatgtccgctgccaccgtgctgtcaagagagccatacatgtgtgcacagtgtaagaccgattttacatgccggtggagagaggaaaagtccggcgcgataatgtgtgaaaattgtatgaccactaatcagaaaaaggctcttaaagtggagcacacaagtagacttaaggcagcctttgtgaaagccctccagcaggagcaggagattgaacagcggctgctccagcaggggactgccccagcccaagccaaggctgagcccaccgcagcccctcatcccgtgctcaagcaggcatcatcccagctcagtcggggttctgcaactactcccaggggggtgctccatacattctcgcccagccccaagttacagaattccgcctctgccacggcattggtatcgagaacaggcaggcactcagagaggacagtttccgctggcaaaggctccgccacctctaactggaagaaaacccccctaagcaccggaggaacattggcattcgtcagcccatcccttgcggtccataagtcctcatctgccgtggatcgccagcgagagtacttgttggacatgatacctccccggagtattccacagagcgctacatggaaatag

SEQ ID NO: 320681 - DNA, 420 bp, Artificial Sequence
  derived and/or modified sequence
atgactgaagaggcatgtcggactagaagtcaaaagcgcgctcttgagagggaccccacggaggacgacgtggagtccaagaagatcaaaatggagaggggtcttcttgcaagcgatctgaataccgatggagacatgcgggtaaccccggaaccaggtgcaggtcccacacaaggcctgctacgggccacagaggctacagcgatggccatgggacggggcgaaggattggtgggggacggcccggtcgacatgagaacaagccactccgacatgaagagcgagcgtcgaccgcctagcccggacgtcatagttctatctgacaacgagcagccttcaagcccgcgtgtgaatgggctcacaactgtggcattgaaggagacctcaaccgaggccctcatgaagtcttccccagaatag

SEQ ID NO: 320682 - DNA, 282 bp, Artificial Sequence
  derived and/or modified sequence
atgactgaggaggcttgcagaaccagatcccagaagcgcgcactagagcgcgatccaaccgaagacgatgtggagtccaagaagatcaagatggagagaggccttctcgcgtctgatctgaatacagatggggacatgcgggtcactcccgagccaggagccgggcccacgcagggtctactgagggccactgaagccaccgcaatggccatgggtagaggagagggtctggtgggcgatggccccgttgacatgagaacaagccacagtgacatgaagtag

SEQ ID NO: 320683 - DNA, 507 bp, Artificial Sequence
  derived and/or modified sequence
atgaccgaagaggcctgccgcacccgatctcagaaaagagcccttgaaagagatcccactgaagacgatgtggaaagcaaaaagataaaaatggaaaggggactcctcgcttcagacttgaatactgacggtgatatgagggtaactccggagccaggcgcaggacctacccaggggctgctaagggctacggaagctactgctatggcgatggggcgcggagaaggactggttggggatggacctgtggatatgcgtacaagccatagcgatatgaaaagtgagagacggcccccatccccagatgtgatagtcttgagcgataatgagcagccctcctctccgcgggtaaacggactgacgaccgtcgccttgaaagaaacgagcaccgaggctcttatgaaaagcagtcctgaagagcgggagcgcatgatcaaacagctgaaggaggaattgcgtttggaagaggccaaactggtcctgttaaaaaaattgcgccagtcatag

SEQ ID NO: 320684 - DNA, 1827 bp, Artificial Sequence
  derived and/or modified sequence
atgacagaggaggcctgcaggaccaggagccagaagagggccctggagcgggaccccacagaagatgatgtggagagcaagaagatcaagatggagcggggcctgctggccagtgacctgaacacagatggagacatgagggtgaccccagagcccggggccggccccacccagggcctgctgcgggccacagaggccacagccatggccatgggccgcggggagggcctggtgggagatggccctgtggacatgaggaccagccacagcgacatgaagtctgagcggcggccccccagcccagatgtgattgtgctgagtgacaatgagcagcccagcagcccccgggtgaatggcctgaccaccgtggccctgaaggagaccagcacagaggccctgatgaagagcagccctgaggagcgggagaggatgatcaagcagctgaaggaggagctgcggctggaggaggccaagctggtgctgctgaagaagctgcggcagagccagatccagaaggaggccacagcccagaagcccaccggctctgtgggcagcacagtgaccaccccaccacccctggtgcggggcacccagaacatcccagctgggaagcccagcctgcagaccagcagcgccaggatgcctggcagcgtcatccccccacccctggtgcggggcggccagcaggccagcagcaagctgggcccccaggccagcagccaggtggtgatgccacccctggtgcggggggcccagcagatccacagcatccggcagcacagcagcactggacctccacccctgctgctggccccccgggcctctgtgcccagcgtgcagatccagggccagaggatcatccagcagggcctcatccgggtggccaacgtgcccaacaccagcctgctggtgaacatcccccagcccaccccagccagcctgaagggcaccacagccaccagcgcccaggccaacagcacccccacctctgtggcctctgtggtgaccagcgctgagagccctgccagccggcaggccgccgccaagctggccctgaggaagcagctggagaagaccctgctggagatccccccacccaagcccccagcccctgagatgaacttcctgcccagcgctgccaacaatgagttcatctacctggtgggcctggaggaggtggtgcagaacctgctggagacccagggccgcatgtctgctgccaccgtgctgagccgggagccctacatgtgtgcccagtgcaagacagacttcacctgccgctggagggaggagaagagcggggccatcatgtgtgagaactgcatgaccaccaaccagaagaaggccctgaaggtggagcacaccagccggctgaaggccgcctttgtgaaggccctgcagcaggagcaggagattgagcagaggctgctgcagcagggcacagccccagcccaggccaaggccgagcccacagctgccccccaccctgtgctgaagcaggccagcagccagctgagccggggcagcgccaccaccccccggggcgtgctgcacaccttcagccccagccccaagctgcagaacagcgccagcgccacagccctggtgtccaggacaggccgccacagcgagaggacagtgtctgctggaaaaggaagtgccaccagcaactggaagaagacccccctgagcactggaggcaccctggcctttgtgagccccagcctggccgtgcacaagagcagcagcgctgtggaccggcagcgggagtacctgctggacatgatccccccaagaagcatcccccagagcgccacctggaagtag

SEQ ID NO: 320685 - DNA, 534 bp, Artificial Sequence
  derived and/or modified sequence
atgacagaggaggcctgcaggaccaggagccagaagagggccctggagcgggaccccacagaagatgatgtggagagcaagaagatcaagatggagcggggcctgctggccagtgacctgaacacagatggagacatgagggtgaccccagagcccggggccggccccacccagggcctgctgcgggccacagaggccacagccatggccatgggccgcggggagggcctggtgggagatggccctgtggacatgaggaccagccacagcgacatgaagtctgagcggcggccccccagcccagatgtgattgtgctgagtgacaatgagcagcccagcagcccccgggtgaatggcctgaccaccgtggccctgaaggagaccagcacagaggccctgatgaagagcagccctgaggagcgggagaggatgatcaagcagctgaaggaggagctgcggctggaggaggccaagctggtgctgctgaagaagctgcggcagagccagatccagaaggaggccacagcccagtag

SEQ ID NO: 320686 - DNA, 381 bp, Artificial Sequence
  derived and/or modified sequence
atgacagaggaggcctgcaggaccaggagccagaagagggccctggagcgggaccccacagaagatgatgtggagagcaagaagatcaagatggagcggggcctgctggccagtgacctgaacacagatggagacatgagggtgaccccagagcccggggccggccccacccagggcctgctgcgggccacagaggccacagccatggccatgggccgcggggagggcctggtgggagatggccctgtggacatgaggaccagccacagcgacatgaagtctgagcggcggccccccagcccagatgtgattgtgctgagtgacaatgagcagcccagcagcccccgggtgaatggcctgaccaccgtggccctgaagtag

SEQ ID NO: 320687 - DNA, 1311 bp, Artificial Sequence
  derived and/or modified sequence
atgatcaagcagctgaaggaggagctgcggctggaggaggccaagctggtgctgctgaagaagctgcggcagagccagatccagaaggaggccacagcccagaagaccagcagcgccaggatgcctggcagcgtcatccccccacccctggtgcggggcggccagcaggccagcagcaagctgggcccccaggccagcagccaggtggtgatgccacccctggtgcggggggcccagcagatccacagcatccggcagcacagcagcacaggccccccacccctgctgctggccccccgggcctctgtgcccagcgtgcagatccagggccagaggatcatccagcagggcctcatccgggtggccaacgtgcccaacaccagcctgctggtgaacatcccccagcccaccccagccagcctgaagggcaccacagccaccagcgcccaggccaacagcacccccacctctgtggcctctgtggtgaccagcgctgagagccctgccagccggcaggccgccgccaagctggccctgaggaagcagctggagaagaccctgctggagatccccccacccaagcccccagcccctgagatgaacttcctgcccagcgctgccaacaatgagttcatctacctggtgggcctggaggaggtggtgcagaacctgctggagacccaggccggccgcatgtctgctgccaccgtgctgagccgggagccctacatgtgtgcccagtgcaagacagacttcacctgccgctggagggaggagaagagcggggccatcatgtgtgagaactgcatgaccaccaaccagaagaaggccctgaaggtggagcacaccagccggctgaaggccgcctttgtgaaggccctgcagcaggagcaggagattgagcagaggctgctgcagcagggcacagccccagcccaggccaaggccgagcccacagctgccccccaccctgtgctgaagcaggccagcagccagctgagccggggcagcgccaccaccccccggggcgtgctgcacaccttcagccccagccccaagctgcagaacagcgccagcgccacagccctggtgtccaggacaggccgccacagcgagaggacagtgtctgctggaaaaggaagtgccaccagcaactggaagaagacccccctgagcactggaggcaccctggcctttgtgagccccagcctggccgtgcacaagagcagcagcgctgtggaccggcagcgggagtacctgctggacatgatccccccaagaagcatcccccagagcgccacctggaagtag

SEQ ID NO: 320688 - DNA, 420 bp, Artificial Sequence
  derived and/or modified sequence
atgacagaggaggcctgcaggaccaggagccagaagagggccctggagcgggaccccacagaagatgatgtggagagcaagaagatcaagatggagcggggcctgctggccagtgacctgaacacagatggagacatgagggtgaccccagagcccggggccggccccacccagggcctgctgcgggccacagaggccacagccatggccatgggccgcggggagggcctggtgggagatggccctgtggacatgaggaccagccacagcgacatgaagtctgagcggcggccccccagcccagatgtgattgtgctgagtgacaatgagcagcccagcagcccccgggtgaatggcctgaccaccgtggccctgaaggagaccagcacagaggccctgatgaagagcagccctgagtag

SEQ ID NO: 320689 - DNA, 282 bp, Artificial Sequence
  derived and/or modified sequence
atgacagaggaggcctgcaggaccaggagccagaagagggccctggagcgggaccccacagaagatgatgtggagagcaagaagatcaagatggagcggggcctgctggccagtgacctgaacacagatggagacatgagggtgaccccagagcccggggccggccccacccagggcctgctgcgggccacagaggccacagccatggccatgggccgcggggagggcctggtgggagatggccctgtggacatgaggaccagccacagcgacatgaagtag

SEQ ID NO: 320690 - DNA, 507 bp, Artificial Sequence
  derived and/or modified sequence
atgacagaggaggcctgcaggaccaggagccagaagagggccctggagcgggaccccacagaagatgatgtggagagcaagaagatcaagatggagcggggcctgctggccagtgacctgaacacagatggagacatgagggtgaccccagagcccggggccggccccacccagggcctgctgcgggccacagaggccacagccatggccatgggccgcggggagggcctggtgggagatggccctgtggacatgaggaccagccacagcgacatgaagtctgagcggcggccccccagcccagatgtgattgtgctgagtgacaatgagcagcccagcagcccccgggtgaatggcctgaccaccgtggccctgaaggagaccagcacagaggccctgatgaagagcagccctgaggagcgggagaggatgatcaagcagctgaaggaggagctgcggctggaggaggccaagctggtgctgctgaagaagctgcggcagagctag

SEQ ID NO: 320691 - DNA, 1827 bp, Artificial Sequence
  derived and/or modified sequence
atgaccgaggaggcctgccggacccggagccagaagcgggccctggagcgagaccccaccgaggatgatgtggagtctaaaaagataaagatggaaagagggctgttagcttcagacttgaacactgacggcgatatgcgagtcacaccagaaccaggcgccgggccaacccaaggcttgctgcgggccacagaggccaccgctatggccatgggtcgtggcgaaggcctggtgggagatggccctgtggacatgcgtacctcccactctgacatgaagtcagaacgccggcctccctcacctgacgtgatagttctgtctgacaatgagcagccctcctcaccaagggtcaacggactcacaacggtcgccctgaaagagacctccaccgaagcattgatgaagagctccccggaggagagagagcgcatgatcaagcagctcaaggaagaactgagactggaggaagcaaagctggtgcttctgaaaaaactgcggcagtctcagatacagaaggaggccaccgctcaaaaaccaaccggttccgtagggtcaactgtgaccacacctccgccactggtgcgcggaacacaaaatataccagccggcaaaccatccttgcagacatcttcagcaaggatgcccggctctgtgatacccccccctttggtgagagggggccaacaggcctcttcaaagctggggccccaagcctcgtcgcaagtcgtgatgcctcctttggttcgaggtgcgcagcagatccacagcattaggcaacatagcagtacgggccccccccctctgctcctcgccccccgagcctccgtgcctagtgtgcagatacaggggcagagaattatccagcagggcctgatccgagtggcaaacgtgcccaacacatctctcctcgtgaacattccacagcccacccccgccagcttgaaagggactaccgctaccagcgctcaggctaactcaactcctacctccgtggcgtccgttgtcaccagtgccgaatctccggcaagtcgacaggccgccgctaagttagctttgcgcaaacagctggagaaaacattgctcgagatacctccaccaaaacctccagcacctgaaatgaactttctgcctagtgccgccaataacgaatttatttatttggttggcttggaggaagtggtacaaaacctgctcgaaacacaaggccggatgtctgcagccactgttctgtctagggagccatacatgtgcgctcagtgtaaaaccgactttacttgtcggtggcgggaagagaagagcggtgctataatgtgcgagaactgcatgactacaaaccagaagaaagctctcaaggtggagcacacatcgcgtctgaaagcggcattcgttaaagcgttgcaacaggaacaggaaatcgagcagaggctcctgcagcaaggcacagcgccagcacaggctaaggccgagccgaccgccgctccccaccccgttctcaaacaagcatcatctcagctgagtcgtggatcagctactacacccaggggggtcttgcacacattctctcccagtcccaagctgcaaaactccgcctctgccacagccctagtctcccgaactggtaggcacagtgagcggaccgtgagcgcaggtaaaggtagcgcaaccagtaactggaaaaagactccgcttagtacaggaggcactctggctttcgtgtccccctccctggcagtccataaatcatcttccgcagtggatagacagagagagtacctcctagacatgatcccaccaagaagcattcctcaaagcgctacatggaaatag

SEQ ID NO: 320692 - DNA, 534 bp, Artificial Sequence
  derived and/or modified sequence
atgaccgaggaggcctgccggacccggagccagaagcgggccctggagcgggatccaacagaggacgacgtcgaatctaagaaaattaaaatggaacgcggactgttggctagtgacttaaataccgacggcgatatgcgggtgacccctgagcccggagccggacctacccaaggcttattgagagccactgaggcgactgcaatggcaatgggtcgcggggagggtttggttggggacggccccgttgatatgcggacttcccattcggatatgaagagcgaaagacgaccgcctagccctgatgtgattgtgcttagtgacaatgagcaacctagttccccccgagttaacgggctcacaacagtcgctctgaaagaaaccagtacagaggctttgatgaagtcatcccctgaagagcgggaacggatgatcaaacaactgaaggaggagttacggttggaggaagcaaagctggtgcttctgaaaaagcttcggcagtcccagatccagaaggaggcaactgcacagtag

SEQ ID NO: 320693 - DNA, 381 bp, Artificial Sequence
  derived and/or modified sequence
atgaccgaggaggcctgccggacccggagccagaagcgggccctggaacgagatcccactgaagacgacgttgagtcaaagaaaataaagatggagagaggcctgttagcctccgatctgaacacagacggcgatatgagagttaccccagaaccaggcgccggaccgactcagggactcctgagagccacagaggccactgctatggccatggggcgaggtgagggtctggtgggtgacggccccgtggacatgcgtactagtcattcagacatgaaatcggagagacggccaccttccccggacgtgattgtgctgtctgacaatgagcagccttctagcccacgggtcaatggcctcaccaccgtggctctgaagtag

SEQ ID NO: 320694 - DNA, 1311 bp, Artificial Sequence
  derived and/or modified sequence
atgatcaagcagctgaaggaggagctgcggctggaggaggccaagctggtcctgctcaaaaagcttcgtcagagccagattcagaaagaagcgacagctcagaaaacttcgagtgcacggatgcctgggagcgtgatcccgccgccactggttcggggtggacaacaagcctcctccaagctcggcccccaggcaagctctcaggtcgtcatgccccctttggtgagaggcgctcagcagatccactcgatacgccagcatagctcaacaggtccccccccacttcttctggcaccgagagcctccgtaccttccgtgcagatacagggacagcgaattattcaacagggcttgattcgggtggcgaatgtgcctaataccagtcttcttgttaatataccccaacctaccccagcctctctgaaaggaacaactgccacatccgcacaagccaattccacccccactagtgtggcaagtgttgttaccagtgctgagtccccagccagccggcaggcagccgcaaagctcgctttgcgcaagcagttagaaaaaacactgcttgagatacccccaccaaagccccccgcacccgagatgaattttttaccaagcgctgcgaacaatgagtttatttatctggtgggtttagaggaggtcgttcagaaccttcttgagacgcaagctggacgaatgagcgcagctacggtcctgtcccgtgaaccttacatgtgtgcacagtgtaaaaccgacttcacctgtagatggcgggaagagaagtctggcgctatcatgtgtgaaaattgcatgactaccaatcaaaaaaaagcattgaaggtcgaacacaccagccgcttgaaagctgcctttgttaaggcacttcagcaggagcaagagatcgaacagcggctgttgcagcagggcacagctccagcccaggccaaagccgagccaactgcagcacctcatccggtactaaaacaggcttcaagccagctgtcccggggctctgcaacaacacctcgcggggttctccacacttttagcccgtcccctaagctgcaaaattcggccagcgctaccgcactcgtctcccgaaccggcagacacagcgaacgtacagtttctgctggaaagggatccgctaccagcaattggaaaaagactccactgtctaccggcggaacattggccttcgtctctccctcactggcagtgcataagtcctcctctgctgttgaccgtcagagggaatatctgttggatatgatccccccccgctccataccacagtccgccacttggaaatag

SEQ ID NO: 320695 - DNA, 420 bp, Artificial Sequence
  derived and/or modified sequence
atgaccgaggaggcctgccggacccggagccagaagcgggccctggagcgagaccccaccgaagatgacgtggaaagtaaaaaaattaagatggagcgggggctccttgccagcgacctgaacacagatggtgacatgagagttaccccagaacctggcgccggacctacccagggcctgctgcgagcaaccgaagcaactgccatggcaatgggccgcggggagggcttagtgggcgatggtcccgtggatatgaggacaagtcattctgacatgaagagtgaacggcggccaccttctccagacgttatcgttctgagcgataacgagcaaccttcatcccctagggtgaatggactgactaccgttgcccttaaggaaacctctaccgaggctctcatgaaatccagccccgagtag

SEQ ID NO: 320696 - DNA, 282 bp, Artificial Sequence
  derived and/or modified sequence
atgaccgaggaggcctgccggacccggagccagaagcgggccctggagcgcgacccaaccgaagatgatgtcgaatctaaaaaaatcaagatggaaagggggctgcttgctagcgatctcaacaccgatggcgacatgcgggtcacccctgagcccggcgctggccctacccaaggtctacttagagcgactgaagcaactgcgatggccatgggacgaggggagggtctggtgggggacggcccggtcgacatgcgcaccagtcattctgacatgaagtag

SEQ ID NO: 320697 - DNA, 507 bp, Artificial Sequence
  derived and/or modified sequence
atgaccgaggaggcctgccggacccggagccagaagcgggccctggaacgcgatccaaccgaagacgacgtggagtctaaaaaaatcaagatggaacgcggcctgttggcatcagacctgaataccgatggcgatatgagagtcacacccgaacccggcgccggtcccacccaggggcttctgcgggccacagaggccacagccatggcaatgggacggggagaaggacttgttggggacgggccggtagacatgagaaccagccatagcgacatgaaatcagaaagacgtccgcccagccctgacgtcattgtgttgtcggataacgagcaaccgtctagccctcgggttaatgggctcaccactgtggcattgaaagaaacatcaacagaggcacttatgaaaagtagccccgaggagagggaaagaatgatcaagcagttaaaggaggagctgcgacttgaggaggccaaactggtgctgctgaagaagttgcgccaatcatag

SEQ ID NO: 320698 - DNA, 1827 bp, Artificial Sequence
  derived and/or modified sequence
atgacggaggaggcctgccgcacgcgatcacaaaaaagagctctggagcgggacccaaccgaggacgatgtcgagtctaagaaaatcaaaatggagcgcggacttttggctagcgatttgaataccgacggggatatgagggtcaccccagagcctggtgctggccctacacaggggcttttacgagccactgaagctaccgcgatggccatgggtaggggcgaagggctggttggtgacggaccagttgacatgcggacctcccattccgatatgaaaagtgaaaggcggcctccaagtcccgacgtgattgtattgtctgataacgaacagccaagctccccccgtgtgaatggcctgaccacggtagcccttaaagagacatccaccgaggccctgatgaaaagctctccagaagaaagagagagaatgattaaacaactaaaggaggagctgcgcctggaagaggccaaactcgtcttgctgaaaaaactgagacagagtcagattcagaaagaagccactgcccaaaaaccaactggaagtgtaggttccactgtgactaccccacccccattggtccggggaacacagaacataccagctggtaaaccttctctgcagacaagttctgccagaatgccgggaagcgtgatcccaccaccccttgttcgcggtggccaacaagccagcagcaaactgggtcctcaggcttcaagccaggtagtgatgccgcctctggtgagaggcgcacagcaaatccattctatccggcagcacagtagcaccggaccaccccctctgttactcgctcctcgagcttcagtccccagtgtacaaattcagggccagcggatcatccagcaggggttaattagggtggccaacgtccccaatacgagcctcttagtcaacatccctcagcccacaccagcctcattgaagggcactacggccacttcagcccaagctaactcgacccccacatcagtggcatcagtcgtgaccagcgccgaatcgcctgcatcacgccaagcagcagcgaagctggctcttcggaaacagcttgaaaagaccctgctggaaatccccccaccaaagcctccagctcccgaaatgaactttctaccttccgctgccaacaacgagtttatttacttggtgggcttggaagaagtggtccagaatctgctcgagacacagggcagaatgtccgctgctactgtgctgtcccgagagccttacatgtgcgcccagtgtaaaacggacttcacatgtaggtggcgggaggaaaagtcaggggctataatgtgcgaaaattgtatgaccacaaatcagaagaaagctctcaaagtggaacacacttcgaggttgaaagccgctttcgtgaaagccctccaacaagagcaggaaatcgaacagcgcctgctccagcaaggaacagccccagcccaggcaaaggccgagcctacagccgctcctcaccctgttctgaagcaggcaagcagccagctgagtagagggtcagccactactcctcgtggggtgttgcacacatttagcccctctcctaaactgcagaacagtgcctccgccactgcccttgttagtcggactggccgacattccgaacggacggtatctgctggaaaagggagcgccacctctaattggaagaaaactccattgagcacgggaggtacccttgcattcgtctccccatctctggcggtccataaaagctcctcggccgtggatagacagagagagtacctactcgacatgatccccccacgctctattcctcagtctgctacctggaagtag

SEQ ID NO: 320699 - DNA, 534 bp, Artificial Sequence
  derived and/or modified sequence
atgacagaggaagcatgccgcactcgatcccagaaacgcgctctggagcgtgaccccacggaggatgacgtagagtctaaaaaaattaagatggaaaggggcctgctcgctagtgatctgaacaccgacggagacatgcgggtgactccggagcctggcgctgggcctactcagggactgctgagagcaaccgaagccaccgccatggctatgggccgaggcgaggggctggtgggcgatggaccggtggatatgcggacatcccacagtgacatgaagtccgaacgccgacccccttctcctgatgtgatagtcctcagtgataatgaacaaccttcgtcaccaagggtgaatggactgaccacagtggcactcaaggagacctcaacagaggccctgatgaaaagctcccccgaagaacgggaaaggatgatcaagcagcttaaagaagagcttcggctagaggaggctaagcttgttctgctgaaaaaactacgccagtcacagatccagaaggaagcgaccgctcagtag

SEQ ID NO: 320700 - DNA, 381 bp, Artificial Sequence
  derived and/or modified sequence
atgacagaggaggcctgtagaactcgcagccagaaaagggccctcgagagggatcccactgaagacgacgtggagtcaaaaaagatcaagatggaaagagggctccttgccagcgatctgaatactgacggcgacatgagagttacccccgaacctggagccggaccaacgcagggcctgctgcgcgcaaccgaagcgacggcaatggcaatgggacgaggtgagggtttggtgggcgacggccctgtcgacatgcgcacaagtcattctgacatgaagtctgagcgcaggcccccttccccagatgtgattgtgctctctgacaatgagcagccaagttctccacgggtgaacggtctaaccacagtagccctgaaatag

SEQ ID NO: 320701 - DNA, 1311 bp, Artificial Sequence
  derived and/or modified sequence
atgatcaagcagctgaaagaagagttgaggctcgaggaggccaaactcgtattgttgaagaagttgaggcagagccagattcaaaaggaagccaccgctcagaaaacgagttcagcccgaatgccaggtagcgtgattcccccaccactagtccggggaggacagcaggccagttccaaactgggtccccaggcttcttctcaagtggttatgccacctttggtgcggggagcgcagcagattcattcgatccgacagcacagtagcaccggtccccctcctttgcttctggcacctagagccagtgtacctagcgtgcagatccaggggcagcgtattattcagcaggggttgatacgggtggccaacgtgcctaataccagcctgctggtgaacatcccccagccaacccctgcatccctgaaggggaccacagcaacttcggcacaagcaaatagtactccgacctccgttgccagcgttgtcacaagcgcagaaagtcccgcatcccgacaggcagcagccaaactggccctcagaaagcagcttgagaagactctgctggaaattcccccaccgaagcctcctgcccctgagatgaacttcctcccttcagccgctaacaacgagttcatttacctcgtcggcttagaagaggtcgtccagaatttgctggagacgcaggcaggcagaatgtccgccgctacagtgctgtcccgggagccctatatgtgcgcacaatgtaagacagactttacctgcagatggcgggaagaaaaaagcggagctattatgtgcgaaaattgcatgacgaccaaccaaaagaaggcattgaaagtcgaacacaccagtcgcctcaaagctgctttcgtcaaggccctgcagcaggaacaagaaatcgagcagaggctgttgcaacaaggaactgcacccgctcaagccaaggccgagccgaccgccgctcctcaccctgtccttaaacaggcatcatcacaactcagccgaggctcagccacaacacctaggggggtgctgcacaccttttccccttccccgaaactgcagaacagcgcttctgctactgccctggtgtcacggacgggaaggcacagcgagcggaccgtgtccgctggaaaaggctcagcaactagcaattggaaaaagaccccccttagtacgggtgggacgctggctttcgtcagtccctccctcgctgtacacaaaagttcgtccgccgttgacaggcagcgcgaatatctgttggacatgatcccaccgaggtccattccccagagtgccacgtggaagtag

SEQ ID NO: 320702 - DNA, 420 bp, Artificial Sequence
  derived and/or modified sequence
atgacggaggaagcttgcaggacgaggtcccagaagagggctctggagcgagacccaaccgaggacgatgtggagtcaaagaaaatcaaaatggagcggggattgctcgctagcgacctgaatacagatggcgacatgcgcgtcacgcccgaaccgggagctggacctacccagggcctgctgagggctacagaggcaactgcgatggctatggggagaggcgagggactagtgggggacgggcctgtagatatgagaactagccacagcgacatgaagtccgaacgacggcctccatcaccggatgttatcgtcctaagcgataacgaacagcccagctcaccgagagtcaatgggctgaccacggtcgccctaaaagagacaagcactgaggccttaatgaagagctcccctgaatag

SEQ ID NO: 320703 - DNA, 282 bp, Artificial Sequence
  derived and/or modified sequence
atgacggaagaggcctgtaggacacgcagtcagaaacgtgcattggagcgagatcccacggaggatgacgtcgaaagcaagaaaatcaaaatggaaagaggactcctcgcttccgatctcaacaccgatggagatatgcgggtgacgccagaacccggagccggaccgactcagggactcttgcgcgcaacggaagccaccgctatggctatgggtaggggggagggattggtgggagacgggcctgtggacatgcgcaccagtcattcagacatgaaatag

SEQ ID NO: 320704 - DNA, 507 bp, Artificial Sequence
  derived and/or modified sequence
atgaccgaggaagcatgcaggacacggagccaaaagagggctttagaacgggacccaacagaggatgatgtggaaagcaagaagattaagatggagcgcggattactggcgtcggatctgaataccgacggcgatatgagagttacccccgagccaggcgctgggccaacacagggcctgctcagagcgaccgaggccacagctatggccatgggcagaggcgagggactggtgggcgatggccctgtcgacatgaggacaagccattccgacatgaagagtgagaggaggccgcctagccccgatgtaattgtgctgtccgataacgagcaaccttcaagtccaagggtcaatggtttgactacagtggccctgaaagaaacatctacagaagccctcatgaaatcctctcccgaagaacgggagaggatgatcaagcagttgaaggaagagctaagactcgaggaggctaagctggtgctgctcaagaaactgagacagtcctag

SEQ ID NO: 320705 - DNA, 5596 bp, Artificial Sequence
  derived and/or modified sequence
gggcaatttcagtgtgagactgagccgcgagactgagctgcggctccgagcgctgcgcggcggctcctcccgcccagggtcagcgccccggcgcgcgcacgcgcacccccgccgcccgagcgcgccccgcgccgcccgcgcagtcggtcggtcggtcgtctgtcctgtcgccgctgccgccgccgccacagcggccgccgcgggcgccacctgagggagtcgcctccgcgggacgccacaagacctgaccggactgcgccgcccgaggccgtcggccgccgtcagcgagggcgccgagcaacttcgttcagaatgaccgaagaagcatgccgaacacggagtcagaaacgagcgcttgaacgggacccaacagaggacgatgtggagagcaagaaaataaaaatggagagaggattgttggcttcagatttaaacactgacggagacatgagggtgacacctgagccgggagcaggtccaacccaaggattgctgagggcaacagaggccacggccatggccatgggcagaggcgaagggctggtgggcgatgggcccgtggacatgcgcacctcacacagtgacatgaagtccgagaggagacccccctcacctgacgtgattgtgctctccgacaacgagcagccctcgagcccgagagtgaatgggctgaccacggtggccttgaaggagactagcaccgaggccctcatgaaaagcagtcctgaagaacgagaaaggatgatcaagcagctgaaggaagaattgaggttagaagaagcaaaactcgtgttgttgaaaaagttgcggcagagtcaaatacaaaaggaagccaccgcccagaagcccacaggttctgttgggagcaccgtgaccacccctcccccgcttgttcggggcactcagaacattcctgctggcaagccatcactccagacctcttcagctcggatgcccggcagtgtcatacccccgcccctggtccgaggtgggcagcaggcgtcctcgaagctggggccacaggcgagctcacaggtcgtcatgcccccactcgtcaggggggctcagcaaatccacagcattaggcaacattccagcacagggccaccgcccctcctcctggccccccgggcgtcggtgcccagtgtgcagattcagggacagaggatcatccagcagggcctcatccgcgtcgccaatgttcccaacaccagcctgctcgtcaacatcccacagcccaccccagcatcactgaaggggacaacagccacctccgctcaggccaactccacccccactagtgtggcctctgtggtcacctctgccgagtctccagcaagccgacaggcggccgccaagctggcgctgcgcaaacagctggagaagacgctactcgagatccccccacccaagcccccagccccagagatgaacttcctgcccagcgccgccaacaacgagttcatctacctggtcggcctggaggaggtggtgcagaacctactggagacacaaggcaggatgtcggccgccactgtgctgtcccgggagccctacatgtgtgcacagtgcaagacggacttcacgtgccgctggcgggaggagaagagcggcgccatcatgtgtgagaactgcatgacaaccaaccagaagaaggcgctcaaggtggagcacaccagccggctgaaggccgcctttgtgaaggcgctgcagcaggaacaggagattgagcagcggctcctgcagcagggcacggcccctgcacaggccaaggccgagcccaccgctgccccacaccccgtgctgaagcaggcctccagccagctgtcccggggttcggccacgacgccccgaggtgtcctgcacacgttcagtccgtcacccaaactgcagaactcagcctcggccacagccctggtcagcaggaccggcagacattctgagagaaccgtgagcgccggcaagggcagcgccacctccaactggaagaagacgcccctcagcacaggcgggacccttgcgtttgtcagcccaagcctggcggtgcacaagagctcctcggccgtggaccgccagcgagagtacctcctggacatgatcccaccccgctccatcccccagtcagccacgtggaaatagtgcgagccaggccccgtggaagacgggctccctcctcccccacctggcccctggtctagaaggacccactgcaccaccctccgctggctcgggaagacaccgtgcccgccccaagagcaagcaccggccatgctgcagaggcaagacctcaattcttggctgcaaagtttcatcagggctagggggctggtgccgcctcataggcagacgaggatcatcgctgggggacctttcccgtgggctttcttcctttctctctttgcctttagtttgcccgacaccagcagaaaagtggaccttgggggctggttctgctcctggcccccttgttcagcccctgccggcacacgggcggctcaccctggacactgtgatgcgcatgggcaaggccagcgcccggggcttctgaaccgagcggggtgtttcatttttttgcttttccctgtcttaggctcccagtctttgactgccttcccatggcgatctataagttgaaagattttttttttttttaatcacctcatgatgatggagttaaaagtaaaccgtgcagaccctggggtccctgttgtacgctgcatcatcccgctggccctgtgccctggagggtgggcggctcatggtgccacagcccctggcagggacggccggcccgcccccgtgactgactgacagatgcagggatggccgaggcagccctcgctccagctgaacgcctccattgctgcttgttctggagacccccgcccccgcaccttccagacttagcagaagaacaaactgaagaacagacccagccagagaagcagggattccagaagctgcccattaagggagaaggagaggatccggtcggcagcagccctgagcagaaagctggaggggggactgtcgcggggtttttctgttgtggtttattttattaaattttttccttttttctattcatttcgatggacgcaatcttaagccaccctggccttgctcctgggaggtgagcgtgcacaggtgtgtgcaggtcaggaggtgccgtccaggtgtgcggcgagccgctgcgcacagatgtcaggatttccgtttgggtctagtttagaacctgtccttaaacctaggggttgctgtcaggatttgctttcagactttttttttttttgtaattccctttagagtctacaaaaatgtttttaaaaggatcaggtctgcttttagtttcatttttgtttctttcccgtcccactctttaaaaactggttccgtgaggaaaggcagaagccgttccgtgtctcttgcaggctgggccggcttcatgccagtgcgagggcgtcccgtgcccacgtacatacgtatgtctccatgagttctgggctccactggttccaattgagctccagccctggttttcctacccatgcagttagggactttaatttaattttttttttgtagggccaccgccttcaaacacaactgctacaacattctaataaaggctcatttaacccccaggctcctgtcgtgtgaatatcctcagtctgtaggaaactttttttgacacagcatagaagacctagttttggaaaacattatctaattttttgttgtgcaaatccccaaatttctcactaatttttgtttttttgtgcataacttggatgggctgaaggaggtgaggacagattggggaagggtggctttcattccaagatccagggatttggggaaaaggaaggaatttgatgttttttggggtgggaggggagggtgtgttttttacaccaaaaaaaaaaaaaaaaatcaagagtatgcaagcatttctattcctcgcatttttctgtgtgcctggcaaataaatacctgtctcctacgaccctgagctgttagccctctctgttccatgacaggggccagatcttccagctcctcccagaaggagcacccaggctggcttcttcccactgaaagccctccccagcgaaccaacctcagttctatgcagtggctggggatcaggcatccagaccgaagtcacctctgcctgctccagcttgggtcagctgggtctgaccagggggccagatccgagccgcacctgccggcccccagccccagctccagctcctgacctctcccagcctggcctggctgttcctccagggctgatggctgtcaacccatccttgtgagttcatatggactgctgcccctcgaaagggagagggtcggccccatgtccccagggagcattccatcagggacaacgtacatactgtgatgtaaactttttttttttccccccagggggcaaaagtgtgagatgccttaatctttccttcatttctgctgtctcgaacactctagcccattatttcctttcagttccttgcagcataacctctacgataagccccaagcgggttgttgtattatgacgtttatgatgttccaggtgaaggcattattaagtacctctctgggtgtggggtttggacgcaccaggatagctattgattaatgttaagggtgttctacccacagcaaagcacaccctcttaaaccaggcactgcctgggtcctggtcccgagagccctaccaggatcaggttcctgcaagccgtcagaatgtgggagcccccagcccaactgattgtaactgtcccctgttacctgtgacatgaacctccaacagcacctggaaacggttccctctgtcagctgctctgtagacagggctggggagatctcagagttcacacctcgcctgttgtaggggaggttgggggtagggtttggaatggccaagtgcccttggaacctcccacagctatggccgtcctgacctcatcccaggaactctacggtgaccaggaaccacccctctgacgaggtctgtagcggcccttctcagagtggaacagcccacagtgctagttgtgcctggtcttacctgtactccacggacctcggtgaagcaaaagcttcagggcagagggaatgaggcaacccagtggcagccccgctgggccccgtggctcctgctctcctattggacgtagaggcaggggagagacttctctatacaaatattctcatcacagaagggatgatccttgctgctctgccgtagggtttttgatgctgagctatgctgcacatgacgttaacctaaagaacttggactgagcttttaaaaaaggacagcaaacaattttataatccttaaagtgtaatagacggttacactagtgcagggtattggggaggctctttgggtgtggaggctgtcacttgtatttattgtgactctaaatctttgatagtaaaacaaatgtaaaaagaaatgtttgccaccagatgggaatagaagttccaataagcaggctggaatgggtggctatacgttgtatcacgaggaagttttagactctgaaggataataaatggatgatgtgtcaactgg

SEQ ID NO: 320706 - DNA, 1762 bp, Artificial Sequence
  derived and/or modified sequence
atgagggtgacacctgagccgggagcaggtccaacccaaggattgctgagggcaacagaggccacggccatggccatgggcagaggcgaagggctggtgggcgatgggcccgtggacatgcgcacctcacacagaaaagcagtcctgaagaacgagaaaggatgatcaagcagctgaaggaagaattgaggttagaagaagcaaaactcgtgttgttgaaaaagttgcggcagagtcaaatacaaaaggaagccaccgcccagaagacctcttcagctcggatgcccggcagtgtcatacccccgcccctggtccgaggtgggcagcaggcgtcctcgaagctggggccacaggcgagctcacaggtcgtcatgcccccactcgtcaggggggctcagcaaatccacagcattaggcaacattccagcacagggccaccgcccctcctcctggccccccgggcgtcggtgcccagtgtgcagattcagggacagaggatcatccagcagggcctcatccgcgtcgccaatgttcccaacaccagcctgctcgtcaacatcccacagcccaccccagcatcactgaaggggacaacagccacctccgctcaggccaactccacccccactagtgtggcctctgtggtcacctctgccgagtctccagcaagccgacaggcggccgccaagctggcgctgcgcaaacagctggagaagacgctactcgagatccccccacccaagcccccagccccagagatgaacttcctgcccagcgccgccaacaacgagttcatctacctggtcggcctggaggaggtggtgcagaacctactggagacacaagcaggcaggatgtcggccgccactgtgctgtcccgggagccctacatgtgtgcacagtgcaagacggacttcacgtgccgctggcgggaggagaagagcggcgccatcatgtgtgagaactgcatgacaaccaaccagaagaaggcgctcaaggtggagcacaccagccggctgaaggccgcctttgtgaaggcgctgcagcaggaacaggagattgagcagcggctcctgcagcagggcacggcccctgcacaggccaaggccgagcccaccgctgccccacaccccgtgctgaagcaggcctccagccagctgtcccggggttcggccacgacgccccgaggtgtcctgcacacgttcagtccgtcacccaaactgcagaactcagcctcggccacagccctggtcagcaggaccggcagacattctgagagaaccgtgagcgccggcaagggcagcgccacctccaactggaagaagacgcccctcagcacaggcgggacccttgcgtttgtcagcccaagcctggcggtgcacaagagctcctcggccgtggaccgccagcgagagtacctcctggacatgatcccaccccgctccatcccccagtcagccacgtggaaatagtgcgagccaggccccgtggaagacgggctccctcctcccccacctggcccctggtctagaaggacccactgcaccaccctccgctggctcgggaagacaccgtgcccgccccaagagcaagcaccggccatgctgcagaggcaagacctcaattcttggctgcaaagtttcatcagggctagggggctggtgccgcctcataggcagacgaggatcatcgctgggggacctttcccgtgggctttcttcctttctctctttgcctttagtttgcccgacaccagcagaaa

SEQ ID NO: 320707 - DNA, 1827 bp, Artificial Sequence
  derived and/or modified sequence
atgaccgaggaggcctgcagaaccagaagccagaagagagccctggagagagaccccaccgaggacgacgtggagagcaagaagatcaagatggagagaggcctgctggccagcgacctgaacaccgacggcgacatgagagtgacccccgagcccggcgccggccccacccagggcctgctgagagccaccgaggccaccgccatggccatgggcagaggcgagggcctggtgggcgacggccccgtggacatgagaaccagccacagcgacatgaagagcgagagaagaccccccagccccgacgtgatcgtgctgagcgacaacgagcagcccagcagccccagagtgaacggcctgaccaccgtggccctgaaggagaccagcaccgaggccctgatgaagagcagccccgaggagagagagagaatgatcaagcagctgaaggaggagctgagactggaggaggccaagctggtgctgctgaagaagctgagacagagccagatccagaaggaggccaccgcccagaagcccaccggcagcgtgggcagcaccgtgaccacccccccccccctggtgagaggcacccagaacatccccgccggcaagcccagcctgcagaccagcagcgccagaatgcccggcagcgtgatccccccccccctggtgagaggcggccagcaggccagcagcaagctgggcccccaggccagcagccaggtggtgatgccccccctggtgagaggcgcccagcagatccacagcatcagacagcacagcagcaccggccccccccccctgctgctggcccccagagccagcgtgcccagcgtgcagatccagggccagagaatcatccagcagggcctgatcagagtggccaacgtgcccaacaccagcctgctggtgaacatcccccagcccacccccgccagcctgaagggcaccaccgccaccagcgcccaggccaacagcacccccaccagcgtggccagcgtggtgaccagcgccgagagccccgccagcagacaggccgccgccaagctggccctgagaaagcagctggagaagaccctgctggagatccccccccccaagccccccgcccccgagatgaacttcctgcccagcgccgccaacaacgagttcatctacctggtgggcctggaggaggtggtgcagaacctgctggagacccagggcagaatgagcgccgccaccgtgctgagcagagagccctacatgtgcgcccagtgcaagaccgacttcacctgcagatggagagaggagaagagcggcgccatcatgtgcgagaactgcatgaccaccaaccagaagaaggccctgaaggtggagcacaccagcagactgaaggccgccttcgtgaaggccctgcagcaggagcaggagatcgagcagagactgctgcagcagggcaccgcccccgcccaggccaaggccgagcccaccgccgccccccaccccgtgctgaagcaggccagcagccagctgagcagaggcagcgccaccacccccagaggcgtgctgcacaccttcagccccagccccaagctgcagaacagcgccagcgccaccgccctggtgagcagaaccggcagacacagcgagagaaccgtgagcgccggcaagggcagcgccaccagcaactggaagaagacccccctgagcaccggcggcaccctggccttcgtgagccccagcctggccgtgcacaagagcagcagcgccgtggacagacagagagagtacctgctggacatgatcccccccagaagcatcccccagagcgccacctggaagtag

SEQ ID NO: 320708 - DNA, 534 bp, Artificial Sequence
  derived and/or modified sequence
atgaccgaggaggcctgcagaaccagaagccagaagagagccctggagagagaccccaccgaggacgacgtggagagcaagaagatcaagatggagagaggcctgctggccagcgacctgaacaccgacggcgacatgagagtgacccccgagcccggcgccggccccacccagggcctgctgagagccaccgaggccaccgccatggccatgggcagaggcgagggcctggtgggcgacggccccgtggacatgagaaccagccacagcgacatgaagagcgagagaagaccccccagccccgacgtgatcgtgctgagcgacaacgagcagcccagcagccccagagtgaacggcctgaccaccgtggccctgaaggagaccagcaccgaggccctgatgaagagcagccccgaggagagagagagaatgatcaagcagctgaaggaggagctgagactggaggaggccaagctggtgctgctgaagaagctgagacagagccagatccagaaggaggccaccgcccagtag

SEQ ID NO: 320709 - DNA, 381 bp, Artificial Sequence
  derived and/or modified sequence
atgaccgaggaggcctgcagaaccagaagccagaagagagccctggagagagaccccaccgaggacgacgtggagagcaagaagatcaagatggagagaggcctgctggccagcgacctgaacaccgacggcgacatgagagtgacccccgagcccggcgccggccccacccagggcctgctgagagccaccgaggccaccgccatggccatgggcagaggcgagggcctggtgggcgacggccccgtggacatgagaaccagccacagcgacatgaagagcgagagaagaccccccagccccgacgtgatcgtgctgagcgacaacgagcagcccagcagccccagagtgaacggcctgaccaccgtggccctgaagtag

SEQ ID NO: 320710 - DNA, 1311 bp, Artificial Sequence
  derived and/or modified sequence
atgatcaagcagctgaaggaggagctgagactggaggaggccaagctggtgctgctgaagaagctgagacagagccagatccagaaggaggccaccgcccagaagaccagcagcgccagaatgcccggcagcgtgatccccccccccctggtgagaggcggccagcaggccagcagcaagctgggcccccaggccagcagccaggtggtgatgccccccctggtgagaggcgcccagcagatccacagcatcagacagcacagcagcaccggccccccccccctgctgctggcccccagagccagcgtgcccagcgtgcagatccagggccagagaatcatccagcagggcctgatcagagtggccaacgtgcccaacaccagcctgctggtgaacatcccccagcccacccccgccagcctgaagggcaccaccgccaccagcgcccaggccaacagcacccccaccagcgtggccagcgtggtgaccagcgccgagagccccgccagcagacaggccgccgccaagctggccctgagaaagcagctggagaagaccctgctggagatccccccccccaagccccccgcccccgagatgaacttcctgcccagcgccgccaacaacgagttcatctacctggtgggcctggaggaggtggtgcagaacctgctggagacccaggccggcagaatgagcgccgccaccgtgctgagcagagagccctacatgtgcgcccagtgcaagaccgacttcacctgcagatggagagaggagaagagcggcgccatcatgtgcgagaactgcatgaccaccaaccagaagaaggccctgaaggtggagcacaccagcagactgaaggccgccttcgtgaaggccctgcagcaggagcaggagatcgagcagagactgctgcagcagggcaccgcccccgcccaggccaaggccgagcccaccgccgccccccaccccgtgctgaagcaggccagcagccagctgagcagaggcagcgccaccacccccagaggcgtgctgcacaccttcagccccagccccaagctgcagaacagcgccagcgccaccgccctggtgagcagaaccggcagacacagcgagagaaccgtgagcgccggcaagggcagcgccaccagcaactggaagaagacccccctgagcaccggcggcaccctggccttcgtgagccccagcctggccgtgcacaagagcagcagcgccgtggacagacagagagagtacctgctggacatgatcccccccagaagcatcccccagagcgccacctggaagtag

SEQ ID NO: 320711 - DNA, 420 bp, Artificial Sequence
  derived and/or modified sequence
atgaccgaggaggcctgcagaaccagaagccagaagagagccctggagagagaccccaccgaggacgacgtggagagcaagaagatcaagatggagagaggcctgctggccagcgacctgaacaccgacggcgacatgagagtgacccccgagcccggcgccggccccacccagggcctgctgagagccaccgaggccaccgccatggccatgggcagaggcgagggcctggtgggcgacggccccgtggacatgagaaccagccacagcgacatgaagagcgagagaagaccccccagccccgacgtgatcgtgctgagcgacaacgagcagcccagcagccccagagtgaacggcctgaccaccgtggccctgaaggagaccagcaccgaggccctgatgaagagcagccccgagtag

SEQ ID NO: 320712 - DNA, 282 bp, Artificial Sequence
  derived and/or modified sequence
atgaccgaggaggcctgcagaaccagaagccagaagagagccctggagagagaccccaccgaggacgacgtggagagcaagaagatcaagatggagagaggcctgctggccagcgacctgaacaccgacggcgacatgagagtgacccccgagcccggcgccggccccacccagggcctgctgagagccaccgaggccaccgccatggccatgggcagaggcgagggcctggtgggcgacggccccgtggacatgagaaccagccacagcgacatgaagtag

SEQ ID NO: 320713 - DNA, 507 bp, Artificial Sequence
  derived and/or modified sequence
atgaccgaggaggcctgcagaaccagaagccagaagagagccctggagagagaccccaccgaggacgacgtggagagcaagaagatcaagatggagagaggcctgctggccagcgacctgaacaccgacggcgacatgagagtgacccccgagcccggcgccggccccacccagggcctgctgagagccaccgaggccaccgccatggccatgggcagaggcgagggcctggtgggcgacggccccgtggacatgagaaccagccacagcgacatgaagagcgagagaagaccccccagccccgacgtgatcgtgctgagcgacaacgagcagcccagcagccccagagtgaacggcctgaccaccgtggccctgaaggagaccagcaccgaggccctgatgaagagcagccccgaggagagagagagaatgatcaagcagctgaaggaggagctgagactggaggaggccaagctggtgctgctgaagaagctgagacagagctag

SEQ ID NO: 320714 - protein, 262 aa, Artificial Sequence [sequence omitted]

SEQ ID NO: 320715 - DNA, 789 bp, Artificial Sequence
  derived and/or modified sequence
atgaactttctcccctctgctgctaataacgaattcatttatctggtgggcctggaggaagttgttcagaatctcctggaaactcaggcaggccgcatgtccgctgcaacagtgttgagcagggaaccatatatgtgtgcccagtgcaagactgacttcacctgtcgatggcgagaggagaagagcggcgcaatcatgtgcgagaactgtatgaccaccaaccagaaaaaggccttaaaagtcgagcatacgtcccgacttaaggctgctttcgttaaggccctgcaacaggagcaggaaatcgagcagagactgttacagcagggcaccgcacctgcccaggctaaggcagaaccgacagctgcccctcaccccgtcctgaaacaggtgataaagcctaggcgcaaactggccttccggtccggcgaagcccgcgattggtctaacggcgcagttctgcaagcgtcctcccagctttcacgcggcagcgctactacacctaggggtgtgctgcatacatttagcccatctcctaaactgcaaaattctgctagtgccactgctttagtgtccaggacaggtcggcacagtgagaggacagtctccgccggtaaaggatcagctactagcaattggaagaagacacccctcagtaccggaggcacgttggctttcgttagtccttcccttgccgtgcacaagagctccagtgcagtagaccgacagagagagtacttgcttgacatgatccccccccgctctattccgcagagcgcaacatggaagtag

SEQ ID NO: 320716 - DNA, 789 bp, Artificial Sequence
  derived and/or modified sequence
atgaacttcctgcccagcgctgccaacaatgagttcatctacctggtgggcctggaggaggtggtgcagaacctgctggagacccaggccggccgcatgtctgctgccaccgtgctgagccgggagccctacatgtgtgcccagtgcaagacagacttcacctgccgctggagggaggagaagagcggggccatcatgtgtgagaactgcatgaccaccaaccagaagaaggccctgaaggtggagcacaccagccggctgaaggccgcctttgtgaaggccctgcagcaggagcaggagattgagcagaggctgctgcagcagggcacagccccagcccaggccaaggccgagcccacagctgccccccaccctgtgctgaagcaggtgatcaagcccaggaggaagctggccttccgctctggagaggcccgggactggagcaatggagctgtgctgcaggccagcagccagctgagccggggcagcgccaccaccccccggggcgtgctgcacaccttcagccccagccccaagctgcagaacagcgccagcgccacagccctggtgtccaggacaggccgccacagcgagaggacagtgtctgctggaaaaggaagtgccaccagcaactggaagaagacccccctgagcactggaggcaccctggcctttgtgagccccagcctggccgtgcacaagagcagcagcgctgtggaccggcagcgggagtacctgctggacatgatccccccaagaagcatcccccagagcgccacctggaagtag

SEQ ID NO: 320717 - DNA, 789 bp, Artificial Sequence
  derived and/or modified sequence
atgaacttcctgcccagcgccgccaacaacgagttcatctacctggtgggccttgaggaggttgtgcagaatctgctggaaactcaagccggaaggatgagcgcggcaacagtcttgtccagggaaccgtacatgtgcgcacagtgtaagaccgacttcacatgcagatggcgtgaggagaagagtggggccatcatgtgcgaaaactgcatgacaacaaatcagaaaaaagccctgaaggtcgagcacacctcccgcctgaaggccgcctttgtcaaagccttacagcaagagcaggagatcgaacagagacttctgcaacaggggacagccccggctcaggctaaagcggagccaaccgccgctcctcatccagttctgaagcaggtgatcaagccccggcgaaagctggcttttaggtcaggggaggctagagattggtctaacggcgcagtccttcaggcatcctcccaactgtcccgaggttctgccactacccctcggggcgtgctgcacacattttccccttcccctaagcttcagaatagcgccagcgccaccgctctggtgagtcgtaccggccggcattctgagcgcacagttagtgctggcaagggctctgcgacttcaaattggaaaaaaacccccctgagcaccggaggcacgcttgcctttgtgagtccctctctagcggttcacaagtcatctagtgcagtagaccgccagcgggaatatctccttgacatgattccacctcgaagcatcccgcagtcggccacctggaagtag

SEQ ID NO: 320718 - DNA, 789 bp, Artificial Sequence
  derived and/or modified sequence
atgaacttcttgccatccgcagccaacaacgagttcatctacctcgtggggctagaggaggtcgtgcagaacctgcttgagacccaggcgggtcgtatgtctgcagctacggtcctaagtcgcgagccttacatgtgcgcccagtgcaagacggatttcacttgtaggtggcgggaagagaagtcaggagccataatgtgcgaaaattgcatgacaaccaatcagaagaaggctctgaaggttgaacatacatctcgcctcaaagcggcttttgtgaaggctctgcagcaggaacaggaaatcgagcaaagactactgcagcagggtacagccccagcccaagctaaagccgagcctacagcggcacctcacccagttctgaagcaggtcattaagccacgacgcaagttagcattccggtcgggtgaggccagggactggtcgaacggcgcagtgctacaggcctcttcccaactgtccaggggctcagctaccacacctcgaggagtattacacaccttttcaccgtctcccaaactgcagaactcagcctctgcaacagccttggtgtctcgcaccgggcgtcacagtgaacggaccgtcagtgccggaaagggctccgctacgtctaactggaaaaagaccccactgtccacgggaggcaccctggccttcgtcagccccagcttggctgtacataaaagttcatccgcggtcgatcgtcaacgtgaatatctattggatatgatcccgccacggagcataccccagagcgccacctggaaatag

SEQ ID NO: 320719 - DNA, 1652 bp, Artificial Sequence
  derived and/or modified sequence
cgcagtcggtcggtcggtcgtctgtcctgtcgccgctgccgccgccgccacagcggccgccgcgggcgccacctgagggagtcgcctccgcgggacgccacaagacctgaccggactgcgccgcccgaggccgtcggccgccgtcagcgagggcgccgagcaacttcgaatgaccgaagaagcatgccgaacacggagtcagaaacgagcgcttgaacgggacccaacagaggacgatgtggagagcaagaaaataaaaatggagagaggattgttggcttcagatttaaacactgacggagacatgagggtgacacctgagccgggagcaggtccaacccaaggattgctgagggcaacagaggccacggccatggccatgggcagaggcgaagggctggtgggcgatgggcccgtggacatgcgcacctcacacagcccaccccagcatcactgaaggggacaacagccacctccgctcaggccaactccacccccactagtgtggcctctgtggtcacctctgccgagtctccagcaagccgacaggcggccgccaagctggcgctgcgcaaacagctggagaagacgctactcgagatccccccacccaagcccccagccccagagatgaacttcctgcccagcgccgccaacaacgagttcatctacctggtcggcctggaggaggtggtgcagaacctactggagacacaagcaggcaggatgtcggccgccactgtgctgtcccgggagccctacatgtgtgcacagtgcaagacggacttcacgtgccgctggcgggaggagaagagcggcgccatcatgtgtgagaactgcatgacaaccaaccagaagaaggcgctcaaggtggagcacaccagccggctgaaggccgcctttgtgaaggcgctgcagcaggaacaggagattgagcagcggctcctgcagcagggcacggcccctgcacaggccaaggccgagcccaccgctgccccacaccccgtgctgaagcaggtcataaaaccccggcgtaagttggcgttccgctcaggagaggcccgcgactggagtaacggggctgtgctacaggcctccagccagctgtcccggggttcggccacgacgccccgaggtgtcctgcacacgttcagtccgtcacccaaactgcagaactcagcctcggccacagccctggtcagcaggaccggcagacattctgagagaaccgtgagcgccggcaagggcagcgccacctccaactggaagaagacgcccctcagcacaggcgggacccttgcgtttgtcagcccaagcctggcggtgcacaagagctcctcggccgtggaccgccagcgagagtacctcctggacatgatcccaccccgctccatcccccagtcagccacgtggaaatagtgcgagccaggccccgtggaagacgggctccctcctcccccacctggcccctggtctagaaggacccactgcaccaccctccgctggctcgggaagacaccgtgcccgccccaagagcaagcaccggccatgctgcagaggcaagacctcaattcttggctgcaaagtttcatcagggctagggggctggtgccgcctcataggcagacgaggatcatcgctgggggaccttt

SEQ ID NO: 320720 - DNA, 789 bp, Artificial Sequence
  derived and/or modified sequence
atgaacttcctgcccagcgccgccaacaacgagttcatctacctggtgggcctggaggaggtggtgcagaacctgctggagacccaggccggcagaatgagcgccgccaccgtgctgagcagagagccctacatgtgcgcccagtgcaagaccgacttcacctgcagatggagagaggagaagagcggcgccatcatgtgcgagaactgcatgaccaccaaccagaagaaggccctgaaggtggagcacaccagcagactgaaggccgccttcgtgaaggccctgcagcaggagcaggagatcgagcagagactgctgcagcagggcaccgcccccgcccaggccaaggccgagcccaccgccgccccccaccccgtgctgaagcaggtgatcaagcccagaagaaagctggccttcagaagcggcgaggccagagactggagcaacggcgccgtgctgcaggccagcagccagctgagcagaggcagcgccaccacccccagaggcgtgctgcacaccttcagccccagccccaagctgcagaacagcgccagcgccaccgccctggtgagcagaaccggcagacacagcgagagaaccgtgagcgccggcaagggcagcgccaccagcaactggaagaagacccccctgagcaccggcggcaccctggccttcgtgagccccagcctggccgtgcacaagagcagcagcgccgtggacagacagagagagtacctgctggacatgatcccccccagaagcatcccccagagcgccacctggaagtag

SEQ ID NO: 320721 - DNA, 753 bp, Artificial Sequence
  derived and/or modified sequence
atggcccacgtgggaacttcaagggtggggagcgtgctgagcatgagtctttcaatacaccttctcgttcccacgatgacgaagggggaaaccggaaagcctgggcaccatgaggcccctcgcaccctacaggcctttccctggacttgggcacgtgcatctcctggggtttctgtggacatgtctgctgggcttccccagtcactgctttgctggccaggagcaccactcctccccactcccccactgccttctgccacctacgtaggccattcactgggcctacctagagctggttcatctgtgggcccttggttcagtgggaggtgggtgggcggtgctctggttcaatggccgctcggcggaggtgggcctggcagcgtagccgcaggcctcggaggtccactcgtgcgctggctcctcggcggaggtgctctggtgagatggccactcggaggagggggtcccggatcagttgctgctggatggggcggaccttggtttggaggccgatgggtgggcggacctcctggctccgtcgccgcaggttgggggggacctgtgcggtggccactcgggggtggtgggcctggaagcgtggccactggatggggaggtccctggtttggcggtcgttgggtgggtggcccaccaggcagtgtggctgccggttgcggcggagccttggtgcagtggcccttgggcggaggaagtttgcacagcattccttcctttcccagagcttggcggtag

SEQ ID NO: 320722 - DNA, 399 bp, Artificial Sequence
  derived and/or modified sequence
atggctactaccgtcacattggagaaatgtggtcacaataaggggtataaaggattggacaactgccggttctgtcccgggtctcagtgttgtgtggaagacggtccagagagcattgattcgatcatagatatggacgctgtgtgtaaacgtgttactaccctgggactcgatgtcagcgtcacaatttctcaggatgcaggtcgctatctgtgcgacttcacgtactacacctccctttaccagagccatggcaggtctgcattcgtgcacgttccacccctgggaaaaccctataatgcagaccagctcgggagggccttgcgcgccatcatcgaagaaatgttagatctccttgagcagagcgagggcaagatcaactactgtcacaagcattag

SEQ ID NO: 320723 - DNA, 399 bp, Artificial Sequence
  derived and/or modified sequence
atggccaccaccgtgaccctggagaagtgtggccacaacaagggctacaagggcctggacaactgccgcttctgccccggcagccagtgctgcgtggaggatggccctgagagcattgacagcatcatcgacatggatgctgtgtgcaagagggtgaccaccctgggcctggatgtgtctgtgaccatcagccaggatgctggccgctacctgtgtgacttcacctactacaccagcctgtaccagagccacggccgcagcgcctttgtgcacgtgccccccctgggcaagccctacaatgctgaccagctgggccgggccctgcgggccatcatcgaggagatgctggacctgctggagcagagcgagggcaagatcaactactgccacaagcactag

SEQ ID NO: 320724 - DNA, 399 bp, Artificial Sequence
  derived and/or modified sequence
atggccaccaccgtgaccctggagaagtgcggccacaacaagggctacaaaggcctggacaattgcagattttgcccgggctcgcaatgttgcgtagaagatggccctgaatctatagatagtatcatcgacatggacgcagtctgtaaaagggtcactactttgggactggacgtgagcgtcactatttcccaagacgccggccgttacttgtgcgactttacgtactacacatcactgtaccagtcacatggtaggtccgctttcgtccatgtccccccgctgggcaagccatacaacgcagatcagctgggccgagcgctgcgcgccattatagaggagatgttggatctcctcgaacagagtgagggaaaaattaactattgtcataaacactag

SEQ ID NO: 320725 - DNA, 399 bp, Artificial Sequence
  derived and/or modified sequence
atggccacaacagtgaccctggaaaagtgtgggcataataagggttataagggattggacaactgtagattttgcccaggctcccaatgttgcgtcgaagacggtcctgagtctatagattcgattattgatatggacgctgtgtgcaaaagggtgaccactttgggtctcgatgtgtctgttactatttctcaagatgccggacgttacctgtgtgattttacttattacacatctctgtaccagagtcatggaaggtcggccttcgtgcacgtccctccattgggcaagccttataacgcagaccagctggggagagccctgagggccatcatagaagaaatgcttgatctcttggagcagtctgaggggaaaatcaattattgtcataagcattag

SEQ ID NO: 320726 - DNA, 399 bp, Artificial Sequence
  derived and/or modified sequence
atggccaccaccgtgaccctggagaagtgcggccacaacaagggctacaagggcctggacaactgcagattctgccccggcagccagtgctgcgtggaggacggccccgagagcatcgacagcatcatcgacatggacgccgtgtgcaagagagtgaccaccctgggcctggacgtgagcgtgaccatcagccaggacgccggcagatacctgtgcgacttcacctactacaccagcctgtaccagagccacggcagaagcgccttcgtgcacgtgccccccctgggcaagccctacaacgccgaccagctgggcagagccctgagagccatcatcgaggagatgctggacctgctggagcagagcgagggcaagatcaactactgccacaagcactag

SEQ ID NO: 320727 - DNA, 507 bp, Artificial Sequence
  derived and/or modified sequence
atgcccaagggctggggcgtgagaagcagcaccttcctgcccctgtggctgcccgtgaagatcgagctgcaccaggtgcagttccacagcagcagccagatgatcttcagcaccctgagaagcgagctgtacaagctgctggccctgtgccagcacgccgtggtgcccatgggcaagttcctgggcaagaccaagacccagagccagggccaggtggtgatcttcagcgagaagggcaaggccatcatctacctgagcctgcccagaaccgtgcccatctacacctgcatcttcagccagagcgtgggctgcctgttcatcctgctgatcatcagcctgaacttcctgctgttcatctacttcatcgagaccgacctgatcatgctgcccagagtgatcctggacctgctggccagcagcgacccccccaccctggtgagccagagcgccggcatcaccgacgtgaactaccacacccagagcacctgcagaagattcagcgtgtag

SEQ ID NO: 320728 - DNA, 507 bp, Artificial Sequence
  derived and/or modified sequence
atgccgaaaggatggggtgtgcgatctagtacgtttctacctctatggctgcctgtgaaaatagagttacaccaggtgcaatttcattcaagcagccaaatgattttctcaacactgagaagtgaactttacaagctcctcgccctgtgtcagcacgcagttgtacctatgggaaagtttctgggcaaaaccaagacccagtcccagggccaagtggtaatcttttcagagaagggaaaggcaatcatttacctatccctcccccgcactgtgcccatctacacctgtattttctcccagtcagtgggttgcctctttattctgttgattattagcctcaattttcttctgttcatctattttatcgaaaccgaccttatcatgttgccacgcgtgatcctcgacctcctcgcatccagcgatcccccaacattggttagccaaagtgctggaataactgacgtgaactatcatactcagagcacatgtagacgattctctgtgtag

SEQ ID NO: 320729 - DNA, 507 bp, Artificial Sequence
  derived and/or modified sequence
atgcccaagggctggggcgtgcgcagcagcaccttcctgcccctgtggctgcctgtgaagattgagctgcaccaggtgcagttccacagcagcagccagatgatcttcagcaccctgcggtctgagctgtacaagctgctggccctgtgccagcacgctgtggtgcccatgggcaagttcctgggcaagaccaagacccagagccagggccaggtggtgatcttcagcgagaagggcaaggccatcatctacctgagcctgcccaggacagtgcccatctacacctgcatcttcagccagagcgtgggctgcctcttcatcctgctgatcatcagcctgaacttcctgctcttcatctacttcatcgagacagacctgatcatgctgcccagggtcatcctggacctgctggccagcagtgacccccccaccctggtgtcccagagcgctggcatcacagatgtgaactaccacacccagagcacctgccgccgcttctctgtgtag

SEQ ID NO: 320730 - DNA, 507 bp, Artificial Sequence
  derived and/or modified sequence
atgcccaagggctggggcgtgcggagcagcaccttcctgcccctgtggttgccggtcaagatcgaactgcatcaagtccagttccatagctccagtcagatgattttttctacgctgcgaagtgaactttacaagcttctggccctgtgccagcacgctgtcgtgcctatggggaagtttctcggaaagaccaaaactcagtcacaggggcaggtcgtcatcttctccgagaagggtaaagccattatttatttgtcactcccccggacagtgcccatctacacctgtattttctctcaatcagttggctgtctgtttatcctgctgataatatctctgaacttcctgttgttcatttactttattgagactgacctgattatgctgccaagagtcatattagacttactggcaagtagtgatcctccaaccctggttagccaaagtgccggtatcaccgatgtgaattaccatacccagtctacttgccgcagattctccgtttag

SEQ ID NO: 320731 - DNA, 507 bp, Artificial Sequence
  derived and/or modified sequence
atgccgaagggatggggggttcgaagttccacgtttctccccctttggctcccggtcaaaatcgagctgcatcaagttcaatttcattcctctagccaaatgatctttagcacactgcgaagcgagctatacaagctgctggcgttatgccagcacgctgtggtgccaatgggaaaatttctcggaaagactaagacacagtctcaaggacaggtggtgatttttagtgaaaaaggtaaggccataatttatctgtccctccctagaaccgtaccgatctatacttgtatcttttcccagagcgttggctgcctcttcatcctgctcatcatctcgctcaacttccttttgttcatttatttcattgagactgacctgattatgctgccccgagttatcctggatttgctggcgtcaagtgatcccccaactttggtctctcagtctgcgggaatcactgacgtgaattatcacacccagtcgacgtgccgcagatttagtgtctag

SEQ ID NO: 320732 - DNA, 429 bp, Artificial Sequence
  derived and/or modified sequence
atgggcctgtaccacgtgggccaggccggcctggagctgctgaccagcagcgacccccccaccagcgccagccagaacgccgagatcaccggcgtgagccacagagcccagagcaaggcccacaacctgcagagaaagctgagactgagccacaagagcagccccccctgcacctacacccagcacgccggcggcgtggacagccaccccctgacccaggacatgtgcgtgatcgtgaacgtgatcgccagacccttcgacaagtgcaactgcgacatctacctgggcctggccagcgagctgttcgtggtgagctgggtgcagctgaccgtgccctaccactggatccagaccctgggcaacgtgatcctgttctgcctggacaccgcccacagaggccactgcgacatcgccggccactgcacctag

SEQ ID NO: 320733 - DNA, 429 bp, Artificial Sequence
  derived and/or modified sequence
atgggcctctaccacgtcggccaggcaggcttagagctgctcacttcatctgatcctcctaccagcgcctcgcagaatgctgaaatcaccggagtctcacaccgggctcaatcaaaagcccacaacctgcagcggaagttaaggctgtctcataagagctcgcctccgtgtacttatactcagcatgccggtggcgtcgattcgcacccactgactcaggacatgtgtgtcattgttaacgtcatagcccggccgttcgataagtgcaactgtgatatttatttagggttagccagtgaactattcgtggtgagctgggtgcagctgaccgtcccataccattggattcaaactctggggaacgtgatcttgttttgccttgacacagctcaccgcggacactgtgacatcgctggccattgcacctag

SEQ ID NO: 320734 - DNA, 429 bp, Artificial Sequence
  derived and/or modified sequence
atgggcctgtaccacgtgggccaggccggcctggagctgctgaccagcagtgacccccccaccagcgccagccagaatgctgagatcaccggggtgagccaccgggcccagagcaaggcccacaacctgcagaggaagctgcggctgagccacaagagcagccccccctgcacctacacccagcacgccggcggcgtggacagccaccccctgacccaggacatgtgtgtgattgtgaatgtcatcgcccggccctttgacaagtgcaactgtgacatctacctgggcctggccagcgagctgtttgtggtgtcctgggtgcagctgactgtgccctaccactggatccagaccctgggcaatgtcatcctcttctgcctggacacagcccaccggggccactgtgacattgctggccactgcacctag

SEQ ID NO: 320735 - DNA, 429 bp, Artificial Sequence
  derived and/or modified sequence
atgggcctgtaccacgtgggccaggccggcctggagctgctgacctctagcgacccgccaacctcagctagccagaatgccgagataaccggcgtcagtcacagggcccaaagtaaggcccataacctgcagcgcaaattgcgactgtcacataagagttcccctccctgcacctacacgcagcatgccggaggcgttgattctcaccctcttacccaggatatgtgtgtcatagttaatgttatagccagaccttttgacaaatgcaactgtgacatctacctgggattagcgtctgagctgttcgtcgtctcctgggtccagcttaccgttccctatcattggatacagaccctgggcaacgtgatcctcttttgcctggacactgctcatagagggcattgcgacatagcaggacactgtacttag

SEQ ID NO: 320736 - DNA, 429 bp, Artificial Sequence
  derived and/or modified sequence
atgggcctctaccacgtgggacaggctggtctggagctgctgacaagtagcgatccgcctacaagtgcgtctcagaatgcagagataacaggggtttcccacagagcccagagtaaagcccataatctccagcggaaattgcgccttagccacaagtcatctcccccatgcacctatacccagcatgccggaggtgtcgacagtcaccccctcacccaggatatgtgtgtgatcgtaaacgtgatcgcgaggccgtttgacaaatgtaactgcgatatttacttggggctcgctagtgagctctttgtggtatcttgggtgcaacttactgttccttaccactggatacaaacattgggtaacgtcatattgttctgcctggatacagcacaccggggacattgtgacattgccggacactgtacctag

SEQ ID NO: 320737 - protein, 528 aa, Artificial Sequence
  derived and/or modified sequence
MLLPLLLLLPMCWAVEVKRPRGVSLTNHHFYDESKPFTCLDGSATIPFDQVNDDYCDCKDGSDEPGTAACPNGSFHCTNTGYKPLYIPSNRVNDGVCDCCDGTDEYNSGVICENTCKEKGRKERESLQQMAEVTREGFRLKKILIEDWKKAREEKQKKLIELQAGKKSLEDQVEMLRTVKEEAEKPEREAKEQHQKLWEEQLAAAKAQQEQELAADAFKELDDDMDGTVSVTELQTHPELDTDGDGALSEAEAQALLSGDTQTDATSFYDRVWAAIRDKYRSEALPTDLPAPSAPDLTEPKEEQPPVPSSPTEEEEEEEEEEEEEAEEEEEEEDSEEAPPPLSPPQPASPAEEDKMPPYDEQTQAFIDAAQEARNKFEEAERSLKDMEESIRNLEQEISFDFGPNGEFAYLYSQCYELTTNEYVYRLCPFKLVSQKPKLGGSPTSLGTWGSWIGPDHDKFSAMKYEQGTGCWQGPNRSTTVRLLCGKETMVTSTTEPSRCEYLMELMTPAACPEPPPEAPTEDDHDEL

SEQ ID NO: 320738 - DNA, 1587 bp, Artificial Sequence
  derived and/or modified sequence
atgctgctacccctgctgctcctcctgcccatgtgctgggcggttgaagttaagcggcctcgaggagtgtctctgaccaatcaccatttttacgacgagtcgaagccgttcacctgtctcgatggatccgccaccatccccttcgaccaggtgaacgatgattattgtgattgcaaagatggctctgacgagcccgggaccgcagcatgtcccaatggttccttccattgtactaacacggggtacaaacccctctacataccatctaacagagtgaatgacggagtttgtgactgctgcgatgggacagacgagtataacagcggggttatctgcgagaatacatgcaaggagaaaggcagaaaagagcgcgagagtcttcaacagatggccgaggtcacacgcgagggctttagattaaaaaagattttgatcgaagactggaaaaaagcccgagaggagaagcagaaaaagctgattgagctgcaggcgggaaagaagagtcttgaggatcaggttgagatgctgcggacagtaaaagaagaggccgagaaaccagagagggaggccaaagagcagcaccagaagctttgggaagagcagctcgctgctgccaaggctcaacaggaacaggaactggcagctgatgcgttcaaagaactggacgatgacatggacgggaccgtgtctgtgaccgagctgcagactcaccctgaactggatacagacggggatggcgctctcagtgaagcagaagctcaagcactgctgagtggggatacccagactgacgccacttccttttatgatagggtgtgggctgctattcgcgataagtatcggtctgaggccctcccgactgacctgcccgccccttccgctccagacctgaccgagcccaaagaggagcagccccctgttccttcaagtcccacggaagaagaggaggaggaggaagaagaagaggaggaagaggcagaagaggaggaagaggaagaagactctgaagaggccccgccgccattgtctcctcctcagccagccagtccagccgaagaggacaagatgccaccatatgacgaacagacacaggcgttcattgatgccgcacaggaagcacggaataaattcgaggaagccgaaagatccctcaaagacatggaagagtccatcagaaacctcgagcaagagattagcttcgatttcggcccaaatggagaatttgcctatttgtactctcagtgctacgaacttacgacaaacgagtatgtttataggctgtgtcctttcaagctcgtgtcacagaagcccaaactgggaggctctccaactagcctggggacatgggggtcctggataggccccgaccacgataaattctctgctatgaagtacgagcaaggtacagggtgttggcagggcccgaaccgttcaacaactgtgcgactcctgtgtgggaaagaaactatggtgacgagcactaccgaaccctccaggtgcgaatacctaatggaactcatgacgcctgccgcctgccctgaaccccctcctgaagcacccactgaggacgatcatgacgaactgtag

SEQ ID NO: 320739 - DNA, 1587 bp, Artificial Sequence
  derived and/or modified sequence
atgctgctgcccctgctgctgctgctgcccatgtgctgggccgtggaggtgaagaggccccggggcgtgtccctgaccaaccaccacttctatgatgagagcaagcccttcacctgcctggatggcagcgccaccatcccctttgaccaggtgaatgatgactactgtgactgcaaggatggcagtgatgagcctggaacagctgcctgccccaacggcagcttccactgcaccaacacaggctacaagcccctgtacatccccagcaacagagtgaatgatggagtgtgtgactgctgtgatggaacagatgagtacaacagcggggtcatctgtgagaacacctgcaaggagaagggcaggaaggagcgggagagcctgcagcagatggccgaggtgacccgggagggcttccggctgaagaagatcctgattgaggactggaagaaggcccgggaggagaagcagaagaagctgattgagctgcaggccggcaagaagagcctggaggaccaggtggagatgctgaggacagtgaaggaggaggccgagaagccagagcgggaggccaaggagcagcaccagaagctgtgggaggagcagctggccgccgccaaggcccagcaggagcaggagctggccgcagatgccttcaaggagctggatgatgacatggatggcaccgtgtctgtgacagagctgcagacccaccctgagctggacacagatggagatggagccctgtctgaggccgaggcccaggccctgctgagcggggacacccagacagatgccaccagcttctatgacagagtgtgggccgccatccgggacaagtacagaagtgaggccctgcccacagacctgcctgcccccagcgccccagacctgacagagcccaaggaggagcagccccctgtgcccagcagccccacagaggaggaggaggaggaggaggaggaggaggaggaggaggccgaggaggaggaggaggaggaggacagcgaggaggcccccccacccctgagccccccccagcctgccagccctgctgaggaggacaagatgccaccctatgatgagcagacccaggccttcattgatgctgcccaggaggccaggaacaagtttgaggaggccgagaggagcctgaaggacatggaggagagcatccggaacctggagcaggagatcagctttgattttggccccaatggagaatttgcctacctgtacagccagtgctatgagctgaccaccaatgaatatgtgtaccgcctgtgccccttcaagctggtgtcccagaagcccaagctgggcggcagccccaccagcctgggcacctggggctcctggattggaccagaccatgacaagttcagcgccatgaagtatgagcagggcaccggctgctggcagggccccaacagaagcaccaccgtgcggctgctgtgtgggaaggagaccatggtgaccagcaccacagagcccagccgctgtgagtacctgatggagctgatgaccccagctgcctgcccagagcccccacctgaggcccccacagaagatgaccatgatgagctgtag

SEQ ID NO: 320740 - DNA, 1587 bp, Artificial Sequence
  derived and/or modified sequence
atgctgctgcccctgctgctgctgctgcccatgtgctgggccgtggaggttaagaggccccgcggcgtgagtttgacaaaccaccatttttatgacgaaagcaaaccgtttacatgtctcgatggttctgcaaccatcccattcgaccaagtaaacgacgactactgtgactgtaaagacgggagcgacgaacctggcaccgccgcctgtcctaacggttctttccattgtacaaataccgggtacaagccactttatattcctagcaatcgcgtcaacgacggagtctgtgattgctgcgatgggacagacgagtataactcaggcgtcatctgtgagaacacatgtaaagagaaaggcaggaaagaacgcgaatctctccagcagatggcggaagttacacgcgagggcttccggctcaaaaaaatattgattgaagactggaaaaaagctagagaggagaaacagaagaagctgatcgagctgcaggcagggaagaagtccttggaagatcaagtggaaatgctcaggaccgtaaaggaagaggcggaaaagccggaacgcgaagccaaggaacagcatcagaaactttgggaggagcagctggctgctgcaaaggcccaacaggaacaagaactcgccgccgatgcattcaaggagttggacgatgacatggacgggactgtctcagtaaccgaattacagacccatcctgagctcgataccgatggagatggagctctcagcgaagcggaggcccaagcactcctttctggagacactcaaacggatgcaaccagtttttacgaccgggtttgggccgccatccgggataagtacagatccgaagctctgccaaccgatcttccagcaccaagtgccccagacttaacggagcctaaagaagaacagccacccgtgccgtcctctcctaccgaagaagaagaagaagaagaagaagaagaagaggaagaagcagaggaggaggaggaagaggaggattcagaagaggcccctcctcctctgagtccgcctcagccagcgtctccagccgaagaggataaaatgcctccatacgatgagcagactcaggcatttatagacgcagcacaggaggcccgcaataaatttgaagaggccgaacggtctctgaaagacatggaggaaagcattaggaaccttgaacaagagattagctttgacttcggtccaaatggtgagtttgcttatctgtattcacagtgttacgagctcacaactaatgaatatgtctacagactgtgtccgtttaagctagtcagccagaagcccaaactcggaggatccccgacatcccttggcacatggggatcttggatcggaccagaccacgacaagtttagcgccatgaagtatgaacaagggactggctgttggcagggacctaaccggagtactactgtacgcttactgtgcgggaaggagactatggtgacttcaaccaccgaacctagtcgttgcgagtatcttatggaacttatgactcccgcggcttgcccagagccccccccagaagcccccacagaggacgaccatgacgagttgtag

SEQ ID NO: 320741 - DNA, 1587 bp, Artificial Sequence
  derived and/or modified sequence
atgcttctgccccttttactcttgctacctatgtgttgggcagtagaagtaaagaggccccgtggagtctccttgaccaaccatcatttttacgatgagtcaaagccattcacatgcttggatggatcagctactattcctttcgaccaagtcaatgacgattactgcgactgcaaggatggttctgacgagcctggcaccgccgcttgcccaaatggatctttccactgtacgaatacgggctataaacctttatatatccccagcaaccgcgtcaacgatggagtttgtgactgctgcgatggaaccgacgaatacaattctggcgtgatatgcgagaacacttgtaaagagaaaggcagaaaagagcgcgagtctcttcaacagatggcagaagtaacaagggaggggtttcggctcaaaaagattcttatcgaggactggaagaaagccagagaggagaaacagaagaagctgatcgagctgcaggctggcaagaaatctcttgaagaccaggtggagatgctgcgaacagtcaaagaagaggcagaaaagcccgaacgagaggcaaaggagcagcatcagaagctgtgggaagaacagctggccgcagccaaagctcagcaggagcaagagctcgcagcagacgcattcaaagaattagacgatgacatggatggcacggtgagcgtgaccgaactgcaaacacacccagaactggacacagatggtgacggcgctctttcagaggcagaggcccaggcacttttaagtggggacacacagactgatgcaaccagtttctacgatagagtgtgggctgccattagggataaatacaggtctgaagctctgcccacggatctaccagcccctagtgccccagatctcactgagcccaaagaggaacaacccccagtgccatcctcccctaccgaggaagaggaagaagaggaggaagaggaagaagaagaggcagaggaagaggaggaagaagaagacagcgaagaggctcctcccccactatctcctccccagcctgcgagccccgcagaggaagacaagatgcccccatacgacgaacagacgcaggccttcatcgatgcagcccaggaggcccgaaacaaattcgaggaggccgagcggtctttaaaggacatggaggagtctattaggaacctagagcaggagatctcattcgactttggacccaacggcgagttcgcttacctgtattctcagtgctatgaactcacaaccaacgaatacgtgtacaggctctgccccttcaagctggtgagccagaagcccaagctcgggggttcaccaacttccctcgggacatggggaagttggataggccctgaccacgacaagttctctgctatgaagtacgaacaggggacaggatgttggcagggcccaaacaggtctacaaccgtccgcctgctttgtggcaaagagactatggtgacgagtactacagagccctcaagatgtgaatatttaatggagttaatgacgccagctgcttgcccagagcctccacccgaagcccctaccgaggacgatcatgatgaactctag

SEQ ID NO: 320742 - DNA, 2262 bp, Artificial Sequence
  derived and/or modified sequence
gctgcgccgccattaagagctagccctcagaactatcctctctaaggtttcacagtcctgcccaagatggccgtctcggctctggcaccgcccccactcctgcctctcccaacatggcgaccctgagtctccgttcccggtgcggaacgtacgaccggaagtgacggggtccagaaatttccgctttctttctgcagcaggaaccgcggctgctggacaagaggggtgcggtggatactgacctttgctccggcctcgtcgtgaagacacagcgcatctccccgctgtaggcttcctcccacagaacccgtttcgggcctcagagcgtctggtgagatgctgttgccgctgctgctgctgctacccatgtgctgggccgtggaggtcaagaggccccggggcgtctccctcaccaatcatcacttctacgatgagtccaagcctttcacctgcctggacggttcggccaccatcccatttgatcaggtcaacgatgactattgcgactgcaaagatggctctgacgagccaggcacggctgcctgtcctaatggcagcttccactgcaccaacactggctataagcccctgtatatcccctccaaccgggtcaacgatggtgtttgtgactgctgcgatggaacagacgagtacaacagcggcgtcatctgtgagaacacctgcaaagagaagggccgtaaggagagagagtccctgcagcagatggccgaggtcacccgcgaagggttccgtctgaagaagatccttattgaggactggaagaaggcacgggaggagaagcagaaaaagctcattgagctacaggctgggaagaagtctctggaagaccaggtggagatgctgcggacagtgaaggaggaagctgagaagccagagagagaggccaaagagcagcaccagaagctgtgggaagagcagctggctgctgccaaggcccaacaggagcaggagctggcggctgatgccttcaaggagctggatgatgacatggacgggacggtctcggtgactgagctgcagactcacccggagctggacacagatggggatggggcgttgtcagaagcggaagctcaggccctcctcagtggggacacacagacagacgccacctctttctacgaccgcgtctgggccgccatcagggacaagtaccggtccgaggcactgcccaccgaccttccagcaccttctgcccctgacttgacggagcccaaggaggagcagccgccagtgccctcgtcgcccacagaggaggaggaggaggaggaggaggaggaggaagaagaggctgaagaagaggaggaggaggaggattccgaggaggccccaccgccactgtcacccccgcagccggccagccctgctgaggaagacaaaatgccgccctacgacgagcagacgcaggccttcatcgatgctgcccaggaggcccgcaacaagttcgaggaggccgagcggtcgctgaaggacatggaggagtccatcaggaacctggagcaagagatttcttttgactttggccccaacggggagtttgcttacctgtacagccagtgctacgagctcaccaccaacgaatacgtctaccgcctctgccccttcaagcttgtctcgcagaaacccaaactcgggggctctcccaccagccttggcacctggggctcatggattggccccgaccacgacaagttcagtgccatgaagtatgagcaaggcacgggctgctggcagggccccaaccgctccaccaccgtgcgcctcctgtgcgggaaagagaccatggtgaccagcaccacagagcccagtcgctgcgagtacctcatggagctgatgacgccagccgcctgcccggagccaccgcctgaagcacccaccgaagacgaccatgacgagctctagctggatgggcgcagagaacctcaagaaggcatgaagccagcccctgcagtgccgtccacccgcccctctgggcctgcctgtggctctgttgccctcctctgtggcggcaggacctttgtggggcttcgtgccctgctctggggcccaggcggggctggtccacattcccaggccccaacagccttcaaagatgggtaaaggagcttgccctccctgggccccccaccttggtgactcgccccaccacccccagccctgtccctgccacccctcctagtggggactagtgaatgacttgacctgtgacctcaatacaataaatgtgatcccccacccaaa

SEQ ID NO: 320743 - DNA, 1587 bp, Artificial Sequence
  derived and/or modified sequence
atgctgctgcccctgctgctgctgctgcccatgtgctgggccgtggaggtgaagagacccagaggcgtgagcctgaccaaccaccacttctacgacgagagcaagcccttcacctgcctggacggcagcgccaccatccccttcgaccaggtgaacgacgactactgcgactgcaaggacggcagcgacgagcccggcaccgccgcctgccccaacggcagcttccactgcaccaacaccggctacaagcccctgtacatccccagcaacagagtgaacgacggcgtgtgcgactgctgcgacggcaccgacgagtacaacagcggcgtgatctgcgagaacacctgcaaggagaagggcagaaaggagagagagagcctgcagcagatggccgaggtgaccagagagggcttcagactgaagaagatcctgatcgaggactggaagaaggccagagaggagaagcagaagaagctgatcgagctgcaggccggcaagaagagcctggaggaccaggtggagatgctgagaaccgtgaaggaggaggccgagaagcccgagagagaggccaaggagcagcaccagaagctgtgggaggagcagctggccgccgccaaggcccagcaggagcaggagctggccgccgacgccttcaaggagctggacgacgacatggacggcaccgtgagcgtgaccgagctgcagacccaccccgagctggacaccgacggcgacggcgccctgagcgaggccgaggcccaggccctgctgagcggcgacacccagaccgacgccaccagcttctacgacagagtgtgggccgccatcagagacaagtacagaagcgaggccctgcccaccgacctgcccgcccccagcgcccccgacctgaccgagcccaaggaggagcagccccccgtgcccagcagccccaccgaggaggaggaggaggaggaggaggaggaggaggaggaggccgaggaggaggaggaggaggaggacagcgaggaggcccccccccccctgagccccccccagcccgccagccccgccgaggaggacaagatgcccccctacgacgagcagacccaggccttcatcgacgccgcccaggaggccagaaacaagttcgaggaggccgagagaagcctgaaggacatggaggagagcatcagaaacctggagcaggagatcagcttcgacttcggccccaacggcgagttcgcctacctgtacagccagtgctacgagctgaccaccaacgagtacgtgtacagactgtgccccttcaagctggtgagccagaagcccaagctgggcggcagccccaccagcctgggcacctggggcagctggatcggccccgaccacgacaagttcagcgccatgaagtacgagcagggcaccggctgctggcagggccccaacagaagcaccaccgtgagactgctgtgcggcaaggagaccatggtgaccagcaccaccgagcccagcagatgcgagtacctgatggagctgatgacccccgccgcctgccccgagcccccccccgaggcccccaccgaggacgaccacgacgagctgtag

SEQ ID NO: 320744 - protein, 525 aa, Artificial Sequence
  derived and/or modified sequence
MLLPLLLLLPMCWAVEVKRPRGVSLTNHHFYDESKPFTCLDGSATIPFDQVNDDYCDCKDGSDEPGTAACPNGSFHCTNTGYKPLYIPSNRVNDGVCDCCDGTDEYNSGVICENTCKEKGRKERESLQQMAEVTREGFRLKKILIEDWKKAREEKQKKLIELQAGKKSLEDQVEMLRTVKEEAEKPEREAKEQHQKLWEEQLAAAKAQQEQELAADAFKELDDDMDGTVSVTELQTHPELDTDGDGALSEAEAQALLSGDTQTDATSFYDRVWAAIRDKYRSEALPTDLPAPSAPDLTEPKEEQPPVPSSPTEEEEEEEEEEEEEAEEEEEEEDSEVQGEQPKPASPAEEDKMPPYDEQTQAFIDAAQEARNKFEEAERSLKDMEESIRNLEQEISFDFGPNGEFAYLYSQCYELTTNEYVYRLCPFKLVSQKPKLGGSPTSLGTWGSWIGPDHDKFSAMKYEQGTGCWQGPNRSTTVRLLCGKETMVTSTTEPSRCEYLMELMTPAACPEPPPEAPTEDDHDEL

SEQ ID NO: 320745 - DNA, 1578 bp, Artificial Sequence
  derived and/or modified sequence
atgctcctgcccctactcctgttacttccgatgtgttgggccgttgaagtcaaaagacccaggggagtgtctctcacaaaccaccacttttacgacgagagcaaaccgttcacatgcctggatggatccgctacaatcccatttgaccaggtgaacgatgattattgtgattgcaaagacgggagcgatgaacccgggacagctgcctgccccaacggtagcttccattgcacaaacacaggctacaaaccattatatattcctagtaaccgagtcaatgatggcgtgtgcgattgttgtgacggcaccgatgagtacaactctggtgtgatatgtgaaaacacctgcaaggagaaaggccgcaaggagagagaatctctgcagcagatggcagaagtaacacgggagggttttaggctgaagaaaatcttaatcgaggattggaagaaggccagagaagagaaacaaaaaaagctgatcgaactccaggctggaaagaagtcactcgaagatcaggtggaaatgcttagaacagttaaggaggaggctgagaagcccgagcgggaggctaaagaacagcaccagaagctgtgggaggaacagcttgctgcagcgaaagcccagcaggagcaggagttggcagcagatgccttcaaagaactggacgatgatatggatggaacggtctcagtgacagaactacagacccaccctgagttggataccgatggcgacggcgcactctccgaggctgaagctcaggctttgctctctggagatactcagaccgatgccacgtcattttacgatcgggtgtgggcggccatccgtgacaagtacagatctgaagcgctaccaacagacctgcctgctcctagtgcacctgacctgacagagccaaaggaggaacagccaccagttccttctagtcccacagaggaggaggaagaagaagaggaggaagaagaggaggaggctgaggaggaagaagaagaagaagacagtgaagtgcagggggaacagcctaagccagccagcccagcggaggaagacaaaatgccaccgtatgacgaacagacacaggcattcatcgatgcagctcaggaagccagaaacaaatttgaggaagctgaacgatccctgaaagacatggaggaaagcatccgcaatctagagcaggaaatttcttttgactttggacctaatggagagtttgcatatctgtacagccaatgctacgaactgaccaccaatgagtatgtgtaccgcctatgtcccttcaaactcgtctcccagaaaccaaaactggggggcagtcccacttcccttggaacatggggaagttggatcggccccgaccacgataagttcagcgcaatgaaatacgaacagggtactggctgctggcagggacccaacagatccacaaccgtgcgactgctgtgtggaaaagaaactatggtcactagcacaacggagcctagccgctgcgagtacctgatggagctcatgacgccagctgcatgccctgagccgcctccagaggctcccaccgaggacgatcacgatgagctgtag

SEQ ID NO: 320746 - DNA, 1578 bp, Artificial Sequence
  derived and/or modified sequence
atgctgctgcccctgctgctgctgctgcccatgtgctgggccgtggaggtgaagaggccccggggcgtgtccctgaccaaccaccacttctatgatgagagcaagcccttcacctgcctggatggcagcgccaccatcccctttgaccaggtgaatgatgactactgtgactgcaaggatggcagtgatgagcctggaacagctgcctgccccaacggcagcttccactgcaccaacacaggctacaagcccctgtacatccccagcaacagagtgaatgatggagtgtgtgactgctgtgatggaacagatgagtacaacagcggggtcatctgtgagaacacctgcaaggagaagggcaggaaggagcgggagagcctgcagcagatggccgaggtgacccgggagggcttccggctgaagaagatcctgattgaggactggaagaaggcccgggaggagaagcagaagaagctgattgagctgcaggccggcaagaagagcctggaggaccaggtggagatgctgaggacagtgaaggaggaggccgagaagccagagcgggaggccaaggagcagcaccagaagctgtgggaggagcagctggccgccgccaaggcccagcaggagcaggagctggccgcagatgccttcaaggagctggatgatgacatggatggcaccgtgtctgtgacagagctgcagacccaccctgagctggacacagatggagatggagccctgtctgaggccgaggcccaggccctgctgagcggggacacccagacagatgccaccagcttctatgacagagtgtgggccgccatccgggacaagtacagaagtgaggccctgcccacagacctgcctgcccccagcgccccagacctgacagagcccaaggaggagcagccccctgtgcccagcagccccacagaggaggaggaggaggaggaggaggaggaggaggaggaggccgaggaggaggaggaggaggaggacagcgaggtgcagggcgagcagcccaagccagccagccctgctgaggaggacaagatgccaccctatgatgagcagacccaggccttcattgatgctgcccaggaggccaggaacaagtttgaggaggccgagaggagcctgaaggacatggaggagagcatccggaacctggagcaggagatcagctttgattttggccccaacggggagtttgcctacctgtacagccagtgctatgagctgaccaccaatgaatatgtgtaccgcctgtgccccttcaagctggtgtcccagaagcccaagctgggcggcagccccaccagcctgggcacctggggctcctggattggccctgaccatgacaagttcagcgccatgaagtatgagcagggcaccggctgctggcagggccccaacagaagcaccaccgtgcggctgctgtgtgggaaggagaccatggtgaccagcaccacagagcccagccgctgtgagtacctgatggagctgatgaccccagctgcctgcccagagcccccacctgaggcccccacagaagatgaccatgatgagctgtag

SEQ ID NO: 320747 - DNA, 1578 bp, Artificial Sequence
  derived and/or modified sequence
atgctgctgcccctgctgctgctgctgcccatgtgctgggccgtggaagtcaagaggccccggggcgttagcctcactaatcatcatttctatgacgagtcaaagccttttacttgtctcgatgggagcgcaaccatcccattcgaccaggtaaatgatgattactgcgattgcaaggatgggtctgacgagcccggaacagccgcctgtcctaacggtagctttcactgtactaacaccggatataaaccactgtatattccttctaaccgggtgaacgacggggtctgtgactgctgcgacgggaccgatgagtacaattccggtgtcatctgcgaaaatacatgcaaggagaaaggcaggaaggaaagagaatcacttcaacagatggcagaggtcacaagggaaggttttcggctgaagaaaatactcatcgaagactggaaaaaggcacgcgaggagaaacagaaaaagctcatcgagcttcaggctggaaaaaagtccctcgaggatcaggtggagatgctcagaacagtgaaggaagaagccgaaaagcctgagagagaagccaaggagcagcaccagaaactgtgggaggagcagcttgccgcggcaaaggcacaacaagaacaagaactggcggcagacgccttcaaggagctggatgatgacatggacggcactgtgtccgtaacagaactgcagacccatcctgagctcgatacagacggtgatggggcactgtccgaagccgaagctcaggctcttttgagcggagatactcaaacggacgctacatccttttacgaccgggtatgggctgctattagggataaatatcgtagtgaggcgttgccaacagatctgcctgcccccagcgcgccggatctcaccgagcctaaggaagaacagccccccgtgccatcctctccaaccgaggaggaagaagaggaagaggaagaagaggaagaagaagccgaggaggaggaagaggaagaggatagcgaggtgcagggggagcagcccaagcccgccagcccagctgaggaggataaaatgccgccttacgatgagcaaactcaggctttcattgacgcagcacaggaggcccgcaacaaattcgaagaggccgagagatcactgaaggacatggaggaatcgatccggaatttggaacaagaaatctccttcgactttggccctaatggcgagttcgcatacctatactcccaatgttatgagctgaccaccaatgagtatgtgtacaggctctgccctttcaaactagtgagccagaaaccaaaactgggcgggtccccaactagtctgggcacatggggtagttggattggcccagaccacgataaattcagtgccatgaaatacgaacaggggaccgggtgttggcagggtcccaaccgttctaccaccgtgcggctcctttgcggtaaggaaaccatggtgacgtccacaacagagccctcgcgatgtgagtacttaatggagctcatgacccctgcagcctgccccgaacctcccccggaagcgccaaccgaagacgaccacgacgaattgtag

SEQ ID NO: 320748 - DNA, 1578 bp, Artificial Sequence
  derived and/or modified sequence
atgttgcttcccctgctgctcctacttcctatgtgctgggccgttgaggtaaagagacctcggggagtttctctcactaatcatcatttttacgacgaatcaaaacccttcacgtgcctggacggctctgcaacgatcccctttgatcaggttaatgatgactactgcgactgcaaggacggctctgatgaacccggaacggccgcttgccccaacggctccttccactgtacaaatacagggtataaacccctgtacatcccctcaaaccgtgtcaatgacggagtgtgcgactgctgcgacggtaccgacgagtataatagcggcgtgatttgtgagaacacatgtaaggaaaagggcagaaaggaaagggagagcctgcagcagatggccgaggttacacgggaaggtttccggttaaaaaaaatcctcatcgaggactggaagaaagccagggaggagaagcagaaaaaattaatcgagctgcaggccggaaaaaaatcactggaagatcaagtcgagatgctgcgcacagtgaaggaagaggcggagaagccagagagagaagcaaaagagcaacaccagaaactttgggaggagcagctggccgctgctaaggcccagcaggaacaagagctagctgcagatgcatttaaggaactggacgacgacatggatggaacggtatcggtgacagaactgcagacacaccccgagctggataccgatggggacggtgctctgtcagaggcagaggcccaggcattgctcagcggagacactcaaactgacgcgacctcattctacgaccgggtgtgggcagcaatccgagacaaataccggagcgaagcactgcctacagaccttccagccccttctgccccagatctgacagagcccaaggaagagcagccgcctgtcccatccagccctacggaagaagaggaggaggaggaagaagaagaagaagaggaagctgaagaagaggaggaggaagaagattccgaggtgcagggcgagcaaccaaagcctgcaagccccgctgaggaggataagatgcccccttacgacgagcagacccaggcattcatcgatgcagcccaggaggcccgaaataaatttgaggaggccgagcggtccttgaaggacatggaggaatctattcgaaacctcgagcaggaaatatccttcgattttggcccaaacggagagttcgcctatttgtacagtcagtgctatgagcttaccacgaacgagtacgtgtaccgtttgtgccctttcaaactagtgagccagaagcctaagcttggcggtagtcccacctccctgggcacctggggttcatggataggaccagatcacgacaaattctcggccatgaagtatgaacaggggacagggtgctggcagggacccaatcgctcaacaaccgttcgattactgtgtggtaaggaaacaatggttacttctactaccgaaccatccaggtgtgagtaccttatggagctgatgacaccggctgcctgtcccgagccccctccagaggcacccactgaggacgatcacgatgagctgtag

SEQ ID NO: 320749 - DNA, 2253 bp, Artificial Sequence
  derived and/or modified sequence
gctgcgccgccattaagagctagccctcagaactatcctctctaaggtttcacagtcctgcccaagatggccgtctcggctctggcaccgcccccactcctgcctctcccaacatggcgaccctgagtctccgttcccggtgcggaacgtacgaccggaagtgacggggtccagaaatttccgctttctttctgcagcaggaaccgcggctgctggacaagaggggtgcggtggatactgacctttgctccggcctcgtcgtgaagacacagcgcatctccccgctgtaggcttcctcccacagaacccgtttcgggcctcagagcgtctggtgagatgctgttgccgctgctgctgctgctacccatgtgctgggccgtggaggtcaagaggccccggggcgtctccctcaccaatcatcacttctacgatgagtccaagcctttcacctgcctggacggttcggccaccatcccatttgatcaggtcaacgatgactattgcgactgcaaagatggctctgacgagccaggcacggctgcctgtcctaatggcagcttccactgcaccaacactggctataagcccctgtatatcccctccaaccgggtcaacgatggtgtttgtgactgctgcgatggaacagacgagtacaacagcggcgtcatctgtgagaacacctgcaaagagaagggccgtaaggagagagagtccctgcagcagatggccgaggtcacccgcgaagggttccgtctgaagaagatccttattgaggactggaagaaggcacgggaggagaagcagaaaaagctcattgagctacaggctgggaagaagtctctggaagaccaggtggagatgctgcggacagtgaaggaggaagctgagaagccagagagagaggccaaagagcagcaccagaagctgtgggaagagcagctggctgctgccaaggcccaacaggagcaggagctggcggctgatgccttcaaggagctggatgatgacatggacgggacggtctcggtgactgagctgcagactcacccggagctggacacagatggggatggggcgttgtcagaagcggaagctcaggccctcctcagtggggacacacagacagacgccacctctttctacgaccgcgtctgggccgccatcagggacaagtaccggtccgaggcactgcccaccgaccttccagcaccttctgcccctgacttgacggagcccaaggaggagcagccgccagtgccctcgtcgcccacagaggaggaggaggaggaggaggaggaggaggaagaagaggctgaagaagaggaggaggaggaggattccgaggtgcagggggagcagcccaagccggccagccctgctgaggaagacaaaatgccgccctacgacgagcagacgcaggccttcatcgatgctgcccaggaggcccgcaacaagttcgaggaggccgagcggtcgctgaaggacatggaggagtccatcaggaacctggagcaagagatttcttttgactttggccccaacggggagtttgcttacctgtacagccagtgctacgagctcaccaccaacgaatacgtctaccgcctctgccccttcaagcttgtctcgcagaaacccaaactcgggggctctcccaccagccttggcacctggggctcatggattggccccgaccacgacaagttcagtgccatgaagtatgagcaaggcacgggctgctggcagggccccaaccgctccaccaccgtgcgcctcctgtgcgggaaagagaccatggtgaccagcaccacagagcccagtcgctgcgagtacctcatggagctgatgacgccagccgcctgcccggagccaccgcctgaagcacccaccgaagacgaccatgacgagctctagctggatgggcgcagagaacctcaagaaggcatgaagccagcccctgcagtgccgtccacccgcccctctgggcctgcctgtggctctgttgccctcctctgtggcggcaggacctttgtggggcttcgtgccctgctctggggcccaggcggggctggtccacattcccaggccccaacagccttcaaagatgggtaaaggagcttgccctccctgggccccccaccttggtgactcgccccaccacccccagccctgtccctgccacccctcctagtggggactagtgaatgacttgacctgtgacctcaatacaataaatgtgatcccccacccaaa

SEQ ID NO: 320750 - DNA, 1578 bp, Artificial Sequence
  derived and/or modified sequence
atgctgctgcccctgctgctgctgctgcccatgtgctgggccgtggaggtgaagagacccagaggcgtgagcctgaccaaccaccacttctacgacgagagcaagcccttcacctgcctggacggcagcgccaccatccccttcgaccaggtgaacgacgactactgcgactgcaaggacggcagcgacgagcccggcaccgccgcctgccccaacggcagcttccactgcaccaacaccggctacaagcccctgtacatccccagcaacagagtgaacgacggcgtgtgcgactgctgcgacggcaccgacgagtacaacagcggcgtgatctgcgagaacacctgcaaggagaagggcagaaaggagagagagagcctgcagcagatggccgaggtgaccagagagggcttcagactgaagaagatcctgatcgaggactggaagaaggccagagaggagaagcagaagaagctgatcgagctgcaggccggcaagaagagcctggaggaccaggtggagatgctgagaaccgtgaaggaggaggccgagaagcccgagagagaggccaaggagcagcaccagaagctgtgggaggagcagctggccgccgccaaggcccagcaggagcaggagctggccgccgacgccttcaaggagctggacgacgacatggacggcaccgtgagcgtgaccgagctgcagacccaccccgagctggacaccgacggcgacggcgccctgagcgaggccgaggcccaggccctgctgagcggcgacacccagaccgacgccaccagcttctacgacagagtgtgggccgccatcagagacaagtacagaagcgaggccctgcccaccgacctgcccgcccccagcgcccccgacctgaccgagcccaaggaggagcagccccccgtgcccagcagccccaccgaggaggaggaggaggaggaggaggaggaggaggaggaggccgaggaggaggaggaggaggaggacagcgaggtgcagggcgagcagcccaagcccgccagccccgccgaggaggacaagatgcccccctacgacgagcagacccaggccttcatcgacgccgcccaggaggccagaaacaagttcgaggaggccgagagaagcctgaaggacatggaggagagcatcagaaacctggagcaggagatcagcttcgacttcggccccaacggcgagttcgcctacctgtacagccagtgctacgagctgaccaccaacgagtacgtgtacagactgtgccccttcaagctggtgagccagaagcccaagctgggcggcagccccaccagcctgggcacctggggcagctggatcggccccgaccacgacaagttcagcgccatgaagtacgagcagggcaccggctgctggcagggccccaacagaagcaccaccgtgagactgctgtgcggcaaggagaccatggtgaccagcaccaccgagcccagcagatgcgagtacctgatggagctgatgacccccgccgcctgccccgagcccccccccgaggcccccaccgaggacgaccacgacgagctgtag

SEQ ID NO: 320751 - DNA, 1004 bp, Artificial Sequence
  derived and/or modified sequence
tgcgcggcgcatgcgtggcccggggtctcggggcgttgctgggaaacatctgccgttggttgcggcgggcaccggccgacatggcggcagcggtggcggctgcgctggcgcggcttttggcggcctttctgctcctcgcggcccaggtggcctgtgagtacggcatggtgcacgtggtctcccaggccgggggccccgaaggcaaagactactgcatcctctacaacccgcagtgggcccatcttccgcacgacctcagcaaggcatctttcctgcagctgcgcaactggacggcctccctgctctgctccgcagccgacctccccgcccgtggcttcagcaaccagatcccgctggtggcgcgggggaactgcaccttctatgagaaagtgaggctggcccagggcagcggagcacgcgggctgctcatcgtcagcagggagaggctggtccccccggggggtaataagacgcagtatgatgagattggcattcccgtggccctgctcagctacaaagacatgctggacatcttcacgcgtttcggccgcacggtgagggcggcgctgtatgcgcctaaggagccggtgctggactacaacatggtcatcatcttcatcatggctgtgggcaccgtcgccatcggcggctactgggccgggagtcgggacgtgaagaaaaggtacatgaagcacaagcgcgacgatgggcccgagaagcaggaggacgaggcggtggacgtgacgccggtgatgacctgcgtgtttgtggtgatgtgctgctccatgctggtgctgctctactatttctacgatctcctcgtgtacgtggtcatcgggatcttctgcctggcctccgccaccggcctctacagctgcctggcgccctgtgtgcggcggctgccttcgggtaaaaagcgcccgcaggcccgtatgctgctcctggcgctcttctgcgtggccgtcagcgtggtgtggggcgtcttccgcaacgaggaccagtaa

SEQ ID NO: 320752 - DNA, 3811 bp, Artificial Sequence
  derived and/or modified sequence
tgcgcggcgcatgcgtggcccggggtctcggggcgttgctgggaaacatctgccgttggttgcggcgggcaccggccgacatggcggcagcggtggcggctgcgctggcgcggcttttggcggcctttctgctcctcgcggcccaggtggcctgtgagtacggcatggtgcacgtggtctcccaggccgggggccccgaaggcaaagactactgcatcctctacaacccgcagtgggcccatcttccgcacgacctcagcaaggcatctttcctgcagctgcgcaactggacggcctccctgctctgctccgcagccgacctccccgcccgtggcttcagcaaccagatcccgctggtggcgcgggggaactgcaccttctatgagaaagtgaggctggcccagggcagcggagcacgcgggctgctcatcgtcagcagggagaggctggtccccccggggggtaataagacgcagtatgatgagattggcattcccgtggccctgctcagctacaaagacatgctggacatcttcacgcgtttcggccgcacggtgagggcggcgctgtatgcgcctaaggagccggtgctggactacaacatggtcatcatcttcatcatggctgtgggcaccgtcgccatcggcggctactgggccgggagtcgggacgtgaagaaaaggtacatgaagcacaagcgcgacgatgggcccgagaagcaggaggacgaggcggtggacgtgacgccggtgatgacctgcgtgtttgtggtgatgtgctgctccatgctggtgctgctctactatttctacgatctcctcgtgtacgtggtcatcgggatcttctgcctggcctccgccaccggcctctacagctgcctggcgccctgtgtgcggcggctgttcggcaagtgcaggatccccaacaacagcctgccctacttccacaagcgcccgcaggcccgtatgctgctcctggcgctcttctgcgtggccgtcagcgtggtgtggggcgtcttccgcaacgaggaccagtgggcctgggtcctccaggatgccctgggcatcgccttctgcctctacatgctgaagaccatccgtctgcccaccttcaaggcctgcacgctgctgctgctggtgctgttcctctacgacatcttcttcgtgttcatcacgcccttcctgaccaagagtgggagcagcatcatggtggaggtggccactgggccctcggactcagccacccgtgagaagctgcccatggtcctgaaggtgcccaggctgaactcctcacctctggccctgtgtgaccggcccttctccctcctgggtttcggagacattttggtgccagggctgctggtggcctactgccacaggtttgacatccaggtacagtcctccagggtatacttcgtggcctgcaccatcgcctatggcgttggcctccttgtgacattcgtggcactggccctgatgcagcgtggccagcccgctctcctctacctggtgccctgcacgctggtgacgagctgcgctgtggcgctctggcgccgggagctgggcgtgttctggacgggcagcggctttgcggtgaataccagtttgctctgactgtgagaaatactcgcctagtgagccctaactagagttaaaaaagtcctacctccatctccgtgggccccagcaccagccgacggcccgcagcctcccaaagactctgccacgccactctccccgcagccgcccagcgaagaaccagccacatccccctggcctgctgagcagtccccaaaatcacgcacgtccgaggagatgggggctggagcccccatgcgggagcctgggagcccagctgaatccgagggccgggaccaggcccagccgtccccggtaacccagcctggcgcctcggcctaggggaggggtgagacgctcgctgccgtgcccgccacaccaagatgttggggctgcctggcgcccactggagacagacagacagacgcctgtcccccgggaccgaggcctgtgccgtccccacccgccccaacatggtgctcatccttgccgagacccctgcggtctgtgcccgcgcccagcccagctgccccggctgcacgcctgctgctcccagctcgcccggctgccacaagctctctgcgggtccatcctccccaccggggtccgtcctcgcaggccctgcccggcctctctgcagaccctcaagcgtcgtctgcatgagtgagcaggcgtgggtggactctggccgcggccacacttggtgctcaccagctgcttcggccttcaggtgacctccctccccacggcatcctgctctccgggtggaagagcagctttctgtctcccagaaggcatcgcttttccctcttgagcagatcggagcccctgggaggtttggaagctgcctccaagcctaggacacggaccagtggccggggcggcctctggcccctgacgctggctgagacaggcccgtggggcggggttttggggcgtgaacaaggctggcagtaagtggacaagctgctcccctggctaaggccctgccctgccctcagccagaggtgcctggccatgcctgcacactcctccccattttaataaatggtcgcaacttctagaagtcctgctggtgccacctggtggggtggacgtctctcagactgcccttctgacaagcaggggtgggcgccaggcaggctgggtcaggccctcaggggtccctggagccctgggagggagggactgggtcgtgggaggtcctggtagctcccggcacccaacctcgcttcccgtgtgggccccgtgttgcttttctgctgagaggggcttgggcctcggttctccctgtggcagcggcattggtgcctgggttcttaaccctctggacccagcagctaggagcttctggaacccacgaggacatctgccactggcatggtctactcactgatggggtcctcctgactccagggcagagacgtccgtgcgggaactgaccgaggcgtggccccaggccccggcatcctcccctcgctgcacgtggtcacttccgaagcagcgctccctgtggccgcagagacagagcccgcaccctggctgtctgtggtgcctgggccccagctcccgcccgccacccgccctgttgagtgcggcctccagactcgagtccagaatctgtttctgtcaagtcagtcgtccccagctgcacacggggactgctgagcgctgcgctctcacgggtctgttccggacagagggtggcaggggtgagccctgatcccttacaaaaaataccagcttcccagggagtaatggcgccttcactgaagccattttgtacatggggacggggtggggacgtctcttttttggtgttggacgtttgaccagtggggaggggttcagaggcggcggtcctgtccttggctccgtctgtccgtgtggccttgctgccattccgtctgatcattaaacacagcttttgatacatatggcccggcctctgcctccgcagtgcacggcttggggcatctgctctgtgcaggtcccggtgagcagaactgagagctggcaggccgcctggctgtcctgcagaggacggattggaattgccaccgcagggccggccagtgctgtgaggtgcccagcgtcactcccatgggctctgtgggccatgtggtccctgtcacgcttctcagctctgccactgttgctggaaagcatcacagaccatgtgtaaaatgggccaaaataccttttacaaaattaaaatagagatggggtcttgc

SEQ ID NO: 320753 - DNA, 279 bp, Artificial Sequence
  derived and/or modified sequence
atgtcatgccaacagaatcagaagcagtgccagccaccaccaaaatgtccttccccaaagtgcccacctaaaaatcccgtgcagtgcctacccccggccagtagtgggtgcgcaccatcttccggcggttgcggtccatcctcagaggggggatgtttcctaaaccatcataggcggcaccaccggtgccggcggcagagatcgaattcatgcgatcgcggaagcggacaacagggaggcggcagcggatgctgtcatggctcgggcgggtgctgctag

SEQ ID NO: 320754 - protein, 337 aa, Artificial Sequence
  derived and/or modified sequence
MLPSSTRLGYDPYNPELPKPPAQRENGTLGLGEEPRPDVLELELVNQAIEAVRSEVELEQRRYRELLETTREHRSAEAPALAPRGPNASPTVGPDEDAFPLAFDYSPGSHGLLSPDAGYQPTPLAAPAEPGSKYSLASLDRGQGRGGGGGGALEYVPKAVSQPRRHSRPVPSGKYVVDNSRPPTDLEYDPLSNYSARHLSRASSRDERAAKRPRGSRGSEPYTPAPKKLCDPFGSCDARFSDSEDEAATVPGNEPTTASTPKARADPEIKATGQPPSKEGLEAEGGGLRETKETAVQCDVGDLQPPPAKPASPAQVQSSQDGGCPKEGKPKKKKTGA

SEQ ID NO: 320755 - DNA, 1014 bp, Artificial Sequence
  derived and/or modified sequence
atgttaccatccagtactcggttgggatatgatccctataaccccgagctgccaaaaccgcctgcccaaagggagaacgggaccctggggttgggggaggagcctcggcccgatgtgctcgagttagaactggtcaatcaagcgattgaagctgtcagatccgaggtggagcttgagcagcgaaggtacagggagctgctcgagacaactcgtgaacaccgctccgccgaggccccagcactcgcccccagaggcccaaacgcaagtcctacggtgggccctgacgaagatgcctttcccctcgctttcgattactccccaggctcccacgggctgctgtcccctgatgctggctaccaaccaacgccactagctgcaccggcggaaccggggagcaaatactctttggcttctctggatagaggacagggccgggggggtggcggggggggtgctctggaatatgtgcctaaagccgtgagtcaaccgcgccgacatagtcgccctgttccaagtgggaaatatgtcgtcgacaacagccgacctccaactgatttggagtacgacccgctctctaactactcagcgaggcatctttctagagcgagcagccgtgatgaacgcgctgccaagcgtccgcgtggttcccgcggatctgagccttacaccccagcccccaagaagctctgtgatccgttcgggagctgcgacgcacgctttagcgactcagaagatgaggctgcaactgtcccaggaaatgagcctacaacggcgtcaacaccaaaggcccgggccgacccggaaattaaggccacggggcagccccctagcaaggagggcctagaggccgaggggggaggcctgcgtgagacaaaagaaacagccgtccaatgtgacgtgggcgacctgcagccaccccctgctaaaccagcttcaccagcacaggtgcagtcgtcccaggacgggggctgtccaaaggagggtaagccaaagaaaaagaagaccggagcatag

SEQ ID NO: 320756 - DNA, 1014 bp, Artificial Sequence
  derived and/or modified sequence
atgctgcccagcagcacccggctgggctatgacccctacaaccctgagctgcccaagcccccagcccagagagaaaatggcaccctgggcctgggggaggagcccaggccagatgtgctggagctggagctggtgaaccaggccattgaagctgtgcgctctgaggtggagctggagcagaggcgctaccgggagctgctggagaccacccgggagcacaggtctgctgaggccccagccctggccccccggggccccaatgccagccccaccgtgggcccagatgaagatgccttccccctggcctttgactacagccctggcagccacggcctgctgagcccagatgctggctaccagcccacccccctggccgccccagctgagcccggcagcaagtacagcctggccagcctggaccggggccagggccggggcggcggcggcggcggggccctggagtatgtgcccaaggctgtgtcccagccccggcggcacagcaggcctgtgcccagcggcaagtatgtggtggacaacagccggcccccaacagacctggagtatgaccccctgagcaactacagcgcccggcacctgagccgggccagcagcagagatgaaagagctgccaagaggccccggggcagccggggcagcgagccctacaccccagcccccaagaagctgtgtgaccccttcggcagctgtgatgcccgcttcagtgacagtgaagatgaagctgccaccgtgcctggaaatgagcccaccacagccagcacccccaaggcccgggctgaccctgagatcaaggccaccggccagccccccagcaaggagggcctggaggccgagggcggcggcctgcgggagaccaaggagacagctgtgcagtgtgatgtgggggacctgcagcccccaccagccaagccagccagccctgcccaggtgcagagcagccaggacggcggctgccccaaggagggcaagcccaagaagaagaagacaggagcctag

SEQ ID NO: 320757 - DNA, 1014 bp, Artificial Sequence
  derived and/or modified sequence
atgctgcccagcagcacccggctgggctacgacccctacaaccccgaactgcctaagccacccgctcagcgagaaaatggcacacttggactgggggaggaaccaaggcccgacgtgctggaactggaacttgtgaaccaggcaatcgaggctgtacgatcagaagtcgagcttgagcaaagacggtatcgagaattacttgagactactcgcgaacaccggagtgccgaggcgccagctctggccccccggggcccaaatgctagtcctactgtcggccctgatgaagatgcctttcctctggcattcgactattcccccgggagccatggactcctgagtccagacgcgggttatcagcctacgcctctcgcagctcctgccgagcctggatcgaaatactcgttggctagcctcgatcgcggacagggccgaggaggcggcggaggcggcgccctggaatatgtaccaaaagcagtctcccagccacgtagacatagccgccccgttcctagcgggaaatacgttgtcgataactctaggcctcctacagatttagagtacgacccactttctaattacagcgccagacacctatctagggcatccagtcgagatgagcgtgcagccaagcgtccccgaggttcgcgcggtagtgagccttacactcctgctcccaagaaactctgcgacccgttcggcagctgcgatgcacggtttagcgactccgaggatgaggccgccaccgtccctggcaacgaacccactaccgcatccacgcctaaagcaagagctgatcctgaaatcaaagcaacaggtcaacctccatctaaagaggggctcgaagccgaaggagggggtctgcgggagaccaaggagaccgctgttcaatgtgacgtaggagacctgcagccaccacccgccaaaccggccagtcctgcacaggttcagtcttcacaggatggtggatgccccaaggaaggtaagcctaagaagaaaaagaccggggcctag

SEQ ID NO: 320758 - DNA, 1014 bp, Artificial Sequence
  derived and/or modified sequence
atgctgccctcgtccacaagactggggtatgatccctacaacccggaattaccgaagccgccagctcagcgagagaatggcaccctgggcctgggggaagaacccaggcctgatgtactggaattggaattagtgaatcaggctatcgaggcagtgcggtctgaagttgaattggagcagcgccgatacagagagctgttagaaacaaccagggaacaccgtagtgcggaggcccctgctctggccccacggggacctaacgcttcaccaaccgtcggtccagatgaggatgctttcccactggcgttcgattattcgcccggatcccatggacttttaagccctgatgccggttatcagccgactcccctcgctgctccggctgagcctgggagcaaatatagcctcgctagcctggataggggacaaggccgaggaggaggaggagggggtgcgttagagtatgttcccaaagccgtctcccagcctagaaggcacagcaggcccgtcccctcaggaaagtatgtcgtagataacagtcgcccacccacggatctggagtatgaccccctatcaaattatagtgccaggcacctcagtagggcctcaagtagagacgagagagcagccaagcgcccaagaggtagtcgcggtagtgaaccgtatacacctgcccctaagaagctgtgtgacccttttggttcatgcgatgctaggttcagcgatagcgaagatgaggcagctaccgtacctggtaatgaacccaccaccgcctctacccctaaggccagagcagaccccgaaatcaaagccactggccaacccccaagtaaggagggactggaggctgagggcggaggtctccgggaaacaaaagaaaccgccgtgcagtgtgatgttggcgaccttcaacccccacctgcaaaacctgcctctccagcccaggtccagagctcacaggacggcggatgcccaaaggagggtaagccaaaaaagaagaagacaggagcttag

SEQ ID NO: 320759 - DNA, 1014 bp, Artificial Sequence
  derived and/or modified sequence
atgctgcccagcagcaccagactgggctacgacccctacaaccccgagctgcccaagccccccgcccagagagagaacggcaccctgggcctgggcgaggagcccagacccgacgtgctggagctggagctggtgaaccaggccatcgaggccgtgagaagcgaggtggagctggagcagagaagatacagagagctgctggagaccaccagagagcacagaagcgccgaggcccccgccctggcccccagaggccccaacgccagccccaccgtgggccccgacgaggacgccttccccctggccttcgactacagccccggcagccacggcctgctgagccccgacgccggctaccagcccacccccctggccgcccccgccgagcccggcagcaagtacagcctggccagcctggacagaggccagggcagaggcggcggcggcggcggcgccctggagtacgtgcccaaggccgtgagccagcccagaagacacagcagacccgtgcccagcggcaagtacgtggtggacaacagcagaccccccaccgacctggagtacgaccccctgagcaactacagcgccagacacctgagcagagccagcagcagagacgagagagccgccaagagacccagaggcagcagaggcagcgagccctacacccccgcccccaagaagctgtgcgaccccttcggcagctgcgacgccagattcagcgacagcgaggacgaggccgccaccgtgcccggcaacgagcccaccaccgccagcacccccaaggccagagccgaccccgagatcaaggccaccggccagccccccagcaaggagggcctggaggccgagggcggcggcctgagagagaccaaggagaccgccgtgcagtgcgacgtgggcgacctgcagcccccccccgccaagcccgccagccccgcccaggtgcagagcagccaggacggcggctgccccaaggagggcaagcccaagaagaagaagaccggcgcctag

SEQ ID NO: 320760 - DNA, 183 bp, Artificial Sequence
  derived and/or modified sequence
atggccctgccttgtggcatgggtacagcttggtacctggattccaccgagaacgcccttactgtgaacgtgccacgcgctcagaatcacaaggccagtcacaatagcatgtggaagctcggctctcatttttactgcatcctcctggtgactaaggaccccccgggcttcacgatggtgtag

SEQ ID NO: 320761 - protein, 1560 aa, Artificial Sequence
  derived and/or modified sequence
RSARGLSVRDRGAIPLQGGDRRSLPSMAPTWGPGMVSVVGPMGLLVVLLVGGCAAEEPPRFIKEPKDQIGVSGGVASFVCQATGDPKPRVTWNKKGKKVNSQRFETIEFDESAGAVLRIQPLRTPRDENVYECVAQNSVGEITVHAKLTVLREDQLPSGFPNIDMGPQLKVVERTRTATMLCAASGNPDPEITWFKDFLPVDPSASNGRIKQLRSGALQIESSEETDQGKYECVATNSAGVRYSSPANLYVRVRRVAPRFSILPMSHEIMPGGNVNITCVAVGSPMPYVKWMQGAEDLTPEDDMPVGRNVLELTDVKDSANYTCVAMSSLGVIEAVAQITVKSLPKAPGTPMVTENTATSITITWDSGNPDPVSYYVIEYKSKSQDGPYQIKEDITTTRYSIGGLSPNSEYEIWVSAVNSIGQGPPSESVVTRTGEQAPASAPRNVQARMLSATTMIVQWEEPVEPNGLIRGYRVYYTMEPEHPVGNWQKHNVDDSLLTTVGSLLEDETYTVRVLAFTSVGDGPLSDPIQVKTQQGVPGQPMNLRAEARSETSITLSWSPPRQESIIKYELLFREGDHGREVGRTFDPTTSYVVEDLKPNTEYAFRLAARSPQGLGAFTPVVRQRTLQSISPKNFKVKMIMKTSVLLSWEFPDNYNSPTPYKIQYNGLTLDVDGRTTKKLITHLKPHTFYNFVLTNRGSSLGGLQQTVTAWTAFNLLNGKPSVAPKPDADGFIMVYLPDGQSPVPVQSYFIVMVPLRKSRGGQFLTPLGSPEDMDLEELIQDISRLQRRSLRHSRQLEVPRPYIAARFSVLPPTFHPGDQKQYGGFDNRGLEPGHRYVLFVLAVLQKSEPTFAASPFSDPFQLDNPDPQPIVDGEEGLIWVIGPVLAVVFIICIVIAILLYKNKPDSKRKDSEPRTKCLLNNADLAPHHPKDPVEMRRINFQTPDSGLRSPLREPGFHFESMLSHPPIPIADMAEHTERLKANDSLKLSQEYESIDPGQQFTWEHSNLEVNKPKNRYANVIAYDHSRVILQPIEGIMGSDYINANYVDGYRCQNAYIATQGPLPETFGDFWRMVWEQRSATIVMMTRLEEKSRIKCDQYWPNRGTETYGFIQVTLLDTIELATFCVRTFSLHKNGSSEKREVRQFQFTAWPDHGVPEYPTPFLAFLRRVKTCNPPDAGPIVVHCSAGVGRTGCFIVIDAMLERIKPEKTVDVYGHVTLMRSQRNYMVQTEDQYSFIHEALLEAVGCGNTEVPARSLYAYIQKLAQVEPGEHVTGMELEFKRLANSKAHTSRFISANLPCNKFKNRLVNIMPYESTRVCLQPIRGVEGSDYINASFIDGYRQQKAYIATQGPLAETTEDFWRMLWENNSTIVVMLTKLREMGREKCHQYWPAERSARYQYFVVDPMAEYNMPQYILREFKVTDARDGQSRTVRQFQFTDWPEQGVPKSGEGFIDFIGQVHKTKEQFGQDGPISVHCSAGVGRTGVFITLSIVLERMRYEGVVDIFQTVKMLRTQRPAMVQTETESRPGWSAVAQSRLTASSASWIHAILLPQPPEWLGLQV

SEQ ID NO: 320762 - DNA, 4683 bp, Artificial Sequence
  derived and/or modified sequence
cgtagcgccagaggcctgagcgtcagggaccgcggagcaattccactgcagggcggcgatcgtagatccctcccatccatggctcctacctggggtccaggaatggttagcgttgtcggtccaatgggactgttggtggtgctgctagttggcggttgcgctgccgaagagccccctcgcttcataaaggagcccaaggatcagattggagtatcaggaggcgtggcaagttttgtgtgccaggcgacaggcgatcctaagccacgcgttacatggaataaaaaaggaaagaaggtgaattcacagagatttgaaacaattgagtttgatgaaagcgccggcgcagtgcttcggatccagcccctcaggactccccgtgacgaaaacgtctacgagtgtgtagcccagaactctgtgggagagatcaccgtccacgcaaagttgactgtgttacgcgaggatcaactcccgtctggatttcccaacattgacatgggaccccaactgaaagtcgtcgaaaggacacgaacagctaccatgctgtgtgcagcttccggtaacccggaccccgagatcacatggttcaaagactttctgccggttgatccaagtgcctctaatggaaggatcaaacaattgcggtctggcgccctgcaaatcgagtcgtcagaagaaaccgatcagggtaagtatgaatgcgtggcgaccaactctgccggagtgcgatattcctctcccgcaaacctgtacgtgcgggtgcggagggttgccccaagattttctattttgcccatgagtcatgagattatgccagggggcaacgttaatatcacatgcgtcgctgtaggcagtcccatgccttatgtgaagtggatgcagggagccgaagatctgaccccagaagatgatatgcctgtgggaagaaatgtgttagagctgactgatgtcaaggattccgccaattacacctgtgtggctatgagcagtctgggggtaatcgaggctgtcgcacagattaccgttaagagcctgcctaaggcaccaggcacacctatggttaccgaaaacaccgccaccagcattactattacatgggattctgggaaccccgatcctgtgtcgtactacgttattgaatataaatcaaaatcacaagatgggccctatcaaatcaaggaagatatcactaccactagatacagcatcggcgggctcagcccaaactctgaatacgagatctgggtctccgccgtcaacagcattggccaaggcccacccagcgaatccgtagttacaaggaccggggaacaggcccccgcttccgcaccccgcaatgttcaggcccgaatgctgtctgccactacaatgatcgttcagtgggaggagccggtcgaaccaaatggtctgattcgggggtatcgagtctattacacaatggaaccagaacaccctgtggggaactggcagaagcacaacgtcgacgacagccttctcacgaccgtcggatctctgcttgaagacgaaacatacaccgtgcgggttctggctttcactagcgtcggcgacggcccactttcagaccctatccaagtaaaaacacaacaaggggtgcctgggcagcctatgaacctgagagccgaagccaggtctgaaaccagtatcacattgtcttggagccctcctcggcaggaatctatcattaagtacgaactgcttttcagagagggtgatcacggtcgcgaggtgggccgcactttcgacccgaccacttcttatgtggttgaagacctgaagccaaacacagagtatgccttccgtctggccgctcgcagccctcagggactgggggccttcaccccggtggtgaggcagagaaccctgcagagcatctcccctaagaactttaaagtcaagatgataatgaaaacttcagtcctactttcctgggagttcccagacaactacaattctccgaccccctacaagattcagtacaacggtctgaccctcgatgtcgacgggcggacaactaagaaacttattacgcatctgaagccacatactttttataacttcgtgctgactaacaggggcagctccctaggcgggctgcagcaaaccgtcaccgcctggacagcattcaatttactcaatggtaaacctagcgttgctccgaagcctgacgcagatggattcattatggtttatcttccagacggccaatcgcctgtgccagtccagtcctactttatcgtgatggtgcctctacgcaaaagcagaggcggccagttcctcacccccttggggtcccctgaggacatggacttagaggaattgatccaagatatctctcgactgcagcgccgaagcctaaggcattctcgacaactggaggtgccccggccatacatcgcggcgaggttttcagtgttaccccccaccttccaccccggagaccagaaacagtacggagggttcgacaaccggggtctcgagcctggtcacaggtacgtgttattcgtgctggctgtgctgcagaagagcgagccaactttcgccgcctccccttttagcgatccattccagctggacaacccggaccctcagcccattgtggatggtgaggaaggacttatttgggtgatcgggccagtgctggctgtagtcttcatcatctgtatcgtgattgctattcttctgtacaagaataaaccagattccaaacgcaaggattcagagccaaggacaaaatgcctgttgaataacgctgatctggctccccaccatccgaaagatcccgtggaaatgcgaaggattaattttcagacgcccgactctggattgagatcaccccttcgtgagcctgggttccattttgagagcatgctgtcccatcctcctatcccaattgctgatatggcggaacacactgaaaggctgaaggcgaacgactctcttaagctgtcacaggagtacgaatccatcgatcccggacagcagtttacatgggagcatagcaatttagaggtgaacaagccaaagaaccggtacgccaacgttattgcctatgaccacagccgcgtgatcttgcaaccaatcgagggtatcatggggagtgactacattaatgccaactatgtggacggatatagatgccagaatgcctatattgctactcagggtccgctgcccgaaacctttggtgatttctggcgtatggtctgggaacagaggtcggccaccattgttatgatgaccaggcttgaggaaaaaagcaggatcaagtgcgaccagtactggcccaatcggggcactgagacatacggatttatccaggttacactgcttgacactatcgagctagccacgttctgcgttcggacttttagcctccataagaatggttcttccgaaaagagggaagtgcgtcagttccaattcacggcttggccggaccatggtgttccagagtatccaaccccctttctggcttttctgcgacgtgtcaaaacctgcaaccccccggatgccggccctattgtggtgcactgcagtgctggagtgggccggaccggatgcttcatcgtgatagatgctatgctagaaagaattaaacccgagaagacggtcgatgtgtatgggcatgtcaccctcatgcgaagtcagcgaaactacatggtccagaccgaagaccagtacagcttcatccacgaagccctcctagaggccgtgggctgcggaaacacagaagtccccgcgaggtctttgtacgcgtatatccagaaattagcacaggtcgagccgggggaacacgttacaggtatggagctggagttcaagcgcctggctaactcgaaggctcatacatcacgattcatcagtgctaacctgccctgtaacaaattcaagaaccggctagttaacattatgccgtacgagagcacccgagtgtgcctccagcccatacggggcgtggaaggcagtgactatattaatgcgagcttcatcgatggctacagacaacaaaaagcatacatcgccacccagggaccacttgcagagacaacagaagatttctggcgtatgctgtgggaaaacaattccactattgtggtgatgctcactaaactccgggagatgggccgcgaaaagtgtcatcaatattggccagccgagaggagtgccaggtatcagtacttcgtggtggatcctatggccgagtataacatgcctcagtacattctaagggaatttaaagtcacagacgcgcgagatggccagtccagaaccgttcggcagttccagttcaccgactggccagagcagggggtacctaagtccggggagggctttattgatttcataggccaggtgcacaaaaccaaggaacagtttggccaggacggaccgatcagcgtgcactgttcagctggggtagggcgcacaggagtattcataacactgtctatcgtgcttgagcgtatgcgatacgaaggtgtggtcgacatctttcagactgtcaagatgctgagaacccagagacctgccatggttcagacagagactgaaagccgaccaggctggtcagctgtcgcccagagtcgcctgacggccagctctgcttcatggattcatgccatcctgctgcctcaaccgcccgaatggttaggcctccaggtctag

SEQ ID NO: 320763 - DNA, 4683 bp, Artificial Sequence
  derived and/or modified sequence
cgcagcgcccggggcctgtctgtgcgggacagaggagccatccccctgcagggcggggacagaagaagcctgcccagcatggcccccacctggggccctggcatggtgtctgtggtgggccccatgggcctgctggtggtgctgctggtgggcggctgtgccgctgaggagcccccacgcttcatcaaggagcccaaggaccagattggagtgtctgggggcgtggccagctttgtgtgccaggccactggagaccccaagccccgggtgacctggaacaagaagggcaagaaggtgaacagccagagatttgagaccattgaatttgatgagagcgctggagctgtgctgcgcatccagcccctgcggaccccaagagatgaaaatgtgtatgaatgtgtggcccagaacagcgtgggggagatcaccgtgcacgccaagctgactgtgctgcgggaggaccagctgcccagcggcttccccaacatcgacatgggcccccagctgaaggtggtggagaggaccaggacagccaccatgctgtgtgccgccagcggcaacccagaccctgagatcacctggttcaaggacttcctgcctgtggaccccagcgccagcaatggccgcatcaagcagctgcggagcggggccctgcagatcgagagcagcgaggagacagaccagggcaagtatgaatgtgtggccaccaacagcgctggggtgcgctacagcagccctgccaacctgtatgtgcgggtgcggcgggtggccccccgcttcagcatcctgcccatgagccatgagatcatgcctggaggaaatgtgaacatcacctgtgtggccgtgggcagccccatgccctacgtgaagtggatgcagggcgctgaggacctgaccccagaagatgacatgcctgtgggcagaaatgtgctggagctgacagatgtgaaggacagcgccaactacacctgtgtggccatgagcagcctgggcgtgattgaagctgtggcccagatcaccgtgaagagcctgcccaaggcccctggcacccccatggtgacagaaaatacagccaccagcatcaccatcacctgggacagcggcaacccagaccctgtgtcctactacgtgattgagtacaagagcaagagccaggacggcccctaccagatcaaggaggacatcaccaccacccgctacagcatcggcggcctgagccccaacagtgaatatgagatctgggtgtctgctgtgaacagcatcggccagggccccccatctgagagcgtggtgaccaggactggagagcaggccccagccagcgcccccagaaatgtgcaggccaggatgctgagcgccaccaccatgattgtgcagtgggaggagcctgtggagcccaacggcctcatccggggctacagagtgtactacaccatggagcctgagcaccctgtgggcaactggcagaagcacaacgtggatgacagcctgctgaccaccgtgggcagcctgctggaggatgagacctacacagtgcgggtgctggccttcacctctgtgggagatggccccctgagtgaccccatccaggtgaagacccagcagggcgtgcccggccagcccatgaacctgcgggcagaggcccggtctgagaccagcatcaccctgtcctggagccccccccggcaggagagcatcatcaagtatgagctgctcttccgggagggggaccacggccgggaggtgggccgcacctttgaccccaccaccagctatgtggtggaggacctgaagcccaacacagaatatgccttccggctggccgcccggagcccccagggcctgggcgccttcacccctgtggtgcggcagaggaccctgcagagcatcagccccaagaacttcaaggtgaagatgatcatgaagacctctgtgctgctgtcctgggagttcccagacaactacaacagccccaccccctacaagatccagtacaacggcctgaccctggatgtggatggccgcaccaccaagaagctgatcacccacctgaagccccacaccttctacaactttgtgctgaccaacagaggcagcagcctgggcggcctgcagcagacagtgacagcctggacagccttcaacctgctgaatggcaagcccagcgtggcccccaagccagatgctgatggcttcatcatggtgtacctgcctgatggccagagccctgtgcctgtgcagagctacttcatcgtgatggtgcccctgaggaagagcagaggaggccagttcctgacccccctgggcagccctgaggacatggacctggaggagctgatccaggacatcagccggctgcagaggaggagcctgcggcacagccggcagctggaggtgccccggccctacatcgccgcccgcttctctgtgctgccccccaccttccaccctggggaccagaagcagtatggaggctttgacaacagaggcctggagcccggccacagatatgtgctgtttgtgctggccgtgctgcagaagtctgagcccacctttgctgccagccccttcagtgaccccttccagctggacaacccagacccccagcccatcgtggatggagaggagggcctcatctgggtgattggccctgtgctggccgtggtgttcatcatctgcatcgtcatcgccatcctgctgtacaagaacaagccagacagcaagaggaaggacagcgagcccaggaccaagtgcctgctgaacaatgctgacctggccccccaccaccccaaggaccctgtggagatgaggcgcatcaacttccagaccccagacagcggcctgcggagccccctgcgggagcccggcttccactttgagagcatgctgagccacccccccatccccatcgctgacatggccgagcacacagagcggctgaaggccaatgacagcctgaagctgagccaggagtatgagagcattgatcctggccagcagttcacctgggagcacagcaacctggaggtgaacaagcccaagaacagatatgccaacgtgattgcctatgaccacagcagggtcatcctgcagcccatcgagggcatcatgggcagtgactacatcaatgccaactacgtggatggctaccgctgccagaatgcctacatcgccacccagggccccctgcctgagacctttggagacttctggaggatggtgtgggagcagaggtctgccaccatcgtgatgatgacccggctggaggagaagagccgcatcaagtgtgaccagtactggcccaacagaggaacagagacctacggcttcatccaggtgaccctgctggacaccatcgagctggccaccttctgtgtgaggaccttcagcctgcacaagaatggcagcagcgagaagcgggaggtgcggcagttccagttcaccgcctggccagaccatggagtgcctgagtaccccacccccttcctggccttcctgcggcgggtgaagacctgcaaccccccagatgctggccccatcgtggtgcactgcagcgctggggtgggccgcacaggctgcttcatcgtgattgatgccatgctggagcgcatcaagccagagaagacagtggatgtgtatggccacgtgaccctgatgaggagccagaggaactacatggtgcagacagaggaccagtacagcttcatccacgaggccctgctggaggccgtgggctgcggcaacacagaggtgcctgcccggagcctgtatgcctacatccagaagctggcccaggtggagcccggggagcacgtgacaggcatggagctggagttcaagaggctggccaacagcaaggcccacaccagccgcttcatcagcgccaacctgccctgcaacaagttcaagaaccggctggtgaacatcatgccctatgagagcaccagggtgtgcctgcagcccatccggggcgtggagggcagtgactacatcaatgccagcttcattgatggctaccggcagcagaaggcctacatcgccacccagggccccctggccgagaccacagaggacttctggaggatgctgtgggagaacaacagcaccatcgtggtgatgctgaccaagctgcgggagatgggccgggagaagtgccaccagtactggccagctgagaggtctgcccgctaccagtactttgtggtggaccccatggccgagtacaacatgccccagtacatcctgcgggagttcaaggtgacagatgccagagatggccagagcaggacagtgcggcagttccagttcacagactggccagagcagggcgtgcccaagtctggagagggcttcatcgacttcatcggccaggtgcacaagaccaaggagcagtttggccaggacggccccatctctgtgcactgcagcgctggggtgggccgcactggagtcttcatcaccctgagcatcgtgctggagaggatgagatatgaaggagtggtggacatcttccagacagtgaagatgctgcggacccagaggcctgccatggtgcagacagaaacagagagccggcccggctggagcgctgtggcccagagccggctgacagccagcagcgcctcctggattcatgccatcctgctgccccagcccccagagtggctgggcctgcaggtgtag

SEQ ID NO: 320764 - DNA, 4683 bp, Artificial Sequence
  derived and/or modified sequence
cggagcgcccggggcctgagcgtgcgggaccggggcgccatccccttgcaagggggggaccgaagatcccttcccagtatggccccgacctggggtccgggtatggtgagtgtggtaggtcccatgggtctgttggtggtgcttcttgtcggcgggtgcgctgcggaagagcccccgaggtttattaaggagccgaaggaccagataggggtgtcgggaggagtcgcttcttttgtgtgccaagccacaggcgaccctaagccccgagtgacctggaataagaaggggaaaaaggtcaatagccagagattcgagaccatcgaatttgatgagtctgcaggagctgtcctccgcattcagcctcttcgcacgccccgagacgagaacgtttatgagtgcgtcgcacaaaactccgtcggtgaaataactgtccacgccaagctcacagtcctcagagaagaccagctcccaagcgggtttccaaatattgatatgggcccccagctgaaggtcgtcgaacgtacgcgaaccgctacaatgctgtgcgctgcctcaggcaatccggatccagaaatcacctggtttaaagattttctccctgttgatccatctgcttctaatggccgaattaaacagcttcggagcggagctttgcagatcgagagctccgaggaaaccgatcagggaaaatatgaatgtgtcgccacaaattctgcgggcgttaggtattctagccctgcaaatctgtacgtgcgcgtgcgacgtgtagcgccaagatttagcatcctacccatgtctcacgagatcatgcccggcgggaacgtcaacattacctgcgtggcggtcgggtccccgatgccctacgtaaaatggatgcaaggggctgaagatctaacacctgaggatgatatgccagtcggccgtaatgttcttgaactgaccgacgtcaaagatagtgccaattatacttgcgtggccatgagctcactcggcgtcatcgaggccgtcgctcagattacggtgaagagcttaccaaaggctcctggtacacctatggtgacagaaaacaccgctacttcaatcaccataacttgggacagcggcaaccctgatcccgtgagttactatgtcattgagtacaagagcaagtctcaggatggaccttaccagattaaggaggacattaccaccacacgatattcaataggcgggctttctcccaactccgagtacgagatatgggtgtctgccgtgaactccattggccaggggcctccatctgaaagtgttgttactaggaccggagagcaggcgccagcctctgcccccaggaacgtgcaggcgagaatgctgagtgctacaacgatgattgttcaatgggaggagcccgtcgaacctaatggacttatcagagggtatagagtctattatactatggagccagagcacccagtgggcaactggcagaagcataatgttgatgatagcctacttaccacagtggggtctctccttgaggacgagacatataccgtgagagttctggctttcacgtcagtaggcgatgggccattgtctgaccccatacaggtgaaaacacagcagggtgtccctggccagccaatgaacctccgggccgaagcaaggtccgaaaccagcattacactcagctggagccccccgagacaggaatctattatcaagtatgaactgctttttcgcgagggagaccacggtcgggaggtgggaaggacattcgatccaactaccagctatgtggttgaggacctcaagcccaacaccgaatatgccttcaggctcgcagcacgttcgccccagggcctgggcgcgttcacaccggtggtcagacaaagaaccctgcaatccatcagtcccaaaaactttaaagtcaaaatgatcatgaagaccagtgtgttactgagctgggaattccccgataattacaactctcctacaccgtataagattcagtacaacggcttaacactcgacgtagatggcaggaccactaaaaagctgattacacacctcaaacctcatactttctataactttgtactgactaatcggggctcctcactcggaggtctacaacagacagtgacagcgtggactgcttttaacctcttgaacggaaaacctagcgtggctccaaagccggacgctgatggattcataatggtgtaccttcccgatggacaaagcccagtccccgtacagtcatattttatagtgatggtgcctctcagaaagagcagagggggacaattccttaccccccttggtagtccggaggatatggatctcgaggaacttatccaggatatctcccgcctccagcgcaggagcctccgccactccaggcagctggaggtgccgcgaccttatatcgctgccagatttagtgtattgccaccaacttttcatcccggcgatcagaaacagtatgggggtttcgataacagggggctcgagccaggccatcggtatgtgttgttcgttctggccgtcctccaaaagtctgagcctactttcgcagcaagtcctttctctgatccattccagctggacaatcctgatccacagcccatcgttgatggcgaggaaggactcatctgggtcattgggcctgtgctggctgtggtcttcattatttgtattgttatagcgatattgttgtacaagaataaaccagattcgaaacgcaaagactctgaacctcggacaaagtgtctgctgaataatgcagatctggccccacaccacccaaaggacccagtcgaaatgagaagaatcaacttccaaactcccgatagcggcctgcggtcgccgctgagagagcccgggtttcatttcgagtccatgctcagtcacccccctatccctatcgctgatatggccgagcataccgaaagactcaaggctaacgatagcctcaaattgtcccaagaatacgagtctatagaccctggccagcagttcacctgggaacacagcaaccttgaggtaaacaagcccaagaatagatatgccaatgtcattgcttatgatcactctagggtgatcttgcagcctattgagggtatcatggggagcgattatattaatgcaaattatgttgacggatatcgttgtcagaatgcgtatatcgccacacaggggcctttacctgaaacgtttggcgatttttggcgcatggtctgggagcagcgctcagctaccattgtgatgatgaccagattggaagagaagtcacgaatcaaatgtgatcaatattggccaaaccgaggcacagagacctatgggtttatccaagtcaccctcctggacaccattgaactggcaacgttctgcgtgcggacattcagcctgcataaaaacggctccagcgagaagcgtgaggtacgccagtttcagtttacagcatggcctgatcacggagtacctgagtatcccacgccatttcttgcctttctgcgacgggtaaagacgtgtaatccaccggacgcagggcctatagtggttcactgctctgccggtgtgggtcgaactggctgttttatcgtaattgatgccatgctggagcgtatcaaacctgagaagaccgtcgatgtgtacggccatgtgactctgatgaggagtcagagaaattacatggtgcagacagaagaccagtattctttcatccatgaggccctacttgaagcagtcggatgcggcaataccgaagtccccgctcggtcgctctacgcctacattcagaagctggcccaggtggaacccggtgagcacgtcactggcatggaactggagtttaaacggctcgccaatagcaaagcccatacaagccgttttatttctgcgaatctaccttgcaataagttcaagaataggctggtcaatattatgccatatgagtccacccgggtgtgcctgcaacccataaggggcgttgagggcagcgattacatcaatgcaagtttcattgatggctatcgtcagcagaaagcttacatcgctacacagggtcctctggctgaaacgaccgaggacttctggaggatgctgtgggagaacaattccacaatagtggttatgctcacaaaattgcgcgagatgggcagggagaagtgccaccagtactggcccgctgaaagaagtgcgcgctatcagtactttgtggtggaccccatggccgagtataacatgcctcagtatatcttgagagagttcaaagtgaccgacgcacgggatggtcagtccaggactgtgagacagttccaattcacagattggcctgaacagggagtgcctaagagtggggagggatttatcgactttataggtcaagtacacaaaactaaagagcagtttggtcaggatgggcccatctcagtgcattgctcagcgggggtgggacgcaccggggtgtttatcaccctgtccatcgtgctggagaggatgcggtatgagggggtagtagacattttccagactgttaagatgctcagaacccagcgcccagcgatggtccagaccgaaaccgagtcaagaccaggctggagtgctgtggcccaatccagactgactgccagtagtgcatcttggattcacgccatcctacttccccaacctccagaatggctgggcctccaggtgtag

SEQ ID NO: 320765 - DNA, 4683 bp, Artificial Sequence
  derived and/or modified sequence
cgcagcgcgagaggcctgagtgtcagagaccgaggtgccatcccacttcaaggaggggacaggaggtccttaccttccatggctccaacatgggggcctggcatggtgtctgtggtgggaccaatgggcctgcttgttgttctccttgtgggtggttgtgcggcagaagagcctccacgctttattaaggagcccaaagatcagatcggcgtctcagggggtgtggcctcatttgtgtgtcaggctactggcgaccccaaaccaagggtaacctggaacaagaagggcaagaaggtgaattctcagcgttttgagaccatcgaatttgacgagtctgcaggggctgtgttgcgtatccagccacttagaaccccccgagatgaaaatgtttatgagtgtgtggcccagaattctgttggcgagataacagtgcacgctaaacttacggtactgagagaggatcagctccccagtgggttcccaaacattgacatgggtccccaactcaaagtggttgagcgcacgaggaccgcgacgatgttgtgtgctgccagtggaaatccggatccagaaattacctggttcaaagattttcttcctgtcgatccttctgcaagtaacggcagaattaagcagctccgctcaggggctctgcagattgagtcatccgaggagacagaccagggaaagtatgagtgcgtcgccacgaattccgccggtgtgaggtactccagccctgcaaatctgtatgtgagggtacgcagagtggccccaaggttctctattctccccatgtcacacgagatcatgcctggaggaaatgtcaatattacttgcgtagccgtagggagtccaatgccctatgtgaagtggatgcaaggtgcagaggatctcactccagaggatgatatgcctgtgggcagaaatgtgcttgagttgacggacgtgaaggatagcgccaattatacatgcgtggccatgagtagtctcggggtgatcgaggccgtggctcagatcactgtgaagtctttacctaaagccccaggaaccccaatggtgacagagaatacagccacatctattaccattacatgggactccggtaatcctgaccccgtctcttattacgttatagagtacaagagtaagtcgcaagacggaccttatcagataaaggaggatatcaccactacacggtactcgattgggggactcagccccaatagcgagtatgagatctgggtatcagccgtcaattccataggtcagggccctccgtcggaatccgtggtgacccgtactggggagcaagcccctgcttccgccccaagaaacgttcaggccaggatgctcagcgccacgacaatgatagtacagtgggaagaacccgttgaacccaatggcctgattagaggatatagggtgtactataccatggagcctgagcaccctgttgggaactggcaaaagcacaatgtcgacgactctctcctgacaacagtaggttcattactcgaggacgagacgtacacggttcgagtgctcgcctttaccagcgtgggcgatggcccattgagtgaccctatacaggtcaagacccagcagggtgttccaggccagccgatgaacctgagagctgaagctagaagtgagacgagtatcactttgtcctggtctccgcctcgccaagagtccatcattaaatacgagcttttgtttcgtgagggcgatcatggcagagaagtggggaggacttttgaccccactacaagctatgtggttgaggatctaaagccgaatactgagtatgcattccgtttggccgctcgtagccctcagggcctgggagcattcactccagtcgtgaggcagagaactctccaaagcatttccccaaagaatttcaaagtcaagatgatcatgaaaaccagcgtcctactgagctgggagttccctgacaactataactctcctacaccctacaagattcagtataacggcctcacactcgatgtagacgggagaactactaagaagttgattacccacttgaaacctcacaccttctataactttgtcctaactaataggggcagttcgctcggcggactgcagcagacagtgacagcatggaccgcctttaatctgctcaatggcaagccgtccgttgcacctaagccagatgctgacggctttatcatggtgtatttgccggacgggcagagccccgttccggtgcagagttacttcatcgtgatggttccactcaggaagagcaggggtggccagtttctgacgcccctcggaagcccagaagatatggatctggaggagctaatacaggacatctccaggctgcagaggcgctctttgcggcatagtcggcagttggaggtgccacgcccatacattgctgctaggttttcggtgctgccacccacatttcacccgggagatcaaaagcagtacgggggtttcgataaccgcggtctcgagcctgggcataggtacgtgctatttgtgctggctgtgttgcagaaaagcgagcccacgtttgctgccagccctttcagtgatccttttcaattggataaccctgatccacagcccatcgtagatggcgaggagggactaatctgggttatcggtccagtactggccgtcgttttcatcatctgtatcgtcatcgccattttactctataaaaacaaaccagactcaaagcggaaggacagcgagcctcggactaaatgcctgcttaataatgctgacctcgctcctcatcaccccaaggatccagtggagatgcgaaggatcaattttcaaacccctgacagcggattaaggagcccactaagagagcctggttttcactttgaaagtatgctcagccaccctccaattcccatcgccgatatggcagaacacacagagaggttgaaagcgaacgatagcctgaagctgagccaagagtacgaaagcattgacccaggccagcagttcacttgggagcactcaaatcttgaagtgaacaagcccaagaaccggtacgccaacgtgatcgcttacgaccacagcagagtaatcctccagcccattgagggaatcatgggcagtgactatattaacgctaattacgttgacggttaccgctgtcaaaatgcgtacattgccacacaaggacccctgccggagacctttggagacttttggaggatggtctgggagcagcgtagcgctaccatagttatgatgacgcggctggaagagaaaagtcggattaaatgcgatcagtattggccgaaccgtggtaccgaaacatatggttttattcaagtgactcttctggacacaattgagctagcaacattctgtgtgaggacgttttccttacacaagaatggctcatccgagaagcgcgaggtacgtcaatttcaatttaccgcatggccagatcatggagtccccgaatatcccacgcccttcctggcctttcttaggagagtgaagacctgcaatccgccagacgcaggtcccattgtggtacattgcagtgcaggtgtagggagaactggttgttttatagtcatcgacgctatgcttgaacgcattaaacccgagaaaaccgtagacgtgtatgggcatgttacactgatgcggagccaaaggaattatatggtacagactgaggatcaatactccttcatccacgaagcacttttggaggccgtgggatgtggaaatacagaggtgccagctcgatcactttacgcctacatccagaagttggcccaggtggagccgggtgagcacgtgaccgggatggaattagagtttaagaggttagccaatagtaaggcgcacacctctcgctttatcagcgctaatctgccatgcaataagtttaagaacaggctagtgaatatcatgccctatgagtcaaccagggtttgcctgcaacctattaggggcgtggagggtagtgactatattaatgcttcgttcatagatggctatcgccaacagaaggcttacattgcgactcaggggcctctggctgagacgactgaggatttctggagaatgctgtgggaaaataattcaacaatcgtggtgatgctcactaaactgagagaaatgggcagggagaagtgccaccagtactggcccgcagaaaggtctgccaggtaccagtactttgtcgtcgaccccatggccgagtacaacatgcctcaatacatcttaagggagtttaaagtcactgacgccagggacgggcagtcccgaaccgtgaggcaatttcagtttacagactggcctgagcagggtgtgccaaaatccggcgagggtttcatcgactttattggtcaggtgcataagactaaggagcagtttggccaggatggccctattagcgtacattgctcagccggagtgggcagaaccggcgtgttcatcaccctgtccattgtcctggagagaatgaggtacgagggggtcgtggatatttttcagacagtcaagatgctgaggacccagcgcccagccatggttcagaccgagaccgagtctaggccagggtggagtgcagtcgcccaaagccggctgaccgcctcgtctgcgtcctggatccatgctattctgctcccccagccccctgaatggttgggtcttcaggtgtag

SEQ ID NO: 320766 - DNA, 4836 bp, Artificial Sequence
  derived and/or modified sequence
cctcgcgccgcccgcccggcagcccggccggcgcgcgcacgccgcgagccgctggcgctcgggctccgctcggatcccatgcaacagccacgatgtgaagcggggcagagccgggggagcccagcccagccagcctccagacgttgccccatctgacgctcggctcgaggcctctctgtgagggaccggggggccatccccctccagggcggagatcggaggtcgctgccaagcatggcgcccacctggggccctggcatggtgtctgtggttggtcccatgggcctccttgtggtcctgctcgttggaggctgtgcagcagaagagccccccaggtttatcaaagaacccaaggaccagatcggcgtgtcggggggtgtggcctctttcgtgtgtcaggccacgggtgaccccaagccacgagtgacctggaacaagaagggcaagaaggtcaactctcagcgctttgagacgattgagtttgatgagagtgcaggggcagtgctgaggatccagccgctgaggacaccgcgggatgaaaacgtgtacgagtgtgtggcccagaactcggttggggagatcacagtccatgccaagcttactgtcctccgagaggaccagctgccctctggcttccccaacatcgacatgggcccacagttgaaggtggtggagcggacacggacagccaccatgctctgtgcagccagcggcaaccctgaccctgagatcacctggttcaaggacttcctgcctgtggatcctagtgccagcaatggacgcatcaaacagctgcgatcaggagccctgcagattgaaagcagtgaggaaaccgaccagggcaaatatgagtgtgtggccaccaacagcgccggcgtgcgctactcctcacctgccaacctctacgtgcgagtccgccgcgtggccccgcgcttctccatcctgcccatgagccacgagatcatgccagggggcaacgtgaacatcacctgcgtggccgtgggctcgcccatgccatacgtgaagtggatgcagggggccgaggacctgacccccgaggatgacatgcccgtgggtcggaacgtgctggaactcacagatgtcaaggactcggccaactacacctgcgtggccatgtccagcctgggcgtcattgaggcggttgctcagatcacggtgaaatctctccccaaagctcccgggactcccatggtgactgagaacacagccaccagcatcaccatcacgtgggactcgggcaacccagatcctgtgtcctattacgtcatcgaatataaatccaagagccaagacgggccgtatcagattaaagaggacatcaccaccacacgttacagcatcggcggcctgagccccaactcggagtacgagatctgggtgtcggccgtcaactccatcggccaggggccccccagcgagtccgtggtcacccgcacaggcgagcaggccccggccagcgcgccgcggaacgtgcaagcccggatgctcagcgcgaccaccatgattgtgcagtgggaggagccggtggagcccaacggcctgatccgcggctaccgcgtctactacaccatggaaccggagcaccccgtgggcaactggcagaagcacaacgtggacgacagcctgctgaccaccgtgggcagcctgctggaggacgagacctacaccgtgcgggtgctcgccttcacctccgtcggcgacgggcccctctcggaccccatccaggtcaagacgcagcagggagtgccgggccagcccatgaacctgcgggccgaggccaggtcggagaccagcatcacgctgtcctggagccccccgcggcaggagagtatcatcaagtacgagctcctcttccgggaaggcgaccatggccgggaggtgggaaggaccttcgacccgacgacttcctacgtggtggaggacctgaagcccaacacggagtacgccttccgcctggcggcccgctcgccgcagggcctgggcgccttcacccccgtggtgcggcagcgcacgctgcagtccatctcgcccaagaacttcaaggtgaaaatgatcatgaagacatcagttctgctcagctgggagttccctgacaactacaactcacccacaccctacaagatccagtacaatgggctcacactggatgtggatggccgtaccaccaagaagctcatcacgcacctcaagccccacaccttctacaactttgtgctgaccaatcgcggcagcagcctgggcggcctccagcagacggtcaccgcctggactgccttcaacctgctcaacggcaagcccagcgtcgcccccaagcctgatgctgacggcttcatcatggtgtatcttcctgacggccagagccccgtgcctgtccagagctatttcattgtgatggtgccactgcgcaagtctcgtggaggccaattcctgaccccgctgggtagcccagaggacatggatctggaagagctcatccaggacatctcacggctacagaggcgcagcctgcggcactcgcgtcagctggaggtgccccggccctatattgcagctcgcttctctgtgctgccacccacgttccatcccggcgaccagaagcagtatggcggcttcgataaccggggcctggagcccggccaccgctatgtcctcttcgtgcttgccgtgcttcagaagagcgagcctacctttgcagccagtcccttctcagaccccttccagctggataacccggacccccagcccatcgtggatggcgaggaggggcttatctgggtgatcgggcctgtgctggccgtggtcttcataatctgcattgtcattgctatcctgctctacaagaacaaacccgacagtaaacgcaaggactcagaaccccgcaccaaatgcctcctgaacaatgccgacctcgcccctcaccaccccaaggaccctgtggaaatgagacgcattaacttccagactccagattcaggcctcaggagccccctcagggagccggggtttcactttgaaagcatgcttagccacccgccaattcccatcgcagacatggcggagcacacggagcggctcaaggccaacgacagcctcaagctctcccaggagtatgagtccatcgaccctggacagcagttcacatgggaacattccaacctggaagtgaacaagccgaagaaccgctatgccaacgtcatcgcctatgaccactcccgtgtcatcctccagcccattgaaggcatcatgggcagtgattacatcaatgccaactacgtggacggctaccggtgtcagaacgcgtacattgccacgcaggggccgctgcctgagacctttggggacttctggcgtatggtgtgggagcagcggtcggcgaccatcgtcatgatgacgcggctggaggagaagtcacggatcaagtgtgatcagtattggcccaacagaggcacggagacctacggcttcatccaggtcacgttgctagataccatcgagctggccacattctgcgtcaggacattctctctgcacaagaatggctccagtgagaaacgcgaggtccgccagttccagtttacggcgtggccggaccatggcgtgcccgaatacccaacgcccttcctggctttcctgcggagagtcaagacctgcaacccgccagatgccggccccatcgtggttcactgcagtgccggtgtgggccgcacaggctgctttatcgtcatcgacgccatgcttgagcggatcaagccagagaagacagtcgatgtctatggccacgtgacgctcatgaggtcccagcgcaactacatggtgcagacggaggaccagtacagcttcatccacgaggccctgctggaggccgtgggctgtggcaacacagaagtgcccgcacgcagcctctatgcctacatccagaagctggcccaggtggagcctggcgaacacgtcactggcatggaactcgagttcaagcggctggctaactccaaggcccacacgtcacgcttcatcagtgccaatctgccttgtaacaagttcaagaaccgcctggtgaacatcatgccctatgagagcacacgggtctgtctgcaacccatccggggtgtggagggctctgactacatcaacgccagcttcattgatggctacaggcagcagaaggcctacatcgcgacacaggggccgctggcggagaccacggaagacttctggcgcatgctgtgggagaacaattcgacgatcgtggtgatgctgaccaagctgcgggagatgggccgggagaagtgtcaccagtactggccggccgagcgctctgcccgctaccagtactttgtggtagatccgatggcagaatacaacatgcctcagtatatcctgcgagagttcaaggtcacagatgcccgggatggccagtcccggactgtccggcagttccagttcacagactggccggaacagggtgtgccaaagtcgggggagggcttcatcgacttcattggccaagtgcataagactaaggagcagtttggccaggacggccccatctctgtccactgcagtgccggcgtgggcaggacgggcgtcttcatcacgcttagcatcgtgctggagcggatgcggtatgaaggcgtggtggacatctttcagacggtgaagatgctacgaacccagcggccggccatggtgcagacagagacggagtctcgcccaggctggagtgcagtggctcaatctcggctcactgcaagctccgcctcctggattcacgccattctcctgcctcagcctcccgagtggctgggactacaggtg

SEQ ID NO: 320767 - DNA, 4683 bp, Artificial Sequence
  derived and/or modified sequence
agaagcgccagaggcctgagcgtgagagacagaggcgccatccccctgcagggcggcgacagaagaagcctgcccagcatggcccccacctggggccccggcatggtgagcgtggtgggccccatgggcctgctggtggtgctgctggtgggcggctgcgccgccgaggagccccccagattcatcaaggagcccaaggaccagatcggcgtgagcggcggcgtggccagcttcgtgtgccaggccaccggcgaccccaagcccagagtgacctggaacaagaagggcaagaaggtgaacagccagagattcgagaccatcgagttcgacgagagcgccggcgccgtgctgagaatccagcccctgagaacccccagagacgagaacgtgtacgagtgcgtggcccagaacagcgtgggcgagatcaccgtgcacgccaagctgaccgtgctgagagaggaccagctgcccagcggcttccccaacatcgacatgggcccccagctgaaggtggtggagagaaccagaaccgccaccatgctgtgcgccgccagcggcaaccccgaccccgagatcacctggttcaaggacttcctgcccgtggaccccagcgccagcaacggcagaatcaagcagctgagaagcggcgccctgcagatcgagagcagcgaggagaccgaccagggcaagtacgagtgcgtggccaccaacagcgccggcgtgagatacagcagccccgccaacctgtacgtgagagtgagaagagtggcccccagattcagcatcctgcccatgagccacgagatcatgcccggcggcaacgtgaacatcacctgcgtggccgtgggcagccccatgccctacgtgaagtggatgcagggcgccgaggacctgacccccgaggacgacatgcccgtgggcagaaacgtgctggagctgaccgacgtgaaggacagcgccaactacacctgcgtggccatgagcagcctgggcgtgatcgaggccgtggcccagatcaccgtgaagagcctgcccaaggcccccggcacccccatggtgaccgagaacaccgccaccagcatcaccatcacctgggacagcggcaaccccgaccccgtgagctactacgtgatcgagtacaagagcaagagccaggacggcccctaccagatcaaggaggacatcaccaccaccagatacagcatcggcggcctgagccccaacagcgagtacgagatctgggtgagcgccgtgaacagcatcggccagggcccccccagcgagagcgtggtgaccagaaccggcgagcaggcccccgccagcgcccccagaaacgtgcaggccagaatgctgagcgccaccaccatgatcgtgcagtgggaggagcccgtggagcccaacggcctgatcagaggctacagagtgtactacaccatggagcccgagcaccccgtgggcaactggcagaagcacaacgtggacgacagcctgctgaccaccgtgggcagcctgctggaggacgagacctacaccgtgagagtgctggccttcaccagcgtgggcgacggccccctgagcgaccccatccaggtgaagacccagcagggcgtgcccggccagcccatgaacctgagagccgaggccagaagcgagaccagcatcaccctgagctggagcccccccagacaggagagcatcatcaagtacgagctgctgttcagagagggcgaccacggcagagaggtgggcagaaccttcgaccccaccaccagctacgtggtggaggacctgaagcccaacaccgagtacgccttcagactggccgccagaagcccccagggcctgggcgccttcacccccgtggtgagacagagaaccctgcagagcatcagccccaagaacttcaaggtgaagatgatcatgaagaccagcgtgctgctgagctgggagttccccgacaactacaacagccccaccccctacaagatccagtacaacggcctgaccctggacgtggacggcagaaccaccaagaagctgatcacccacctgaagccccacaccttctacaacttcgtgctgaccaacagaggcagcagcctgggcggcctgcagcagaccgtgaccgcctggaccgccttcaacctgctgaacggcaagcccagcgtggcccccaagcccgacgccgacggcttcatcatggtgtacctgcccgacggccagagccccgtgcccgtgcagagctacttcatcgtgatggtgcccctgagaaagagcagaggcggccagttcctgacccccctgggcagccccgaggacatggacctggaggagctgatccaggacatcagcagactgcagagaagaagcctgagacacagcagacagctggaggtgcccagaccctacatcgccgccagattcagcgtgctgccccccaccttccaccccggcgaccagaagcagtacggcggcttcgacaacagaggcctggagcccggccacagatacgtgctgttcgtgctggccgtgctgcagaagagcgagcccaccttcgccgccagccccttcagcgaccccttccagctggacaaccccgacccccagcccatcgtggacggcgaggagggcctgatctgggtgatcggccccgtgctggccgtggtgttcatcatctgcatcgtgatcgccatcctgctgtacaagaacaagcccgacagcaagagaaaggacagcgagcccagaaccaagtgcctgctgaacaacgccgacctggccccccaccaccccaaggaccccgtggagatgagaagaatcaacttccagacccccgacagcggcctgagaagccccctgagagagcccggcttccacttcgagagcatgctgagccacccccccatccccatcgccgacatggccgagcacaccgagagactgaaggccaacgacagcctgaagctgagccaggagtacgagagcatcgaccccggccagcagttcacctgggagcacagcaacctggaggtgaacaagcccaagaacagatacgccaacgtgatcgcctacgaccacagcagagtgatcctgcagcccatcgagggcatcatgggcagcgactacatcaacgccaactacgtggacggctacagatgccagaacgcctacatcgccacccagggccccctgcccgagaccttcggcgacttctggagaatggtgtgggagcagagaagcgccaccatcgtgatgatgaccagactggaggagaagagcagaatcaagtgcgaccagtactggcccaacagaggcaccgagacctacggcttcatccaggtgaccctgctggacaccatcgagctggccaccttctgcgtgagaaccttcagcctgcacaagaacggcagcagcgagaagagagaggtgagacagttccagttcaccgcctggcccgaccacggcgtgcccgagtaccccacccccttcctggccttcctgagaagagtgaagacctgcaacccccccgacgccggccccatcgtggtgcactgcagcgccggcgtgggcagaaccggctgcttcatcgtgatcgacgccatgctggagagaatcaagcccgagaagaccgtggacgtgtacggccacgtgaccctgatgagaagccagagaaactacatggtgcagaccgaggaccagtacagcttcatccacgaggccctgctggaggccgtgggctgcggcaacaccgaggtgcccgccagaagcctgtacgcctacatccagaagctggcccaggtggagcccggcgagcacgtgaccggcatggagctggagttcaagagactggccaacagcaaggcccacaccagcagattcatcagcgccaacctgccctgcaacaagttcaagaacagactggtgaacatcatgccctacgagagcaccagagtgtgcctgcagcccatcagaggcgtggagggcagcgactacatcaacgccagcttcatcgacggctacagacagcagaaggcctacatcgccacccagggccccctggccgagaccaccgaggacttctggagaatgctgtgggagaacaacagcaccatcgtggtgatgctgaccaagctgagagagatgggcagagagaagtgccaccagtactggcccgccgagagaagcgccagataccagtacttcgtggtggaccccatggccgagtacaacatgccccagtacatcctgagagagttcaaggtgaccgacgccagagacggccagagcagaaccgtgagacagttccagttcaccgactggcccgagcagggcgtgcccaagagcggcgagggcttcatcgacttcatcggccaggtgcacaagaccaaggagcagttcggccaggacggccccatcagcgtgcactgcagcgccggcgtgggcagaaccggcgtgttcatcaccctgagcatcgtgctggagagaatgagatacgagggcgtggtggacatcttccagaccgtgaagatgctgagaacccagagacccgccatggtgcagaccgagaccgagagcagacccggctggagcgccgtggcccagagcagactgaccgccagcagcgccagctggatccacgccatcctgctgccccagccccccgagtggctgggcctgcaggtgtag

SEQ ID NO: 320768 - protein, 220 aa, Artificial Sequence
  derived and/or modified sequence
MASATDSRYGQKESSDQNFDYMFKILIIGNSSVGKTSFLFRYADDSFTPAFVSTVGIDFKVKTIYRNDKRIKLQIWDTAGQERYRTITTAYYRGAMGFILMYDITNEESFNAVQDWSTQIKTYSWDNAQVLLVGNKCDMEDERVVSSERGRQLADHLGFEFFEASAKDNINVKQTFERLVDVICEKMSESLDTADPAVTGAKQGPQLSDQQVPPHQDCAC

SEQ ID NO: 320769 - DNA, 663 bp, Artificial Sequence
  derived and/or modified sequence
atggcaagcgccacagatagcagatacggccaaaaagaatcatcagaccagaacttcgattacatgtttaaaatattgatcattggcaattcttcagtgggcaaaacatcatttttatttcggtacgcggacgacagtttcaccccggcttttgtgagcactgtcgggattgatttcaaggtaaaaaccatataccgcaatgacaaaaggataaaattgcaaatctgggatacagctggacaagagcgctaccggacaatcacgaccgcctactaccggggcgccatgggctttatactaatgtatgacatcactaacgaagagagttttaatgccgtgcaagattggtctactcagattaaaacatacagctgggataacgcacaggtcctgctagtggggaacaagtgcgacatggaagacgagcgagttgtgtcttccgagcgaggtaggcagctggctgatcatcttggcttcgagtttttcgaggccagcgccaaggataatatcaatgtgaaacagaccttcgagagattggtggatgtgatctgcgagaaaatgtcagagagcctggatactgcggatcccgccgtgaccggggctaagcaggggcctcagctttctgaccagcaggtacccccccatcaagactgtgcctgctag

SEQ ID NO: 320770 - DNA, 663 bp, Artificial Sequence
  derived and/or modified sequence
atggccagcgccacagacagccgctatggccagaaggagagcagtgaccagaactttgactacatgttcaagatcctgatcatcggcaacagctctgtgggcaagaccagcttcctgttccgctatgcagatgacagcttcaccccagcctttgtgtccacagtgggcatcgacttcaaggtgaagaccatctacagaaatgacaagaggatcaagctgcagatctgggacacagctggccaggagcgctaccgcaccatcaccacagcctactacagaggagccatgggcttcatcctgatgtatgacatcaccaatgaggagagcttcaatgctgtgcaggactggagcacccagatcaagacctacagctgggacaatgcccaggtgctgctggtgggcaacaagtgtgacatggaggatgagcgggtggtgtcctctgagcggggccggcagctggccgaccacctgggctttgagttctttgaggccagcgccaaggacaacatcaacgtgaagcagacctttgagcggctggtggatgtgatctgtgagaagatgtctgagagcctggacacagctgaccctgctgtgactggagccaagcagggcccccagctgagtgaccagcaggtgcccccccaccaggactgtgcctgctag

SEQ ID NO: 320771 - DNA, 663 bp, Artificial Sequence
  derived and/or modified sequence
atggccagcgccaccgacagccggtacggccagaaggagagcagcgatcaaaattttgactatatgtttaaaatcctgatcattggcaatagtagtgtgggtaaaaccagtttcctgtttcggtatgcggatgatagcttcactccggcttttgtgtcaactgttggcattgatttcaaggtcaaaaccatttacagaaacgacaagcggattaagctccagatctgggacacggctggacaggagcggtacagaacaatcactacagcatactacaggggcgcaatggggttcatcttgatgtatgatattaccaatgaagagtcctttaacgcggtgcaggattggtctacacaaatcaagacatacagctgggacaacgcacaagtgttactagtgggaaacaaatgcgacatggaagacgagcgagtggtcagctccgagcgggggagacagttggcagaccatctcggttttgaattctttgaagccagcgccaaggataacataaatgtaaagcagacgttcgagaggctcgtggacgttatctgcgaaaaaatgtcagaatctctcgataccgccgatcccgcggtgaccggagctaaacagggcccacagctgagtgaccaacaagttcctccccatcaagattgtgcgtgttag

SEQ ID NO: 320772 - DNA, 663 bp, Artificial Sequence
  derived and/or modified sequence
atggcttcagcaactgactcacgatacggtcagaaggagtcttctgatcaaaacttcgactatatgttcaaaatcctcatcattggcaatagctccgtggggaagaccagttttctcttccggtacgcagatgacagtttcacccccgctttcgtcagtacagttggcatcgacttcaaagtcaagaccatttatagaaatgacaagaggatcaaactccaaatttgggataccgctggccaagagagataccgcactattaccacggcctactacagaggggcaatgggatttatcttgatgtatgatatcaccaacgaggagagctttaacgctgtgcaggattggtccacacaaatcaaaacctactcctgggacaatgctcaggtcctcctggttgggaataagtgcgacatggaggacgagagggtggtgtcatctgaaagaggacggcagttagccgatcacctgggatttgagttttttgaggcatctgccaaagataacataaatgtgaaacaaacctttgagagactcgtcgatgtgatttgcgagaagatgtccgaatctctggataccgcagaccctgctgtgacaggcgctaaacagggcccacagctttccgatcagcaggttccaccccaccaggactgcgcctgctag

SEQ ID NO: 320773 - DNA, 1483 bp, Artificial Sequence
  derived and/or modified sequence
gaggactgcaggggcctgagccgctgctgccgccgccgccgcgcagccccacatcaacgcaccggggtcctgtcaccgccaccgccaaaaaagtcaccgccgctagggtcgccgttgcatcggtgcagggcaagatggcatccgccacagactcgcgctatgggcagaaggagtcctcggatcagaacttcgactacatgttcaagattctcatcatcggcaacagcagcgtgggcaagacgtccttcctcttccgctatgctgacgactcgttcacgcctgccttcgtcagcaccgtgggcatcgacttcaaggtcaagaccatctatcgcaacgacaagaggatcaagctgcagatctgggacacagcagggcaagagcggtaccggaccatcaccaccgcatactaccggggcgctatgggcttcatcctcatgtatgacatcaccaacgaggaatccttcaatgcagtgcaggactggtccacccagatcaagacctactcatgggacaatgcccaggtgctgctggtaggaaacaagtgtgacatggaggatgagcgggtggtgtcatcagaacgtggccggcagctagctgaccaccttgggttcgagttctttgaggcaagcgccaaggacaacattaacgtcaagcagacctttgagcgcctggtggatgtcatctgcgagaagatgtccgagtcgttggacacggcggaccctgcggtcacaggcgccaagcagggcccacagctcagtgaccagcaggtgccaccgcaccaggactgcgcctgctgagagccatcccactccctttcccctcttccctgtcttccccaccttcccccaactacccgggcctgacccggcccctaccagccacgggcacaagacccctgctcctgacttagcccgtcacccttatttattattgtagctatttatttatttattgaagatgtcccccaggggcccaggctcccctgcccgccccaagccctgcccctcctgtacatatagccctttccccactcagctgtggtgtctcgtggccccgtgaactcaccgctcaccctcctgaaccccccccccccgcctttttttaaaattcacccccatccacagttgtcagttgtgaagaggggccagatgacaccctaaagcaggctgatcgggcaatgggaggtggccaggcctgccagcccctcggctctgccgcggtgggccgaggccgctgttgggggtttccctgtgtggaccatggggatcagagtctggcctgccaggctcctctccccgttttctcttttggtgggggggtgtgctgtgggtattcaccaccctgggaccccccccccccccgcccaccagacctgttctgacctcatgagtgtcaaacgtgccccccagttccttaggagatgtcatgacaacactacacgcacccaataaagcgaatggaccatccatgtgtgtccctgtga

SEQ ID NO: 320774 - DNA, 663 bp, Artificial Sequence
  derived and/or modified sequence
atggccagcgccaccgacagcagatacggccagaaggagagcagcgaccagaacttcgactacatgttcaagatcctgatcatcggcaacagcagcgtgggcaagaccagcttcctgttcagatacgccgacgacagcttcacccccgccttcgtgagcaccgtgggcatcgacttcaaggtgaagaccatctacagaaacgacaagagaatcaagctgcagatctgggacaccgccggccaggagagatacagaaccatcaccaccgcctactacagaggcgccatgggcttcatcctgatgtacgacatcaccaacgaggagagcttcaacgccgtgcaggactggagcacccagatcaagacctacagctgggacaacgcccaggtgctgctggtgggcaacaagtgcgacatggaggacgagagagtggtgagcagcgagagaggcagacagctggccgaccacctgggcttcgagttcttcgaggccagcgccaaggacaacatcaacgtgaagcagaccttcgagagactggtggacgtgatctgcgagaagatgagcgagagcctggacaccgccgaccccgccgtgaccggcgccaagcagggcccccagctgagcgaccagcaggtgcccccccaccaggactgcgcctgctag

SEQ ID NO: 320775 - DNA, 36 bp, Artificial Sequence
  derived and/or modified sequence
ggtggttctggtggtggttctggtggtggttctggt

SEQ ID NO: 320776 - protein, 84 aa, Artificial Sequence
  derived and/or modified sequence
MNLWLLACLVAGFLGAWAPAVHTQGVFEDCCLAYHYPIGWAVLRRAWTYRIQEVSGSCNLPAAIRPSCCKEVEFWKLQVIIVQV

SEQ ID NO: 320777 - protein, 150 aa, Artificial Sequence
  derived and/or modified sequence
MNLWLLACLVAGFLGAWAPAVHTQGVFEDCCLAYHYPIGWAVLRRAWTYRIQEVSGSCNLPAAIFYLPKRHRKVCGNPKSREVQRAMKLLDARNKVFAKLHHNTQTFQAGPHAVKKLSSGNSKLSSSKFSNPISSSKRNVSLLISANSGL

SEQ ID NO: 320778 - DNA, 453 bp, Artificial Sequence
  derived and/or modified sequence
atgaatctgtggctcctagcctgcctggttgccggcttcctgggcgcctgggccccagccgtccacacacagggcgtcttcgaagattgctgcctagcctaccattatcccatcggctgggctgtgctacgccgcgcatggacctaccgaatccaagaggtcagcggctcttgtaatctgccagctgctattttttacctccctaagcgacaccgcaaggtgtgcggcaatcctaagagtcgtgaggttcagagggcgatgaagttgttggatgctcgtaataaggtgttcgcgaagctccaccacaacactcagacttttcaggctggaccccatgcggtgaagaaactgtccagcggcaattccaagctgtcctcctccaagttttccaatcctattagttcttcaaagcgaaatgtgtctctgctaataagtgcaaactctgggctgtag

SEQ ID NO: 320779 - DNA, 453 bp, Artificial Sequence
  derived and/or modified sequence
atgaacctgtggctgctggcctgcctggtggccggcttcctgggcgcctgggccccagctgtgcacacccagggcgtgtttgaggactgctgcctggcctaccactaccccatcggctgggccgtgctgcggcgggcctggacctaccgcatccaggaggtgtctggcagctgcaacctgcctgctgccatcttctacctgcccaagaggcacaggaaggtgtgtggcaaccccaagagccgggaggtgcagagggccatgaagctgctggatgccaggaacaaggtgtttgccaagctgcaccacaacacccagaccttccaggccggcccccatgctgtgaagaagctgagcagcggcaacagcaagctgagcagcagcaagttcagcaaccccatcagcagcagcaagagaaatgtgtccctgctgatcagcgccaacagcggcctgtag

SEQ ID NO: 320780 - DNA, 453 bp, Artificial Sequence
  derived and/or modified sequence
atgaacctgtggctgctggcctgcctggtggccggcttcctgggcgcctgggcacccgctgttcatacacagggagttttcgaggactgctgtctcgcctatcactatcctatcggatgggcagttctacgcagggcttggacatacaggatccaagaggtgtcagggtcttgcaatttgcctgccgctatcttctatctccctaaaaggcatcggaaggtgtgcggtaacccgaagtcccgcgaagtgcagagagccatgaagctactggacgcgcgcaacaaggtgtttgctaaacttcaccacaacactcagacttttcaagcgggcccccacgccgtgaagaagttgtcaagtggaaacagcaaactctcatcctcaaagttcagtaatccgatcagctcttccaagcgaaatgtatcgctgcttatttcagcaaattcagggctatag

SEQ ID NO: 320781 - DNA, 453 bp, Artificial Sequence
  derived and/or modified sequence
atgaacctttggctcttggcttgtctggtggcagggttcctgggtgcatgggcaccagctgtgcatacacaaggagtgtttgaggactgctgccttgcctatcactacccaattgggtgggccgtgctcagaagagcttggacctaccggattcaggaagtgtccggctcttgcaatctacctgccgctatattttacctgcctaagcgccacagaaaagtatgcggcaacccaaaatctagggaagtccaacgcgctatgaagctcctggatgcaagaaacaaggttttcgcaaagttgcaccacaatactcagacttttcaagccggacctcacgctgtgaaaaagttgtcatctggtaatagcaaattgtctagctccaagttttcaaatcccattagcagcagcaagaggaatgtatcattgcttatttccgccaatagtggcctgtag

SEQ ID NO: 320782 - DNA, 924 bp, Artificial Sequence
  derived and/or modified sequence
gtggccccgttattcgtccaggtgcccagggaggaggacccgcctgcagcatgaacctgtggctcctggcctgcctggtggccggcttcctgggagcctgggcccccgctgtccacacccaaggtgtctttgaggactgctgcctggcctaccactaccccattgggtgggctgtgctccggcgcgcctggacttaccggatccaggaggtgagcgggagctgcaatctgcctgctgcgatattctacctccccaagagacacaggaaggtgtgtgggaaccccaaaagcagggaggtgcagagagccatgaagctcctggatgctcgaaataaggtttttgcaaagctccaccacaacacgcagaccttccaagcaggccctcatgctgtaaagaagttgagttctggaaactccaagttatcatcgtccaagtttagcaatcccatcagcagcagtaagaggaatgtctccctcctgatatcagctaattcaggactgtgagccggctcatttctgggctccatcggcacaggaggggccggatctttctccgataaaaccgtcgccctacagacccagctgtccccacgcctctgtcttttgggtcaagtcttaatccctgcacctgagttggtcctccctctgcacccccaccacctcctgcccgtctggcaactggaaagagggagttggcctgattttaagccttttgccgctccggggaccagcagcaatcctgggcagccagtggctcttgtagagaagacttaggatacctctctcactttctgtttcttgccgtccaccccgggccatgccagtgtgtccctctgggtccctccaaaactctggtcagttcaaggatgcccctcccaggctatgcttttctataacttttaaataaaccttggggggtgatgga

SEQ ID NO: 320783 - DNA, 453 bp, Artificial Sequence
  derived and/or modified sequence
atgaacctgtggctgctggcctgcctggtggccggcttcctgggcgcctgggcccccgccgtgcacacccagggcgtgttcgaggactgctgcctggcctaccactaccccatcggctgggccgtgctgagaagagcctggacctacagaatccaggaggtgagcggcagctgcaacctgcccgccgccatcttctacctgcccaagagacacagaaaggtgtgcggcaaccccaagagcagagaggtgcagagagccatgaagctgctggacgccagaaacaaggtgttcgccaagctgcaccacaacacccagaccttccaggccggcccccacgccgtgaagaagctgagcagcggcaacagcaagctgagcagcagcaagttcagcaaccccatcagcagcagcaagagaaacgtgagcctgctgatcagcgccaacagcggcctgtag

SEQ ID NO: 320784 - protein, 313 aa, Artificial Sequence
  derived and/or modified sequence
MDNKKRLAYAIIQFLHDQLRHGGLSSDAQESLEVAIQCLETAFGVTVEDSDLALPQTLPEIFEAAATGKEMPQDLRSPARTPPSEEDSAEAERLKTEGNEQMKVENFEAAVHFYGKAIELNPANAVYFCNRAAAYSKLGNYAGAVQDCERAICIDPAYSKAYGRMGLALSSLNKHVEAVAYYKKALELDPDNETYKSNLKIAELKLREAPSPTGGVGSFDIAGLLNNPGFMSMASNLMNNPQIQQLMSGMISGGNNPLGTPGTSPSQNDLASLIQAGQQFAQQMQQQNPELIEQLRSQIRSRTPSASNDDQQE

SEQ ID NO: 320785 - DNA, 942 bp, Artificial Sequence
  derived and/or modified sequence
atggacaataaaaaaaggctagcctacgccatcatccaattcttgcacgatcagctcaggcatggaggtctctcctccgatgcccaagagagcctcgaagtggccatccagtgtctcgagactgccttcggagtcacggttgaagatagcgaccttgcattgcctcagacactgccagaaattttcgaagcagctgccacaggcaaggaaatgccacaagacttgaggagtcctgcacggacacccccatcggaggaagacagcgcagaagccgaaaggttgaaaaccgagggcaacgagcagatgaaagtggaaaattttgaagctgctgtgcacttttatggcaaggcaatcgaattaaaccctgcaaatgcggtgtacttttgcaaccgggctgcagcatactcaaaactgggcaattatgctggcgctgtacaggattgcgagcgcgctatttgtatcgatccagcctattcaaaggcctatggccgaatgggcttagctctctccagtctgaacaagcacgtggaagcggtggcctactacaagaaggcccttgagttggatccagataacgagacatataagagcaacctgaaaatcgccgaactcaaattaagggaggcgccaagtccaaccggcggagtgggctctttcgacattgcaggcttattgaataaccctggattcatgtccatggcctccaatttaatgaataatcctcagattcagcagcttatgtccggtatgatatctggcggaaacaatccactaggcaccccaggcacctctcccagtcagaatgatctggcaagcctgatacaagccggacagcagttcgcccagcagatgcaacagcagaacccagagttgatcgaacagctgcgcagccaaattcgcagcagaacaccatccgcctccaatgatgaccaacaagagtag

SEQ ID NO: 320786 - DNA, 942 bp, Artificial Sequence
  derived and/or modified sequence
atggacaacaagaagagactggcctacgccatcatccagttcctgcacgaccagctgagacacggcggcctgagcagcgacgcccaggagagcctggaggtggccatccagtgcctggagaccgccttcggcgtgaccgtggaggacagcgacctggccctgccccagaccctgcccgagatcttcgaggccgccgccaccggcaaggagatgccccaggacctgagaagccccgccagaaccccccccagcgaggaggacagcgccgaggccgagagactgaagaccgagggcaacgagcagatgaaggtggagaacttcgaggccgccgtgcacttctacggcaaggccatcgagctgaaccccgccaacgccgtgtacttctgcaacagagccgccgcctacagcaagctgggcaactacgccggcgccgtgcaggactgcgagagagccatctgcatcgaccccgcctacagcaaggcctacggcagaatgggcctggccctgagcagcctgaacaagcacgtggaggccgtggcctactacaagaaggccctggagctggaccccgacaacgagacctacaagagcaacctgaagatcgccgagctgaagctgagagaggcccccagccccaccggcggcgtgggcagcttcgacatcgccggcctgctgaacaaccccggcttcatgagcatggccagcaacctgatgaacaacccccagatccagcagctgatgagcggcatgatcagcggcggcaacaaccccctgggcacccccggcaccagccccagccagaacgacctggccagcctgatccaggccggccagcagttcgcccagcagatgcagcagcagaaccccgagctgatcgagcagctgagaagccagatcagaagcagaacccccagcgccagcaacgacgaccagcaggagtag

SEQ ID NO: 320787 - DNA, 942 bp, Artificial Sequence
  derived and/or modified sequence
atggataacaagaagcgtctagcctacgctatcatacagttcctccacgatcaactgcgtcatggcggactgagctcagatgcgcaggaatcgctcgaggtggcgatccaatgcctcgagaccgcatttggtgtgacggtcgaagatagtgatctcgcgctcccacaaacgcttcccgagatattcgaggcagccgctacgggcaaagaaatgccacaggacctcagatcccccgctcgaacacctccaagcgaggaagattctgcagaagcagaaaggctcaagaccgaaggaaacgagcagatgaaagtggagaacttcgaagctgccgtacacttctacgggaaagctattgagctgaaccctgccaacgctgtgtatttctgtaatagagccgcagcatacagcaagctggggaactacgctggggccgttcaggattgtgaaagagcaatttgtatcgaccccgcttacagcaaggcttatggcaggatgggccttgctctcagctcccttaacaaacacgtggaggctgtcgcatattacaaaaaagcgcttgaattagacccagataacgaaacctataagtcaaaccttaaaatagcagaactcaagctccgcgaagcaccatcacccacgggtggggtcggctccttcgatattgcaggactcttgaataaccccggattcatgagcatggcatctaatctcatgaacaacccgcagatccagcagctcatgtctgggatgatttcgggcggcaacaatcccctggggacccccgggacctccccttcccagaatgatctagcctctctgatccaggccgggcagcagtttgcacagcaaatgcaacaacagaacccggagttgatagagcagctgagaagccagattcgctcaaggactccctcagcctccaatgatgatcagcaagaatag

SEQ ID NO: 320788 - DNA, 942 bp, Artificial Sequence
  derived and/or modified sequence
atggacaacaagaagaggctggcctatgccatcatccagttcctgcatgaccagctgcggcatggaggcctgagcagtgatgcccaggagagcctggaggtggccatccagtgcctggagacagcctttggagtgacagtggaggacagcgacctggccctgccccagaccctgcctgagatctttgaggccgccgccaccgggaaggagatgccccaggacctgcggagccctgcccggaccccacccagcgaggaggacagcgctgaggccgagcggctgaagacagagggcaatgagcagatgaaggtggagaactttgaagctgctgtgcacttctacggcaaggccatcgagctgaacccagccaatgctgtgtacttctgcaacagagctgctgcctacagcaagctgggcaactatgctggagctgtgcaggactgtgagcgggccatctgcatcgaccctgcctacagcaaggcctacggccgcatgggcctggccctgagcagcctgaacaagcacgtggaggccgtggcctactacaagaaggccctggagctggaccctgacaatgagacctacaagagcaacctgaagattgctgagctgaagctgcgggaggcccccagccccactggaggagtgggcagctttgatattgctggcctgctgaacaaccctggcttcatgtccatggccagcaacctgatgaacaacccccagatccagcagctgatgagcggcatgatcagcggcggcaacaaccccctgggcaccccaggcaccagccccagccagaatgacctggccagcctcatccaggccggccagcagtttgcccagcagatgcagcagcagaaccctgagctgattgagcagctgcggagccagatccgcagcaggaccccatctgccagcaatgatgaccagcaggagtag

SEQ ID NO: 320789 - DNA, 942 bp, Artificial Sequence
  derived and/or modified sequence
atggacaacaagaagcggctggcctacgccatcatccagttcctgcacgaccagctacggcacggtggcttgtcttctgacgcgcaggaaagcctagaagtagccatccagtgtctggagactgcttttggtgtgactgtagaggatagtgatctggcactgccccagacactcccagagatcttcgaggcagcagccaccggaaaggagatgccccaggatctgaggtctcccgcaagaacaccaccttcagaggaggacagtgcggaggctgagaggctgaaaaccgagggcaacgagcagatgaaggtagagaatttcgaggccgctgtgcatttctacggaaaggctattgagctgaatccagccaatgctgtgtacttttgtaaccgcgcggccgcctattcaaaacttggcaattatgctggggctgttcaggactgtgaacgagctatttgcattgacccagcttattctaaagcatatggccggatggggctcgccctcagctcccttaataaacacgtggaagctgtggcttattacaaaaaagcccttgagctggaccctgataacgagacctataagtctaatttgaagattgcagaactcaaactaagggaggccccttctcctactggcggggtaggcagctttgacatcgccgggctgctaaacaaccccggattcatgtctatggcctctaatctgatgaataatccacaaattcagcagttgatgagtggtatgataagcggtggcaataatccactcggaactcccggtacatccccgtctcagaacgatctggccagtctgatacaggccggccagcaattcgcccagcaaatgcagcagcagaacccagagctgatagagcagctcagatcgcaaattagaagcagaacaccctccgcgagtaatgacgaccagcaggagtag

SEQ ID NO: 320790 - DNA, 2315 bp, Artificial Sequence
  derived and/or modified sequence
gcagaagggaagcaactccgggcgcctttcttttgcgcaggcgtcgcgccctggggccggggccgggcggcaccgcggtgcgcaagcgcaaccgtcggtgggtcggggatcggtcgcctgagaggtatcacctcttctgggctcaagatggacaacaagaagcgcctggcctacgccatcatccagttcctgcatgaccagctccggcacgggggcctctcgtccgatgctcaggagagcttggaagtcgccatccagtgcctggagactgcgtttggggtgacggtagaagacagtgaccttgcgctccctcagactctgccggagatatttgaagcggctgccacgggcaaggagatgccgcaggacctgaggagccccgcgcgaaccccgccttccgaggaggactcagcagaggcagagcgcctcaaaaccgaaggaaacgagcagatgaaagtggaaaactttgaagctgccgtgcatttctacggaaaagccatcgagctcaacccagccaacgccgtctatttctgcaacagagccgcagcctacagcaaactcggcaactacgcaggcgcggtgcaggactgtgagcgggccatctgcattgacccggcctacagcaaggcctacggcaggatgggcctggcgctctccagcctcaacaagcacgtggaggccgtggcttactacaagaaggctctggagctggaccccgacaacgagacatacaagtccaacctcaagatagcggagctgaagctgcgggaggcccccagccccacgggaggcgtgggcagcttcgacatcgccggcctgctgaacaaccctggcttcatgagcatggcttcgaacctaatgaacaatccccagattcagcagctcatgtccggcatgatttcgggtggcaacaaccccttgggaactcccggcaccagcccctcgcagaacgacctggccagcctcatccaggcgggccagcagtttgcccagcagatgcagcagcagaacccagagttgatagagcagctcaggagccagatccggagtcggacgcccagcgccagcaacgacgaccagcaggagtgacgctgcctgctcccggtgtgaccgcgtccttccctggccgacccgaaggaagccttctggttgtctgccacttcctcctgttggactgcctgagagaggggaagagagagacctcggacctgcatgtcaagatggattttccccttttatctctgccctcctccactccctttttgtaactcccttacagcccccagacccttcttgaaacgagagccagcaagctgagcacagaccagcagcgacctcccttccagcccccagaaagctcggtcacttgagtgttttctagaatcctggggtgctcccgggccgctctcagagaagtggcaggtttcacgttcagccgtgtggcggatcgtgtggcttccaaagccttttacagcccccgccccccatcccgtggtctgtctgcaggaactctcccgtctgtgagaagcctctttccgagtcgacctcccggccaccccggccctgtgcctgctcggaagagctcactgccagctgcggcctgggcaccgcgggccatgtgtgtttgcatgaggaactctttagtggcagacacctaagagacggctgcggtcaccccacgcctccgcggctcaggagccgtcctgggtgcataggaccagtttctgtgacttttctccagttgggcatgttgacagacatgtttcccctcctcccaccctcattttctggtcctcgcgactgagagccaggggcgacatcatgaccttctgtcccggccgccttagccccgggcacagggaaggcagctgggccgtttctgtctgtgtcccatcctgctgtccttctgtcctggatgtttcatgggcccggggccccccagggaagcttacccctcctgtgctgggtggaggccacgggacacctcaggtgccacccaccttggccctaaaacagccaccaggaaagcagccggagagccggacagcaggcagcctgtctgggttcctgaggcctgggggtggcagacgagcccacggcgccgtggtcccagcagcagggttgtcagtcggagcatcctggggctccctggctcctggccgtctgtgaggtaggcgcagtaccgtgtatcgtaggtagcagtaggaacgggggccgccgcggccctgcagccgctcatggcggtgaggtgtgtgccaagcccacccggggtgcagggcgtgacgtgtggggaataaataggcgttgtgacctct

SEQ ID NO: 320791 - protein, 1679 aa, Artificial Sequence
  derived and/or modified sequence
MSTPDPPLGGTPRPGPSPGPGPSPGAMLGPSPGPSPGSAHSMMGPSPGPPSAGHPIPTQGPGGYPQDNMHQMHKPMESMHEKGMSDDPRYNQMKGMGMRSGGHAGMGPPPSPMDQHSQGYPSPLGGSEHASSPVPASGPSSGPQMSSGPGGAPLDGADPQALGQQNRGPTPFNQNQLHQLRAQIMAYKMLARGQPLPDHLQMAVQGKRPMPGMQQQMPTLPPPSVSATGPGPGPGPGPGPGPGPAPPNYSRPHGMGGPNMPPPGPSGVPPGMPGQPPGGPPKPWPEGPMANAAAPTSTPQKLIPPQPTGRPSPAPPAVPPAASPVMPPQTQSPGQPAQPAPMVPLHQKQSRITPIQKPRGLDPVEILQEREYRLQARIAHRIQELENLPGSLAGDLRTKATIELKALRLLNFQRQLRQEVVVCMRRDTALETALNAKAYKRSKRQSLREARITEKLEKQQKIEQERKRRQKHQEYLNSILQHAKDFKEYHRSVTGKIQKLTKAVATYHANTEREQKKENERIEKERMRRLMAEDEEGYRKLIDQKKDKRLAYLLQQTDEYVANLTELVRQHKAAQVAKEKKKKKKKKKAENAEGQTPAIGPDGEPLDETSQMSDLPVKVIHVESGKILTGTDAPKAGQLEAWLEMNPGYEVAPRSDSEESGSEEEEEEEEEEQPQAAQPPTLPVEEKKKIPDPDSDDVSEVDARHIIENAKQDVDDEYGVSQALARGLQSYYAVAHAVTERVDKQSALMVNGVLKQYQIKGLEWLVSLYNNNLNGILADEMGLGKTIQTIALITYLMEHKRINGPFLIIVPLSTLSNWAYEFDKWAPSVVKVSYKGSPAARRAFVPQLRSGKFNVLLTTYEYIIKDKHILAKIRWKYMIVDEGHRMKNHHCKLTQVLNTHYVAPRRLLLTGTPLQNKLPELWALLNFLLPTIFKSCSTFEQWFNAPFAMTGEKVDLNEEETILIIRRLHKVLRPFLLRRLKKEVEAQLPEKVEYVIKCDMSALQRVLYRHMQAKGVLLTDGSEKDKKGKGGTKTLMNTIMQLRKICNHPYMFQHIEESFSEHLGFTGGIVQGLDLYRASGKFELLDRILPKLRATNHKVLLFCQMTSLMTIMEDYFAYRGFKYLRLDGTTKAEDRGMLLKTFNEPGSEYFIFLLSTRAGGLGLNLQSADTVIIFDSDWNPHQDLQAQDRAHRIGQQNEVRVLRLCTVNSVEEKILAAAKYKLNVDQKVIQAGMFDQKSSSHERRAFLQAILEHEEQDESRHCSTGSGSASFAHTAPPPAGVNPDLEEPPLKEEDEVPDDETVNQMIARHEEEFDLFMRMDLDRRREEARNPKRKPRLMEEDELPSWIIKDDAEVERLTCEEEEEKMFGRGSRHRKEVDYSDSLTEKQWLKKITGKDIHDTASSVARGLQFQRGLQFCTRASKAIEEGTLEEIEEEVRQKKSSRKRKRDSDAGSSTPTTSTRSRDKDDESKKQKKRGRPPAEKLSPNPPNLTKKMKKIVDAVIKYKDSSSGRQLSEVFIQLPSRKELPEYYELIRKPVDFKKIKERIRNHKYRSLNDLEKDVMLLCQNAQTFNLEGSLIYEDSIVLQSVFTSVRQKIEKEDDSEGEESEEEEEGEEEGSESESRSVKVKIKLGRKEKAQDRLKGGRRRPSRGSRAKPVVSDDDSEEEQEEDRSGSGSEED

SEQ ID NO: 320792 - DNA, 5040 bp, Artificial Sequence
  derived and/or modified sequence
atgagcacccccgacccccccctgggcggcacccccagacccggccccagccccggccccggccccagccccggcgccatgctgggccccagccccggccccagccccggcagcgcccacagcatgatgggccccagccccggcccccccagcgccggccaccccatccccacccagggccccggcggctacccccaggacaacatgcaccagatgcacaagcccatggagagcatgcacgagaagggcatgagcgacgaccccagatacaaccagatgaagggcatgggcatgagaagcggcggccacgccggcatgggccccccccccagccccatggaccagcacagccagggctaccccagccccctgggcggcagcgagcacgccagcagccccgtgcccgccagcggccccagcagcggcccccagatgagcagcggccccggcggcgcccccctggacggcgccgacccccaggccctgggccagcagaacagaggccccacccccttcaaccagaaccagctgcaccagctgagagcccagatcatggcctacaagatgctggccagaggccagcccctgcccgaccacctgcagatggccgtgcagggcaagagacccatgcccggcatgcagcagcagatgcccaccctgcccccccccagcgtgagcgccaccggccccggccccggccccggccccggccccggccccggccccggccccgccccccccaactacagcagaccccacggcatgggcggccccaacatgcccccccccggccccagcggcgtgccccccggcatgcccggccagccccccggcggcccccccaagccctggcccgagggccccatggccaacgccgccgcccccaccagcaccccccagaagctgatccccccccagcccaccggcagacccagccccgccccccccgccgtgccccccgccgccagccccgtgatgcccccccagacccagagccccggccagcccgcccagcccgcccccatggtgcccctgcaccagaagcagagcagaatcacccccatccagaagcccagaggcctggaccccgtggagatcctgcaggagagagagtacagactgcaggccagaatcgcccacagaatccaggagctggagaacctgcccggcagcctggccggcgacctgagaaccaaggccaccatcgagctgaaggccctgagactgctgaacttccagagacagctgagacaggaggtggtggtgtgcatgagaagagacaccgccctggagaccgccctgaacgccaaggcctacaagagaagcaagagacagagcctgagagaggccagaatcaccgagaagctggagaagcagcagaagatcgagcaggagagaaagagaagacagaagcaccaggagtacctgaacagcatcctgcagcacgccaaggacttcaaggagtaccacagaagcgtgaccggcaagatccagaagctgaccaaggccgtggccacctaccacgccaacaccgagagagagcagaagaaggagaacgagagaatcgagaaggagagaatgagaagactgatggccgaggacgaggagggctacagaaagctgatcgaccagaagaaggacaagagactggcctacctgctgcagcagaccgacgagtacgtggccaacctgaccgagctggtgagacagcacaaggccgcccaggtggccaaggagaagaagaagaagaagaagaagaagaaggccgagaacgccgagggccagacccccgccatcggccccgacggcgagcccctggacgagaccagccagatgagcgacctgcccgtgaaggtgatccacgtggagagcggcaagatcctgaccggcaccgacgcccccaaggccggccagctggaggcctggctggagatgaaccccggctacgaggtggcccccagaagcgacagcgaggagagcggcagcgaggaggaggaggaggaggaggaggaggagcagccccaggccgcccagccccccaccctgcccgtggaggagaagaagaagatccccgaccccgacagcgacgacgtgagcgaggtggacgccagacacatcatcgagaacgccaagcaggacgtggacgacgagtacggcgtgagccaggccctggccagaggcctgcagagctactacgccgtggcccacgccgtgaccgagagagtggacaagcagagcgccctgatggtgaacggcgtgctgaagcagtaccagatcaagggcctggagtggctggtgagcctgtacaacaacaacctgaacggcatcctggccgacgagatgggcctgggcaagaccatccagaccatcgccctgatcacctacctgatggagcacaagagaatcaacggccccttcctgatcatcgtgcccctgagcaccctgagcaactgggcctacgagttcgacaagtgggcccccagcgtggtgaaggtgagctacaagggcagccccgccgccagaagagccttcgtgccccagctgagaagcggcaagttcaacgtgctgctgaccacctacgagtacatcatcaaggacaagcacatcctggccaagatcagatggaagtacatgatcgtggacgagggccacagaatgaagaaccaccactgcaagctgacccaggtgctgaacacccactacgtggcccccagaagactgctgctgaccggcacccccctgcagaacaagctgcccgagctgtgggccctgctgaacttcctgctgcccaccatcttcaagagctgcagcaccttcgagcagtggttcaacgcccccttcgccatgaccggcgagaaggtggacctgaacgaggaggagaccatcctgatcatcagaagactgcacaaggtgctgagacccttcctgctgagaagactgaagaaggaggtggaggcccagctgcccgagaaggtggagtacgtgatcaagtgcgacatgagcgccctgcagagagtgctgtacagacacatgcaggccaagggcgtgctgctgaccgacggcagcgagaaggacaagaagggcaagggcggcaccaagaccctgatgaacaccatcatgcagctgagaaagatctgcaaccacccctacatgttccagcacatcgaggagagcttcagcgagcacctgggcttcaccggcggcatcgtgcagggcctggacctgtacagagccagcggcaagttcgagctgctggacagaatcctgcccaagctgagagccaccaaccacaaggtgctgctgttctgccagatgaccagcctgatgaccatcatggaggactacttcgcctacagaggcttcaagtacctgagactggacggcaccaccaaggccgaggacagaggcatgctgctgaagaccttcaacgagcccggcagcgagtacttcatcttcctgctgagcaccagagccggcggcctgggcctgaacctgcagagcgccgacaccgtgatcatcttcgacagcgactggaacccccaccaggacctgcaggcccaggacagagcccacagaatcggccagcagaacgaggtgagagtgctgagactgtgcaccgtgaacagcgtggaggagaagatcctggccgccgccaagtacaagctgaacgtggaccagaaggtgatccaggccggcatgttcgaccagaagagcagcagccacgagagaagagccttcctgcaggccatcctggagcacgaggagcaggacgagagcagacactgcagcaccggcagcggcagcgccagcttcgcccacaccgcccccccccccgccggcgtgaaccccgacctggaggagccccccctgaaggaggaggacgaggtgcccgacgacgagaccgtgaaccagatgatcgccagacacgaggaggagttcgacctgttcatgagaatggacctggacagaagaagagaggaggccagaaaccccaagagaaagcccagactgatggaggaggacgagctgcccagctggatcatcaaggacgacgccgaggtggagagactgacctgcgaggaggaggaggagaagatgttcggcagaggcagcagacacagaaaggaggtggactacagcgacagcctgaccgagaagcagtggctgaagaagatcaccggcaaggacatccacgacaccgccagcagcgtggccagaggcctgcagttccagagaggcctgcagttctgcaccagagccagcaaggccatcgaggagggcaccctggaggagatcgaggaggaggtgagacagaagaagagcagcagaaagagaaagagagacagcgacgccggcagcagcacccccaccaccagcaccagaagcagagacaaggacgacgagagcaagaagcagaagaagagaggcagaccccccgccgagaagctgagccccaacccccccaacctgaccaagaagatgaagaagatcgtggacgccgtgatcaagtacaaggacagcagcagcggcagacagctgagcgaggtgttcatccagctgcccagcagaaaggagctgcccgagtactacgagctgatcagaaagcccgtggacttcaagaagatcaaggagagaatcagaaaccacaagtacagaagcctgaacgacctggagaaggacgtgatgctgctgtgccagaacgcccagaccttcaacctggagggcagcctgatctacgaggacagcatcgtgctgcagagcgtgttcaccagcgtgagacagaagatcgagaaggaggacgacagcgagggcgaggagagcgaggaggaggaggagggcgaggaggagggcagcgagagcgagagcagaagcgtgaaggtgaagatcaagctgggcagaaaggagaaggcccaggacagactgaagggcggcagaagaagacccagcagaggcagcagagccaagcccgtggtgagcgacgacgacagcgaggaggagcaggaggaggacagaagcggcagcggcagcgaggaggactag

SEQ ID NO: 320793 - DNA, 5040 bp, Artificial Sequence
  derived and/or modified sequence
atgtccacccccgaccctcccctggggggtacgcctcgccctggtcctagccccggccccggacctagtcccggggcgatgctgggccctagccctggcccctcacccggatccgcccatagtatgatgggaccatcccctggaccccctagcgctgggcaccctatccctacgcagggccccggcgggtacccgcaggataatatgcaccagatgcacaagcccatggagtctatgcacgaaaaggggatgtccgatgatccccgttacaatcaaatgaagggcatgggcatgcgatccggcggccacgctgggatgggccctcctcctagtccgatggatcaacactctcagggataccccagtccgctgggaggatctgagcatgccagttctcctgttccagccagcggaccatcctccggccctcagatgtcttcaggaccaggaggtgcccctctggacggggccgatccacaggcacttgggcaacaaaatagggggcctacgccctttaatcaaaatcagctgcaccaactgcgggctcagatcatggcttataagatgttggcacgcggtcaaccgctgcctgatcatctgcagatggccgtgcagggtaagcgccccatgcccggaatgcagcagcagatgcccaccctcccgccgccttcggtgtcggcaactgggccaggaccgggacctggtccgggccccgggcccggcccgggaccggcacctccgaactatagcagaccccatgggatgggaggtcccaatatgcctccccctggccctagcggcgtgccacctggcatgcccggtcagccccccggcgggcctccgaagccttggcctgaggggccaatggctaacgccgcagcacctacatctacgcctcaaaagctgatccctccccagcctacaggaagaccatcacccgctccacccgcagtgcccccagcagccagccctgtgatgccccctcaaacgcagagtcccggccagcctgcacagccagctcctatggttccgcttcatcagaagcagagccgtattacacccatccagaagcctaggggcctagaccccgtagaaatcctgcaggaaagagagtataggttacaggctcggatcgcacatcggatccaggaactcgaaaatttgcccggctccctcgcgggtgacctccggacaaaggccaccattgaattgaaggccctgcgcctgctgaactttcagcgccagttgcggcaggaggtggtggtttgcatgagacgagacaccgcactggagactgctctcaacgccaaggcatataagcggtccaaaagacagtcattgagggaagcccgcattaccgagaaactggagaaacagcagaaaattgagcaggagaggaagcgtcgccagaagcatcaggagtatttgaatagcatcctgcagcacgctaaggactttaaggagtaccaccgtagcgttaccgggaaaatacagaaattaacaaaggctgtggcgacttatcacgccaataccgagagagaacaaaaaaaagagaacgagcggatagagaaggaaagaatgcggcgcctgatggctgaagatgaggagggatacagaaaactgatagatcagaagaaggacaagaggctggcttacctattgcagcagaccgatgaatacgtagctaatttaacggagttagtgaggcaacacaaggccgcgcaagtcgcaaaagaaaagaaaaaaaagaaaaagaagaagaaggccgagaatgccgagggacagacaccagccataggtccagacggtgagccccttgatgagacctcccagatgtccgatttgcctgtgaaggtaattcatgtcgaatccggtaagatattaacgggtactgatgcaccaaaggccggccagctcgaggcatggttggagatgaaccctggatacgaggttgcccccaggtcggactcagaggagtcgggatccgaagaggaggaagaagaggaagaggaggaacagccccaggccgcccagccaccgaccctccctgtggaggagaagaagaagatacctgacccggactcagacgacgtcagtgaggtggatgctagacacattattgagaacgcgaagcaggatgtggatgacgaatatggtgtctctcaggccctcgcgagagggctccagagctactatgcagtggctcatgctgttacagagagggtggacaagcagtcagccctcatggttaatggcgtgctgaagcagtaccagatcaaagggctcgaatggctagttagtctgtataataacaatctaaacggaatactggccgacgaaatgggtctgggaaaaaccatccagaccatagccctcataacctacctcatggaacataagaggatcaatggtcctttcctgataatcgttcctctgagtaccctctctaactgggcttacgaattcgacaagtgggctccttcggtggtgaaggtctcttacaaaggctcccctgcagctagacgggcatttgtgcctcagctgcgtagcggaaaatttaatgtgctcctcacgacctatgaatatattatcaaggataagcatatcctggctaaaattaggtggaagtatatgattgtggatgagggtcataggatgaaaaatcatcattgcaaactgacccaggtcttgaatacacactacgtggccccccgacgcctcctcctaacgggaacccctctgcagaacaagttgcctgaattatgggccctgttaaacttcctattacccacaatctttaagtcttgctcaacctttgagcagtggtttaatgcaccttttgccatgacaggagagaaggttgacctcaatgaagaagagaccatcctcataatcaggagattgcacaaggtccttcggccattcctgcttcgccgcctgaaaaaggaggtggaggcccagctgccagagaaagtggagtacgtcatcaagtgcgatatgtcggctctgcaacgcgtgttgtaccgccatatgcaagccaaaggtgtccttctgaccgatggctccgagaaagataagaaaggtaaagggggcacaaaaaccctgatgaatacaataatgcagcttcgtaaaatttgtaatcatccctatatgttccaacacattgaagagtccttcagcgaacacttggggtttactggtgggattgttcagggcctggatctctatcgcgcctctggcaagttcgagctcctcgatcggattctgcccaaactccgggccacgaaccataaggtcctgctgttttgtcagatgacaagcttgatgacaattatggaagactatttcgcttatcgtggcttcaagtaccttaggctggacggcaccactaaagcggaagatagaggaatgctactgaagacctttaacgaaccaggatctgagtatttcatctttctgctatccacacgagccggcggattggggcttaacttgcagagcgccgataccgtgatcatattcgactccgactggaatccgcaccaagaccttcaggcccaagatagggcccaccgcataggacagcagaacgaggtgcgcgttctaaggttgtgcactgtgaattctgtagaagagaagattcttgccgcagcgaaatacaagctcaatgtagaccagaaggtgattcaggctggtatgtttgatcaaaagtctagcagtcatgaacgcagagcatttctacaggctatacttgagcacgaggaacaggacgagagtagacactgttccactggctccgggtcagcttcattcgcccatacagctcctccccccgccggcgttaaccccgacctagaagagccacccctgaaggaggaggatgaggtgcccgacgatgagacggtcaaccaaatgatcgctaggcatgaagaagagttcgacttgttcatgcggatggacctcgatcggcggagagaggaggccaggaatccgaagaggaagcctcgccttatggaggaggacgaactcccttcctggatcatcaaagatgacgcagaggtcgagcgcttgacgtgcgaagaagaggaggagaaaatgtttggaagaggttccaggcaccgaaaagaagttgactactctgacagcctgactgaaaaacagtggctgaaaaagatcaccggcaaagatattcatgacacagccagcagcgtagcacgagggctgcagttccagaggggcctgcagttttgtacaagagcgagcaaagcaatcgaagagggtacgctggaggagatagaggaggaggtgaggcaaaaaaagtcatccagaaagcgcaaaagggactccgatgcaggatcttccactccaaccacctcgacgaggtcaagagacaaggacgacgaaagcaagaagcagaaaaagaggggaaggccgcctgcagaaaaactctctcctaatccccccaacctgaccaaaaaaatgaaaaaaatagtggacgccgtaattaaatacaaagactcctcttctgggcgtcagcttagcgaagtattcatccaactgccatcccggaaggagttgcccgagtattacgagttgatccgcaagcctgtcgatttcaaaaaaattaaggaacggatacgtaatcataaatacagaagtttaaatgacttagaaaaggacgttatgcttctgtgtcaaaacgcccaaacctttaacctcgagggtagtctcatttatgaggatagcattgtgctgcagtctgtgttcacatccgtgcgacaaaagatagagaaggaggacgacagcgagggggaagagtccgaggaggaagaggagggggaagaagaagggtctgagagcgaaagccgcagcgtcaaagtaaagattaaactcggccgtaaggaaaaggcccaggacagactcaagggtgggcggaggcgcccttcacggggtagccgggcaaagccagtcgtttcggacgacgactccgaggaggagcaagaggaagaccgcagcggctcaggatctgaagaggattag

SEQ ID NO: 320794 - DNA, 5040 bp, Artificial Sequence
  derived and/or modified sequence
atgagcaccccagacccccccctgggcggcaccccccggcccggccccagccctggccctggccccagccctggggccatgctgggccccagccctggccccagccctggcagcgcccacagcatgatgggccccagccctggccccccatctgctggccaccccatccccacccagggccctgggggctacccccaggacaacatgcaccagatgcacaagcccatggagagcatgcatgagaagggcatgtctgatgacccccgctacaaccagatgaagggcatgggcatgaggtctgggggccacgccggcatgggccccccacccagccccatggaccagcacagccagggctaccccagccccctgggcggcagcgagcacgccagcagccctgtgcctgccagcggccccagcagcggcccccagatgagcagcggccctggaggagcccccctggatggagctgacccccaggccctgggccagcagaacagaggccccacccccttcaaccagaaccagctgcaccagctgcgggcccagatcatggcctacaagatgctggcccggggccagcccctgcctgaccacctgcagatggctgtgcagggcaagaggcccatgcctggcatgcagcagcagatgcccaccctgcccccacccagcgtgtctgccaccggccctggccctggccctggccctggccctggccctggccctggccctgccccacccaactacagccggccccacggcatgggcggccccaacatgcctcctcctggccccagcggcgtgcccccaggcatgcctggccagcccccaggcggcccccccaagccctggccagagggccccatggccaatgctgctgcccccaccagcaccccccagaagctgatccccccccagcccaccggccggcccagccctgcccctcctgctgtgcccccagctgccagccctgtgatgccaccccagacccagagccctggccagcctgcccagcctgcccccatggtgcccctgcaccagaagcagagccgcatcacccccatccagaagccccggggcctggaccctgtggagatcctgcaggagcgggagtaccgcctgcaggcccgcatcgcccaccgcatccaggagctggagaacctgcccggcagcctggccggggacctgcggaccaaggccaccatcgagctgaaggccctgcggctgctgaacttccagaggcagctgcggcaggaggtggtggtgtgcatgagaagagacacagccctggagacagccctgaatgccaaggcctacaagaggagcaagaggcagagcctgcgggaggcccgcatcacagagaagctggagaagcagcagaagattgagcaggagaggaagaggcggcagaagcaccaggagtacctgaacagcatcctgcagcacgccaaggacttcaaggagtaccacaggtctgtgacaggcaagatccagaagctgaccaaggctgtggccacctaccacgccaacacagagcgggagcagaagaaggaaaatgaaagaattgagaaggagaggatgaggcggctgatggctgaagatgaggagggctacaggaagctgattgaccagaagaaggacaagaggctggcctacctgctgcagcagacagatgaatatgtggccaacctgacagagctggtgcggcagcacaaggccgcccaggtggccaaggagaagaagaagaagaagaagaagaagaaggccgagaatgctgagggccagaccccagccatcggcccagatggagagcccctggatgagaccagccagatgtctgacctgcctgtgaaggtgattcatgtggagagcggcaagatcctgactggaacagatgcccccaaggccggccagctggaggcctggctggagatgaaccctggctatgaggtggcccccaggagtgacagcgaggagagcggcagcgaggaggaggaggaggaggaggaggaggagcagccccaggccgcccagccccccaccctgcctgtggaggagaagaagaagatcccagaccctgacagtgatgatgtgtctgaggtggatgcccggcacatcattgaaaatgccaagcaggatgtggatgatgaatatggagtgtcccaggccctggcccggggcctgcagagctactatgctgtggcccatgctgtgacagagcgggtggacaagcagagcgccctgatggtgaatggagtgctgaagcagtaccagatcaagggcctggagtggctggtgtccctgtacaacaacaacctgaatggcatcctggctgatgagatgggcctgggcaagaccatccagaccatcgccctgatcacctacctgatggagcacaagaggatcaatggccccttcctgatcatcgtgcccctgagcaccctgagcaactgggcctatgaatttgacaagtgggcccccagcgtggtgaaggtgtcctacaagggcagccctgctgcccggcgggcctttgtgccccagctgcggagcggcaagttcaacgtgctgctgaccacctatgagtacatcatcaaggacaagcacatcctggccaagatccgctggaagtacatgattgtggatgagggccacaggatgaagaaccaccactgcaagctgacccaggtgctgaacacccactacgtggccccccggcggctgctgctgaccggcacccccctgcagaacaagctgcctgagctgtgggccctgctgaacttcctgctgcccaccatcttcaagagctgcagcacctttgagcagtggttcaatgccccctttgccatgaccggggagaaggtggacctgaatgaggaggagaccatcctgatcatccggcggctgcacaaggtgctgcggcccttcctgctgcggcggctgaagaaggaggtggaggcccagctgcctgagaaggtggagtatgtgatcaagtgtgacatgtctgccctgcagagggtgctgtaccgccacatgcaggccaagggcgtgctgctgacagatggcagcgagaaggacaagaagggcaaaggaggcaccaagaccctgatgaacaccatcatgcagctgaggaagatctgcaaccacccctacatgttccagcacatcgaggagagcttcagcgagcacctgggcttcaccggcggcatcgtgcagggcctggacctgtaccgggccagcggcaagtttgagctgctggaccgcatcctgcccaagctgcgggccaccaaccacaaggtgctgctcttctgccagatgaccagcctgatgaccatcatggaggactactttgcctaccggggcttcaagtacctgcggctggatggcaccaccaaggcagaagatcggggcatgctgctgaagaccttcaatgaacctggcagcgagtacttcatcttcctgctgagcacccgggccggcggcctgggcctgaacctgcagagcgctgacaccgtcatcatctttgacagcgactggaacccccaccaggacctgcaggcccaggaccgggcccacagaattggccagcagaatgaggtgcgggtgctgcggctgtgcaccgtgaacagcgtggaggagaagatcctggccgccgccaagtacaagctgaatgtggaccagaaggtgatccaggccggcatgtttgaccagaagagcagcagccatgaaagaagagccttcctgcaggccatcctggagcacgaggagcaggatgagagccgccactgcagcacaggcagcggcagcgccagctttgcccacacagcccctcctcctgctggggtgaacccagacctggaggagccccccctgaaggaggaggatgaggtgcctgatgatgaaacagtgaaccagatgattgcccggcatgaggaggagtttgacctcttcatgaggatggacctggacagaagaagagaggaggccaggaaccccaagaggaagccccggctgatggaggaggatgagctgcccagctggatcatcaaggatgatgctgaggtggagcggctgacctgtgaggaggaggaggagaagatgtttggccggggcagccgccacaggaaggaggtggactacagcgacagcctgacagagaagcagtggctgaagaagatcaccgggaaggacatccatgacacagccagctctgtggcccggggcctgcagttccagaggggcctgcagttctgcacccgggccagcaaggccatcgaggagggcaccctggaggagattgaggaggaggtgcggcagaagaagagcagcaggaagaggaagagggacagtgatgctggcagcagcacccccaccaccagcaccaggagccgggacaaggatgatgagagcaagaagcagaagaagaggggccggcccccagctgagaagctgagccccaacccccccaacctgaccaagaagatgaagaagatcgtggatgctgtgatcaagtacaaggacagcagcagcggccggcagctgtctgaggtgttcatccagctgcccagcaggaaggagctgcctgagtactatgagctgatcaggaagcctgtggacttcaagaagatcaaggagcgcatccggaaccacaagtaccgcagcctgaatgacctggagaaggatgtgatgctgctgtgccagaatgcccagaccttcaacctggagggcagcctcatctatgaggacagcatcgtgctgcagagcgtcttcacctctgtgcggcagaagattgagaaggaggatgacagcgagggggaggagagcgaggaggaggaggagggggaggaggagggcagcgagagcgagagccgctctgtgaaggtgaagatcaagctgggcaggaaggagaaggcccaggaccggctgaagggcggcagaagaagacccagccggggcagccgggccaagcctgtggtgtctgatgatgattctgaggaggagcaggaggaggacaggagcggcagcggcagcgaggaggactag

SEQ ID NO: 320795 - DNA, 5040 bp, Artificial Sequence
  derived and/or modified sequence
atgagcacccccgacccccccctgggcggcaccccccggcccggccccagtcccggcccagggccttcgcccggggctatgctcggcccctctccaggaccaagccccggttccgctcattcaatgatgggaccctctccaggcccccccagcgcgggtcaccctatccccacccaaggacctggaggttacccccaggataacatgcatcaaatgcacaagccaatggagagcatgcacgagaagggaatgtcggacgacccgcggtacaaccagatgaaagggatgggtatgcgcagtggggggcacgccggtatgggcccaccaccctctccgatggatcagcatagccagggctacccaagcccgcttggcgggtcagagcatgctagtagtccagttccagcctctgggccaagctccggaccccagatgtcatcaggccctggcggggcacctttagatggggctgatccgcaggcgttggggcagcaaaataggggcccaacccccttcaatcaaaatcagctgcaccaactgagggctcagattatggcatacaagatgcttgctagagggcagccactgcctgatcatcttcagatggcagtccagggaaagagaccaatgccaggcatgcagcagcagatgccgacgctgcctccgccttctgtctcagccactgggcccggacctggcccaggcccagggcccggccctggaccaggcccagccccccctaattactcccgcccccacggcatgggtggcccaaacatgcctccacccggaccctctggagttcctcctggaatgcctgggcagcctcccggcggtcccccaaaaccgtggcctgagggccccatggctaacgccgccgccccgacaagcacccctcagaaacttatacctccgcaacctacaggcaggcctagtcctgcccccccggctgtgccccctgcagcaagtccagtcatgcctccccagacccaatccccaggccagcccgcacagccagctccaatggttcctctccatcaaaaacagtctagaataactccaatccagaagccaagaggtcttgatccagtggaaatcttgcaagagcgcgagtaccgattgcaggcacgtattgctcatcggattcaggagctggaaaatctaccggggagcctcgctggggacctgagaacgaaggctactattgaattgaaagcactgaggctcctcaattttcagcgacagttgcgacaggaagttgtggtctgtatgcgcagggacaccgcgctggagaccgctctgaatgctaaagcctacaaacgttctaagagacagagtttgcgggaagcacgtattactgagaaactggagaaacaacagaagatcgaacaggagcgcaagcgcagacagaagcaccaggagtatctcaactctattctgcagcatgctaaggacttcaaagaatatcataggagcgtaaccggtaaaattcaaaaacttaccaaagctgtggccacctaccatgccaataccgaacgggaacaaaaaaaggagaatgagcgcatcgaaaaagaacgcatgcggcgcctcatggcagaggacgaggaaggttaccgtaagctcatcgatcagaagaaggataaacgcctggcatatctcctacagcagacagacgagtatgtggccaatctcaccgaactggtcagacagcataaagcagcccaggtcgctaaagagaaaaaaaagaagaagaaaaagaaaaaggctgagaatgccgagggacagacccccgctatcggtcccgacggagagcccctggacgagacatcccagatgtctgacctcccagtcaaggtgatacatgtggagtctgggaagatcttgacaggcactgatgcccctaaagcgggtcagctagaagcttggcttgagatgaatccgggatatgaagtggcaccgaggtcagatagcgaggagtctggctcagaggaagaggaggaagaagaggaagaggaacagccccaggccgcccagccccctactcttccagtcgaagaaaagaaaaaaattcccgacccagactcagatgatgtcagcgaggtggacgccagacacattatcgagaatgccaaacaagatgtggatgacgaatatggagtcagtcaggccctagcccgcggactgcagagctactatgcagtcgctcacgccgttactgaacgggtggacaagcagagtgccctcatggtcaacggagtgctgaagcagtaccagattaaaggcctcgagtggctggttagtctctacaataataacctgaatggtattttagccgatgaaatgggccttggaaagaccattcaaactattgctctaatcacctacctcatggaacataagcgcatcaacggaccttttctgatcattgtccccctctcaactctatcaaattgggcctacgagtttgacaaatgggcccccagtgtggtgaaggtcagctataaaggaagtcctgccgcgcggagagccttcgtgccacagctgagatctggtaaatttaacgtgctcctgaccacttatgaatacattattaaagacaagcacatcctggctaagattcggtggaagtatatgatcgtggatgaggggcatcggatgaagaaccaccactgtaaactgacccaggtgttgaatactcactatgtggcaccccgacggctcctgctcactggaacgccactgcaaaacaagctgccagagttgtgggctctgctgaatttccttttgcctaccattttcaaaagctgttctacattcgagcaatggtttaacgccccattcgctatgacaggtgaaaaggtcgacctgaatgaagaagagacaatactgattattcgtagactgcacaaagtgttaaggccattcctcttgcgcagactgaagaaggaagtagaggcacagctgccggagaaggtagagtacgttattaagtgtgatatgagcgcactgcagcgcgtcctttatagacatatgcaagccaagggcgtgctgttgacggacggctcagaaaaagacaaaaaggggaagggtggcactaaaaccctgatgaataccatcatgcagctgcggaagatctgcaatcatccatatatgttccagcacatcgaggaatccttctctgaacacctgggattcacaggtggaattgttcaggggctggatttgtaccgagcttctgggaaatttgagctcctggaccggattttgccaaagttgcgggcaaccaaccacaaggtcctgctgttttgccaaatgactagtctaatgacaattatggaggactattttgcataccgtgggttcaagtacctgagactggacggcacgacaaaggctgaagataggggcatgcttttgaaaaccttcaatgagccagggtcagaatacttcatatttctactgtctacgagggctgggggcctaggacttaacctacagagtgccgatacagtgattatattcgacagcgactggaacccacaccaagacctgcaggcgcaagatcgtgcccatcgcattggccagcagaacgaagtgcgtgtgctgcgtctgtgtacagtcaattcggtcgaggagaaaatcctggcggctgctaaatacaagctcaacgtagatcagaaagtgatccaagccggaatgtttgaccaaaagtctagcagtcatgagcgccgggcctttttgcaggccatcctggaacacgaagaacaagacgaatcacgccattgttctaccggtagtggctccgcctcttttgcacataccgctccaccacccgcgggagtcaatccagacctggaagagccccctctgaaggaagaagatgaagtccctgatgacgaaaccgtgaatcagatgatcgcgaggcacgaagaagagtttgacctgttcatgcgaatggacttggaccgtcggcgcgaggaggcgcgaaaccccaagcggaaaccgcgccttatggaggaagatgaactgccctcctggatcatcaaggatgatgctgaagtggaaagactgacatgcgaggaggaagaggagaaaatgttcggaaggggatccaggcaccggaaggaggtggactactctgactccctcaccgagaagcagtggcttaagaaaattacaggcaaagacatacacgacaccgcaagttcagtggccagggggctgcagttccagcggggccttcaattttgcacccgtgctagtaaagcaatcgaagagggtactttggaagaaattgaagaagaagtgagacagaagaagagctctcgcaaacgcaagagggactcagatgctggcagttctactccaacaacatccactcgctcacgggacaaagatgacgagtccaaaaaacagaagaaacgtggcagacctccagcggaaaagttgagtcctaaccctcctaatctgactaaaaagatgaagaaaatagtggacgccgtgatcaaatataaagactccagcagcggcaggcagctgtccgaggtctttatacagctgccctcaaggaaggagctgccagagtattatgagttgattaggaagcccgtagattttaagaaaattaaagagcgcattagaaaccataaatatcgctcactcaacgacctcgaaaaagacgtgatgcttctatgtcagaatgcccagacattcaatcttgagggtagcctaatctatgaggattccattgttctgcagtcagtgtttactagcgttagacagaagatagaaaaggaagatgattctgaaggtgaagaatcggaagaggaggaggaaggtgaagaagagggctcagagtctgagtctaggagtgtgaaggtcaagatcaagttgggaaggaaggagaaagcccaggacaggctgaagggtgggagacgaaggccctcacggggttcccgggcaaagcccgttgttagcgatgacgactctgaagaggagcaggaagaagatcgcagtgggagcgggtcggaagaggactag

SEQ ID NO: 320796 - DNA, 5039 bp, Artificial Sequence
  derived and/or modified sequence
atgtccacccccgatcctccgttgggaggaacacccagacctggccctagtccaggccctggtcccagccctggcgctatgctcgggccttcccctggcccatcacccggtagcgctcattcaatgatggggccaagccccggtcctccgagcgccggacacccaatccccacccaagggccaggcggatatccgcaggacaacatgcatcaaatgcacaaaccaatggagtctatgcacgagaagggaatgtcagatgaccccagatacaatcagatgaaaggaatgggaatgagatcaggcggtcatgccggaatgggccctccgccttcgccaatggatcagcactcccagggttacccatcgcccctcggcggatccgagcatgccagtagtcccgttcctgcgtctggaccctcttcaggccctcaaatgtctagcggccctggcggagccccactggatggtgccgatccacaggctctgggacagcagaacaggggtcccacccccttcaaccagaatcagttgcatcagcttcgcgctcagataatggcttataaaatgctagcaagagggcagcccttaccggatcatctgcagatggcggtccagggtaagaggcctatgcccggaatgcaacagcagatgcccaccttgccccctccttcagtaagcgccaccggcccaggaccaggacctgggccaggacccggaccaggcccagggccagcgcctcccaattacagtcgtccccacgggatgggaggtcccaacatgcccccacccggaccctccggtgttcctcccggtatgcccggacagccccctggcggacccccaaaaccttggcctgagggacctatggccaacgccgctgcaccaacctctacaccccagaaattaatcccccctcagcctactggcaggccttctcctgcaccccctgctgtgccccctgcagcttctcccgttatgccacctcagactcagtctcccggacagccagcccagccagcaccaatggtgccgctgcatcagaaacagtctaggatcactcctatacagaagcccagaggtctggatcccgttgaaattcttcaagaaagagagtatcgcttacaggctcgaatcgcccatcggattcaggaattggagaatctccccggaagcctggccggagacctgcgcacgaaagccacaattgagctcaaggctctcaggctgcttaatttccaaagacagcttcgccaggaagttgtggtttgcatgcgacgagatactgcactggagactgcactgaacgctaaagcgtacaaacggagcaaaagacagtcccttagggaagccaggatcaccgagaagctagaaaagcagcagaagatcgagcaagagcgcaaacgtcggcagaagcaccaagaatacttaaatagcatccttcagcatgcaaaagatttcaaggaatatcatcggagtgtgaccgggaaaattcaaaagttaaccaaagccgtggctacctaccacgccaatactgagagagaacagaaaaaagaaaatgagagaatcgagaaggaacgcatgaggaggttgatggccgaggacgaagagggataccggaagttaatcgaccagaagaaggataaaaggctagcttatctgctgcagcagactgacgagtacgtggccaatctaacagaactggtgcgccagcataaggctgctcaggtggccaaagaaaagaaaaaaaagaaaaagaagaagaaagccgagaatgcagaaggacagacccctgccatcggcccagacggggaacccctcgatgaaacttcccagatgagtgacttgccggtgaaggtaattcatgtcgagagcggtaaaatcctgaccggcacggacgccccaaaggctggtcagttggaggcctggctggaaatgaacccaggatacgaagtggccccaagatccgatagcgaggagtcgggctcagaagaggaagaggaagaagaggaggaggagcaacctcaggccgcacaaccacccaccctgccagtggaggagaagaaaaagatccccgatcccgatagcgatgacgtctccgaagttgatgccaggcacattattgaaaacgcgaagcaggacgttgatgatgaatatggggtgtcccaggcactggccagaggcctccagagttactatgccgtggctcatgccgtaacggagcgcgtggataaacagagtgcactgatggttaatggcgtgctgaaacagtatcaaatcaagggtttagaatggttggtgagcctgtacaataataatctgaacggcattttggcagatgaaatgggcttgggcaagacaatccagaccatcgctctaatcacgtatttgatggaacataagcgcattaatggaccctttctaattatcgtgccattgagcactttatccaactgggcgtatgaattcgacaagtgggctccgagcgtcgtaaaagtttcctataaaggtagtcccgctgctcgcagggcattcgtgccgcagctgcggagcggcaagttcaatgtcctgctcaccacctacgagtatatcataaaggataagcacatcctggcaaaaataagatggaagtacatgattgtggatgaagggcatcgcatgaaaaatcatcactgtaaactgacccaggtcctgaatacccactatgtagccccacggagacttctgttaactggtacaccgctccaaaacaaactgcccgaactctgggctctgctcaatttcttactaccaacgatattcaaatcttgtagcacctttgagcagtggttcaatgccccattcgccatgaccggcgagaaagtggacctgaatgaagaagaaaccatactgataatccgtcgtttgcacaaagtcctgaggccattcctgcttcggcgacttaaaaaggaggtcgaggcccagctgcccgagaaagtggaatacgtgataaagtgtgatatgtctgcactccagagagtcctgtaccgccacatgcaggcgaaaggagtcttacttacagatggcagcgagaaggacaaaaaagggaaaggaggcaccaaaacacttatgaacacaatcatgcagttaagaaaaatctgtaaccatccgtatatgttccagcatatagaggagtcctttagcgagcacctgggattcaccggtggaattgtgcagggcttagatctgtaccgcgctagtggaaagtttgagctgctggatcgcattcttccaaagctccgggctaccaatcacaaagtgctgctgttctgtcagatgaccagccttatgaccattatggaagactacttcgcataccggggattcaagtatctgagactggacggaaccacaaaagcagaggatcgcggaatgttactcaaaaccttcaatgagcccggttcggagtacttcatttttctgttgagcacccgagctggcggacttggacttaacttgcaatctgcagatactgttatcatctttgactctgactggaatcctcatcaggaccttcaggcacaggaccgcgctcatcgcatcggacagcagaacgaagtcagggtgctgaggctatgtactgtcaactcagttgaggagaagatattggccgcagccaaatataagctgaacgttgaccagaaggtaattcaagctggtatgttcgaccagaaatcgtcttcccatgaacgtcgcgcatttctgcaggccatcctagaacacgaagagcaggacgagtctcgtcattgctccacgggttccggatctgcgtcatttgcacatacggccccacctccggcaggcgtgaacccagatctggaggagccgcctctgaaggaggaggacgaggttcctgatgatgaaacagttaaccaaatgattgctaggcatgaagaggagttcgacctttttatgaggatggatttagacagacggagagaggaagcccgaaacccaaaaagaaagccaagacttatggaggaagatgagctcccaagctggatcatcaaagatgatgcagaagtcgagcggttgacttgtgaagaagaagaggaaaagatgtttgggcgagggagccggcaccgcaaagaagtagactacagcgattcccttaccgaaaagcagtggttaaagaagatcaccggcaaagacattcacgacacggcttcatccgtagcgaggggactgcaatttcaaaggggactgcaattctgtacacgagcttccaaggcgattgaagaagggaccctggaagagattgaggaagaggttcggcaaaaaaagagttcacgtaaacgcaaaagagattctgacgccggatccagtactccgaccacgtcgacgcggtcccgggataaggacgacgagtctaagaagcaaaagaaacggggaaggccaccagcagagaagctgtcccccaatcccccaaatctgactaaaaagatgaagaaaattgtcgacgccgtcatcaagtataaggacagctcatcggggaggcagttgtccgaggtgttcattcagctgccatccaggaaggagctgcccgaatactacgaactgattcgcaagccggtagattttaagaagattaaagagcgcatcagaaatcacaagtatcggtctctgaacgacctcgaaaaggatgtgatgctgctatgccagaatgcacagacattcaacctggaaggctcccttatttatgaggattccattgtgctccagtctgtgttcacaagtgttaggcaaaaaatcgagaaggaggatgactctgaaggggaagaatcggaagaggaagaggaaggagaagaagaaggttcagagtcagaaagcagatccgtcaaagtcaagatcaaactgggtagaaaggagaaagcacaggacaggctgaagggagggaggagaagaccttcccgcggttcaagagcaaagcccgtggtgagcgacgacgattctgaggaggagcaggaggaggacagatccggatctgggtccgaagaagatta

SEQ ID NO: 320797 - DNA, 5790 bp, Artificial Sequence
  derived and/or modified sequence
ggagaggccgccgcggtgctgagggggaggggagccggcgagcgcgcgcgcagcgggggcgcgggtggcgcgcgtgtgtgtgaagggggggcggtggccgaggcgggcgggcgcgcgcgcgaggcttcccctcgtttggcggcggcggcggcttctttgtttcgtgaagagaagcgagacgcccattctgcccccggccccgcgcggaggggcgggggaggcgccgggaagtcgacggcgccggcggctcctgcaggaggccactgtctgcagctcccgtgaagatgtccactccagacccacccctgggcggaactcctcggccaggtccttccccgggccctggcccttcccctggagccatgctgggccctagcccgggtccctcgccgggctccgcccacagcatgatggggcccagcccagggccgccctcagcaggacaccccatccccacccaggggcctggagggtaccctcaggacaacatgcaccagatgcacaagcccatggagtccatgcatgagaagggcatgtcggacgacccgcgctacaaccagatgaaaggaatggggatgcggtcagggggccatgctgggatggggcccccgcccagccccatggaccagcactcccaaggttacccctcgcccctgggtggctctgagcatgcctctagtccagttccagccagtggcccgtcttcggggccccagatgtcttccgggccaggaggtgccccgctggatggtgctgacccccaggccttggggcagcagaaccggggcccaaccccatttaaccagaaccagctgcaccagctcagagctcagatcatggcctacaagatgctggccagggggcagcccctccccgaccacctgcagatggcggtgcagggcaagcggccgatgcccgggatgcagcagcagatgccaacgctacctccaccctcggtgtccgcaacaggacccggccctggccctggccctggccccggcccgggtcccggcccggcacctccaaattacagcaggcctcatggtatgggagggcccaacatgcctcccccaggaccctcgggcgtgccccccgggatgccaggccagcctcctggagggcctcccaagccctggcctgaaggacccatggcgaatgctgctgcccccacgagcacccctcagaagctgattcccccgcagccaacgggccgcccttcccccgcgccccctgccgtcccacccgccgcctcgcccgtgatgccaccgcagacccagtcccccgggcagccggcccagcccgcgcccatggtgccactgcaccagaagcagagccgcatcacccccatccagaagccgcggggcctcgaccctgtggagatcctgcaggagcgcgagtacaggctgcaggctcgcatcgcacaccgaattcaggaacttgaaaaccttcccgggtccctggccggggatttgcgaaccaaagcgaccattgagctcaaggccctcaggctgctgaacttccagaggcagctgcgccaggaggtggtggtgtgcatgcggagggacacagcgctggagacagccctcaatgctaaggcctacaagcgcagcaagcgccagtccctgcgcgaggcccgcatcactgagaagctggagaagcagcagaagatcgagcaggagcgcaagcgccggcagaagcaccaggaatacctcaatagcattctccagcatgccaaggatttcaaggaatatcacagatccgtcacaggcaaaatccagaagctgaccaaggcagtggccacgtaccatgccaacacggagcgggagcagaagaaagagaacgagcggatcgagaaggagcgcatgcggaggctcatggctgaagatgaggaggggtaccgcaagctcatcgaccagaagaaggacaagcgcctggcctacctcttgcagcagacagacgagtacgtggctaacctcacggagctggtgcggcagcacaaggctgcccaggtcgccaaggagaaaaagaagaaaaagaaaaagaagaaggcagaaaatgcagaaggacagacgcctgccattgggccggatggcgagcctctggacgagaccagccagatgagcgacctcccggtgaaggtgatccacgtggagagtgggaagatcctcacaggcacagatgcccccaaagccgggcagctggaggcctggctcgagatgaacccggggtatgaagtagctccgaggtctgatagtgaagaaagtggctcagaagaagaggaagaggaggaggaggaagagcagccgcaggcagcacagcctcccaccctgcccgtggaggagaagaagaagattccagatccagacagcgatgacgtctctgaggtggacgcgcggcacatcattgagaatgccaagcaagatgtcgatgatgaatatggcgtgtcccaggcccttgcacgtggcctgcagtcctactatgccgtggcccatgctgtcactgagagagtggacaagcagtcagcgcttatggtcaatggtgtcctcaaacagtaccagatcaaaggtttggagtggctggtgtccctgtacaacaacaacctgaacggcatcctggccgacgagatgggcctggggaagaccatccagaccatcgcgctcatcacgtacctcatggagcacaaacgcatcaatgggcccttcctcatcatcgtgcctctctcaacgctgtccaactgggcgtacgagtttgacaagtgggccccctccgtggtgaaggtgtcttacaagggatccccagcagcaagacgggcctttgtcccccagctccggagtgggaagttcaacgtcttgctgacgacgtacgagtacatcatcaaagacaagcacatcctcgccaagatccgttggaagtacatgattgtggacgaaggtcaccgcatgaagaaccaccactgcaagctgacgcaggtgctcaacacgcactatgtggcaccccgccgcctgctgctgacgggcacaccgctgcagaacaagcttcccgagctctgggcgctgctcaacttcctgctgcccaccatcttcaagagctgcagcaccttcgagcagtggtttaacgcaccctttgccatgaccggggaaaaggtggacctgaatgaggaggaaaccattctcatcatccggcgtctccacaaagtgctgcggcccttcttgctccgacgactcaagaaggaagtcgaggcccagttgcccgaaaaggtggagtacgtcatcaagtgcgacatgtctgcgctgcagcgagtgctctaccgccacatgcaggccaagggcgtgctgctgactgatggctccgagaaggacaagaagggcaaaggcggcaccaagaccctgatgaacaccatcatgcagctgcggaagatctgcaaccacccctacatgttccagcacatcgaggagtccttttccgagcacttggggttcactggcggcattgtccaagggctggacctgtaccgagcctcgggtaaatttgagcttcttgatagaattcttcccaaactccgagcaaccaaccacaaagtgctgctgttctgccaaatgacctccctcatgaccatcatggaagattactttgcgtatcgcggctttaaatacctcaggcttgatggaaccacgaaggcggaggaccggggcatgctgctgaaaaccttcaacgagcccggctctgagtacttcatcttcctgctcagcacccgggctggggggctcggcctgaacctccagtcggcagacactgtgatcatttttgacagcgactggaatcctcaccaggacctgcaagcgcaggaccgagcccaccgcatcgggcagcagaacgaggtgcgtgtgctccgcctctgcaccgtcaacagcgtggaggagaagatcctagctgcagccaagtacaagctcaacgtggaccagaaggtgatccaggccggcatgttcgaccagaagtcctccagccatgagcggcgcgccttcctgcaggccatcctggagcacgaggagcaggatgagagcagacactgcagcacgggcagcggcagtgccagcttcgcccacactgcccctccgccagcgggcgtcaaccccgacttggaggagccacctctaaaggaggaagacgaggtgcccgacgacgagaccgtcaaccagatgatcgcccggcacgaggaggagtttgatctgttcatgcgcatggacctggaccgcaggcgcgaggaggcccgcaaccccaagcggaagccgcgcctcatggaggaggacgagctcccctcgtggatcatcaaggacgacgcggaggtggagcggctgacctgtgaggaggaggaggagaagatgttcggccgtggctcccgccaccgcaaggaggtggactacagcgactcactgacggagaagcagtggctcaagaaaattacaggaaaagatatccatgacacagccagcagtgtggcacgtgggctacaattccagcgtggccttcagttctgcacacgtgcgtcaaaggccatcgaggagggcacgctggaggagatcgaagaggaggtccggcagaagaaatcatcacggaagcgcaagcgagacagcgacgccggctcctccaccccgaccaccagcacccgcagccgcgacaaggacgacgagagcaagaagcagaagaagcgcgggcggccgcctgccgagaaactctcccctaacccacccaacctcaccaagaagatgaagaagattgtggatgccgtgatcaagtacaaggacagcagcagtggacgtcagctcagcgaggtcttcatccagctgccctcgcgaaaggagctgcccgagtactacgagctcatccgcaagcccgtggacttcaagaagataaaggagcgcattcgcaaccacaagtaccgcagcctcaacgacctagagaaggacgtcatgctcctgtgccagaacgcacagaccttcaacctggagggctccctgatctatgaagactccatcgtcttgcagtcggtcttcaccagcgtgcggcagaaaatcgagaaggaggatgacagtgaaggcgaggagagtgaggaggaggaagagggcgaggaggaaggctccgaatccgaatctcggtccgtcaaagtgaagatcaagcttggccggaaggagaaggcacaggaccggctgaagggcggccggcggcggccgagccgagggtcccgagccaagccggtcgtgagtgacgatgacagtgaggaggaacaagaggaggaccgctcaggaagtggcagcgaagaagactgagccccgacattccagtctcgaccccgagcccctcgttccagagctgagatggcataggccttagcagtaacgggtagcagcagatgtagtttcagacttggagtaaaactgtataaacaaaagaatcttccatatttatacagcagagaagctgtaggactgtttgtgactggccctgtcctggcatcagtagcatctgtaacagcattaactgtcttaaagagagagagagagaattccgaattggggaacacacgatacctgtttttcttttccgttgctggcagtactgttgcgccgcagtttggagtcactgtagttaagtgtggatgcatgtgcgtcaccgtccactcctcctactgtattttattggacaggtcagactcgccgggggcccggcgagggtatgtcagtgtcactggatgtcaaacagtaataaattaaaccaacaacaaaacgcacagcc

SEQ ID NO: 320798 - protein, 524 aa, Artificial Sequence
  derived and/or modified sequence
MSLLSLPWLGLRPVATSPWLLLLLVVGSWLLARILAWTYAFYNNCRRLQCFPQPPKRNWFWGHLGLITPTEEGLKNSTQMSATYSQGFTIWLGPIIPFIVLCHPDTIRSITNASAAIAPKDNLFIRFLKPWLGEGILLSGGDKWSRHRRMLTPAFHFNILKSYITIFNKSANIMLDKWQHLASEGSSCLDMFEHISLMTLDSLQKCIFSFDSHCQERPSEYIATILELSALVEKRSQHILQHMDFLYYLSHDGRRFHRACRLVHDFTDAVIRERRRTLPTQGIDDFFKDKAKSKTLDFIDVLLLSKDEDGKALSDEDIRAEADTFMFGGHDTTASGLSWVLYNLARHPEYQERCRQEVQELLKDRDPKEIEWDDLAQLPFLTMCVKESLRLHPPAPFISRCCTQDIVLPDGRVIPKGITCLIDIIGVHHNPTVWPDPEVYDPFRFDPENSKGRSPLAFIPFSAGPRNCIGQAFAMAEMKVVLALMLLHFRFLPDHTEPRRKLELIMRAEGGLWLRVEPLNVSLQ

SEQ ID NO: 320799 - DNA, 1688 bp, Artificial Sequence
  derived and/or modified sequence
agctcttccctgggcctcaggtcctcaccctgcatcccctctgccctgcaggatgtcgctgctgagcctgccctggctgggcctcagaccggtggcaacgtccccatggctactcctgctgctggttgtgggctcctggctactcgcccgcatcctggcttggacctatgccttctataacaactgccgccggctccagtgtttcccacagcccccaaaacggaactggttttggggtcacctgggcctgatcactcctacagaggagggcttgaagaactcgacccagatgtcggccacctattcccagggctttacgatatggctgggtcccatcatccccttcatcgttttatgccaccctgacaccatccggtctatcaccaatgcctcagctgccattgcacccaaggataatctcttcatcaggttcctgaagccctggctgggagaagggatactgctgagtggcggtgacaagtggagccgccaccgtcggatgctgacgcccgccttccatttcaacatcctgaagtcctatataacgatcttcaacaagagtgcaaacatcatgcttgacaagtggcagcacctggcctcagagggcagcagttgtctggacatgtttgagcacatcagcctcatgaccttggacagtctacagaaatgcatcttcagctttgacagccattgtcaggagaggcccagtgaatatattgccaccatcttggagctcagtgcccttgtagagaaaagaagccagcatatcctccagcacatggactttctgtattacctctcccatgacgggcggcgcttccacagggcctgccgcctggtgcatgacttcacagacgctgtcatccgggagcggcgtcgcaccctccccactcagggtattgatgattttttcaaagacaaagccaagtccaagactttggatttcattgatgtgcttctgctgagcaaggatgaagatgggaaggcattgtcagatgaggatataagagcagaggctgacaccttcatgtttggaggccatgacaccacggccagtggcctctcctgggtcctgtacaaccttgcgaggcacccagaataccaggagcgctgccgacaggaggtgcaagagcttctgaaggaccgcgatcctaaagagattgaatgggacgacctggcccagctgcccttcctgaccatgtgcgtgaaggagagcctgaggttacatcccccagctcccttcatctcccgatgctgcacccaggacattgttctcccagatggccgagtcatccccaaaggcattacctgcctcatcgatattataggggtccatcacaacccaactgtgtggccggatcctgaggtctacgaccccttccgctttgacccagagaacagcaaggggaggtcacctctggcttttattcctttctccgcagggcccaggaactgcatcgggcaggcgttcgccatggcggagatgaaagtggtcctggcgttgatgctgctgcacttccggttcctgccagaccacactgagccccgcaggaagctggaattgatcatgcgcgccgagggcgggctttggctgcgggtggagcccctgaatgtaagcttgcagtgactttctgacccatccacctgtttttttgcagattgtcatgaataaaacggtgctgtcacct

SEQ ID NO: 320800 - DNA, 2044 bp, Artificial Sequence
  derived and/or modified sequence
gctgccaactgtcatgataagtatatgcttttatctgaacacccttgtcttggaagggcagggtggaggtaaacttggggttcagagtcccctctaaccaccctccaacttcccctgcaaactcccaagaaggtactgagacctgagaattcagtgctcgtgctggggcaccctgagctgcacccagtgggcccaaccccaggttttggctggctgcccaggcacggaagacacacccaggctgtggggattggctgcctcagcccagcccagcccagccccgcctcctacggccttccctagatcaggggccagggccaaagacctcccagcagaagaggagaagaggttgtgtgggacaagctgctcccgacagaaggatgtcgctgctgagcctgccctggctgggcctcagaccggtggcaacgtccccatggctactcctgctgctggttgtgggctcctggctactcgcccgcatcctggcttggacctatgccttctataacaactgccgccggctccagtgtttcccacagcccccaaaacggaactggttttggggtcacctgggcctgatcactcctacagaggagggcttgaagaactcgacccagatgtcggccacctattcccagggctttacgatatggctgggtcccatcatccccttcatcgttttatgccaccctgacaccatccggtctatcaccaatgcctcagctgccattgcacccaaggataatctcttcatcaggttcctgaagccctggctgggagaagggatactgctgagtggcggtgacaagtggagccgccaccgtcggatgctgacgcccgccttccatttcaacatcctgaagtcctatataacgatcttcaacaagagtgcaaacatcatgcttgacaagtggcagcacctggcctcagagggcagcagttgtctggacatgtttgagcacatcagcctcatgaccttggacagtctacagaaatgcatcttcagctttgacagccattgtcaggagaggcccagtgaatatattgccaccatcttggagctcagtgcccttgtagagaaaagaagccagcatatcctccagcacatggactttctgtattacctctcccatgacgggcggcgcttccacagggcctgccgcctggtgcatgacttcacagacgctgtcatccgggagcggcgtcgcaccctccccactcagggtattgatgattttttcaaagacaaagccaagtccaagactttggatttcattgatgtgcttctgctgagcaaggatgaagatgggaaggcattgtcagatgaggatataagagcagaggctgacaccttcatgtttggaggccatgacaccacggccagtggcctctcctgggtcctgtacaaccttgcgaggcacccagaataccaggagcgctgccgacaggaggtgcaagagcttctgaaggaccgcgatcctaaagagattgaatgggacgacctggcccagctgcccttcctgaccatgtgcgtgaaggagagcctgaggttacatcccccagctcccttcatctcccgatgctgcacccaggacattgttctcccagatggccgagtcatccccaaaggcattacctgcctcatcgatattataggggtccatcacaacccaactgtgtggccggatcctgaggtctacgaccccttccgctttgacccagagaacagcaaggggaggtcacctctggcttttattcctttctccgcagggcccaggaactgcatcgggcaggcgttcgccatggcggagatgaaagtggtcctggcgttgatgctgctgcacttccggttcctgccagaccacactgagccccgcaggaagctggaattgatcatgcgcgccgagggcgggctttggctgcgggtggagcccctgaatgtaagcttgcagtgactttctgacccatccacctgtttttttgcagattgtcatgaataaaacggtgctgtcacctctgcctgggcctcactgacagcctgcag

SEQ ID NO: 320801 - protein, 191 aa, Artificial Sequence [sequence omitted]

SEQ ID NO: 320802 - DNA, 576 bp, Artificial Sequence
  derived and/or modified sequence
atgcccgccgccatcgcccccaaggacgacctgagcatcagattcctgaagccctggctgggcgagggcatcctgctgagcggcggcgacaagtggagcagacacagaagaatgctgacccccgccttccacttcaacatcctgaagccctacatcaagatcttcaacagaagcgtgaacatcatgcacgacaagtggcagcacctggccagcgagggcagcagcagactggacatgttcgagcacatcagcctgatgaccctggacagcctgcagaagtgcatcttcagcttcgacagccactgccaggagagacccagcgagtacatcgccaccatcctggagctgagcgccctggtggagaagagaaaccagcacatcctgcagcacatggacttcctgtactacctgagccacgacggctggagattcagaagagcctgcagactggtgcacgacttcaccgacgccgtgatccaggagagaagacacaccctgcccacccagggcatcgtgatcagcagcagaaccaagcccagccccagactgtggatcagcctgatgtgcttctgctag

SEQ ID NO: 320803 - DNA, 576 bp, Artificial Sequence
  derived and/or modified sequence
atgccagccgcaattgcacccaaggatgatctctctattaggtttctgaaaccgtggttgggagaaggcattttactgagtggaggagacaaatggagcaggcacaggcgaatgctaacacctgccttccactttaacatcctgaagccctatataaaaatcttcaaccggtccgtgaacataatgcatgataagtggcagcacctagccagcgaggggtcatcccggctcgacatgttcgagcacatatcactgatgacgttggatagcctgcagaaatgcatcttttcattcgactcgcactgccaagagaggccatccgaatacatcgcgactatcttggagctgtctgcgcttgtagagaagaggaaccagcacattctccagcacatggatttcctgtactacctcagtcacgatggttggcggttccgtcgcgcctgccgtctggtccatgactttaccgatgccgtcattcaggagcgaaggcacaccctgcccactcagggaatcgttatcagtagccgcactaaaccctccccccgtctgtggatttctctcatgtgtttttgctag

SEQ ID NO: 320804 - DNA, 576 bp, Artificial Sequence
  derived and/or modified sequence
atgcctgctgccatcgcccccaaggatgacctgagcatccgcttcctgaagccctggctgggggagggcatcctgctgtctggaggagacaagtggagccgccacaggaggatgctgaccccagccttccacttcaacatcctgaagccctacatcaagatcttcaacagatctgtgaacatcatgcatgacaagtggcagcacctggccagcgagggcagcagccggctggacatgtttgagcacatcagcctgatgaccctggacagcctgcagaagtgcatcttctcctttgacagccactgccaggagcggcccagcgagtacatcgccaccatcctggagctgagcgccctggtggagaagaggaaccagcacatcctgcagcacatggacttcctgtactacctgagccatgatggctggaggttcagaagagcctgccgcctggtgcatgacttcacagatgctgtgatccaggagcggcggcacaccctgcccacccagggcatcgtcatcagcagcaggaccaagcccagcccccggctgtggatcagcctgatgtgcttctgctag

SEQ ID NO: 320805 - DNA, 576 bp, Artificial Sequence
  derived and/or modified sequence
atgcccgccgccatcgcccccaaggacgacctgagcatccggttcctcaagccatggctaggcgaaggcatcctactctcagggggcgacaaatggtctagacaccgccgtatgctcacgccagctttccactttaacattttgaaaccctacattaaaattttcaacagatcagtgaacattatgcatgacaaatggcagcacttagcctccgaaggctcgagccgcttggatatgtttgagcacattagcctaatgacactagattctttgcaaaagtgtatcttctccttcgactcacactgtcaggagcgccccagcgaatatatcgcaacaatcctagagctgtctgccctggttgagaagcgcaatcagcacatcctgcagcatatggattttctctactatctgtcccacgatggctggagattccgccgggcctgtagactcgttcatgattttaccgatgcggtgatccaagagcgccggcacaccctgcccacccagggcatcgtgatttcatccagaacgaaaccatctccaaggttgtggatctccctcatgtgcttttgctag

SEQ ID NO: 320806 - DNA, 576 bp, Artificial Sequence
  derived and/or modified sequence
atgcccgcagctatagcacctaaggatgacctttctatccggtttctgaagccgtggcttggcgagggcatcctgctttccggcggagacaaatggtctaggcatcggagaatgctcacacctgcgttccacttcaatattcttaagccctatatcaagatcttcaaccgtagtgtgaatattatgcatgacaagtggcagcacctcgcttcggaagggtcctctcgcctcgacatgttcgaacacatctctttgatgactttggactctctccagaagtgtatattttcctttgacagtcactgtcaggaacgtccaagcgagtacattgcaacgattctagagcttagcgcactcgtcgagaagcgcaatcagcacattctgcagcacatggacttcctgtactatctgtcacacgacggctggcgattccgtcgcgcttgcaggcttgtgcacgatttcaccgatgcagtgatccaagagcgccgacacaccttacccacacagggcatcgtcattagtagcagaactaagccgagcccgagattatggattagtttaatgtgtttttgctag

SEQ ID NO: 320807 - DNA, 1162 bp, Artificial Sequence
  derived and/or modified sequence
gagactttccctgggcctcaggatctcaccctccatcctgtctgccctgcaggatgccgcagctgagcctgtcctggctgggcctcgggcaggtggcagcattcccgtggctgctcctgctgctggctggggcctcccggctcctggccggcttcctggcctggacctatgccttctatgacaactgccgccgccttcagtactttccacaacccccaaaacagaaatggttttggggtcaaccaggacctcatcattgctacagaggaaggcttgaagaacttgacccagatgtcagccacctatccccagggctttaggatatggctgggtcccatcttccccttcatcgttttatgccaccctgacatcgtccggtctatcaccaatgcctcaggcccctgatggtcctcattcatgccagctgctattgcgcccaaggatgatctctccatcaggttcctgaagccctggctgggagaagggatactgctgagtggcggtgacaagtggagccgccaccgtcggatgctgacgcccgccttccatttcaacatcctgaaaccctatataaagatcttcaacaggagtgtgaacatcatgcacgacaagtggcagcacctggcctcagagggcagcagtcgtctggacatgtttgagcacatcagcctcatgaccttggacagtctgcagaaatgcatcttcagctttgacagccattgtcaggagaggcccagtgaatatattgctaccatcttggagctcagtgcccttgtagaaaaaagaaaccagcatatcctccagcacatggactttctgtattacctctcccatgacgggtggcgcttccgcagggcctgccgcctggtgcacgacttcacagatgccgtcatccaggagcggcgccatacccttcccactcagggtattgtgatttcctcaagaacaaagccaagtcctagactttggatttcattgatgtgcttctgctgagcaagggaccaaagacaaggcaaaggagctggggggaagaccttggaatgggggctctggtgatggtgaacaagagagatctagacattcagagtgggtttgagtttctggaagaagatcggaccttcagagattgtctcaggtgagactcgggagtctcagagatagt

SEQ ID NO: 320808 - DNA, 378 bp, Artificial Sequence
  derived and/or modified sequence
atgagagtggtgatggccagactgctgagcgagggcgagcagggcatccccaccgcctgcgccgccttcgcccagcagcccgccggccccagaagaggcctggccggcgtgggcgagggcggcccccagtgcagctgggtgaactacagatgcaccctggagttcctggtgagcctgctgggcaccgacctggccagaggcagaggcaacagcgccagcggccccaccgcccccgccgacagcaagcagctgatgaacagcggcagccccgccagagacaacgcccccagccagagattctgcaccaacctgagcgagggcctgagattcggcatcagccccagctggagagaggccctgtacggctgccacgcctag

SEQ ID NO: 320809 - DNA, 474 bp, Artificial Sequence
  derived and/or modified sequence
atggtgggcagaatgaagctgctgcccaacagaatcagaaccctggccctgaccgccatcggcgtggtgctgctgggcgtggacgaccccggcgcccccagcgaccaggtggaggtgcacctggagctggacctgcccacccagctgaccagcgtgtggcaggtgatgagcaccgtgcccctggcccccctgcccggccagctgagcctgctgggcccccccggcgccctgggcttcccccagcagggcggccccacccagctgcccctgctgctgagagaggtgggcgtggagcacaaggagcacatcggcggcagaagatgcggcggccccagacccgccctgagcagctaccccggccacctgctgctgcagggccccagagtgctgcagcccctgggcgagagacccggccacctgcagaaccacgccgcccagggcaagggcgacctgggccagagcgacagcgagtag

SEQ ID NO: 320810 - DNA, 378 bp, Artificial Sequence
  derived and/or modified sequence
atgcgcgttgtgatggccaggctactgtccgagggggaacagggaattcccactgcttgcgccgctttcgctcagcagcccgcaggtcctcgccgcggccttgccggcgtcggagagggcggaccgcaatgcagctgggtgaactatcggtgtaccctcgaatttctcgtgtctctgctgggcacggatctcgcccggggacgagggaactctgctagcggacctacagcgccggccgatagtaagcaactcatgaatagtggctctcccgctcgcgacaacgccccttcccaacggttttgtacgaacttgtcagaaggcctccgctttggtatctcgccatcttggagagaagccctctacgggtgtcacgcatag

SEQ ID NO: 320811 - DNA, 378 bp, Artificial Sequence
  derived and/or modified sequence
atgcgggtggtgatggcccggctgctgagcgagggcgagcagggcattccaactgcttgcgccgctttcgcacaacagccagcagggccacggcggggcctggccggagttggagaaggagggccccagtgtagctgggtcaattatcgctgtactctggagtttctagttagcctgctgggtaccgacctggccagaggaaggggcaattcagcctctggccccaccgcccccgccgactccaaacagctcatgaatagtggttctcccgccagagacaatgccccttctcagagattctgcactaacctgtccgaaggactccgttttggcatttcccctagttggcgggaagccctttacggctgtcacgcatag

SEQ ID NO: 320812 - DNA, 378 bp, Artificial Sequence
  derived and/or modified sequence
atgcgagttgttatggccagactgctgagcgagggagaacagggcatacccactgcgtgcgctgccttcgctcagcagcccgctggacccagacgcggactcgcaggcgtgggagaaggtgggcctcagtgtagctgggtgaattaccggtgtacgctcgagttcctggtgtcccttctgggaacagatttggccaggggcagggggaattcagctagcggcccaacggccccagccgactctaagcagctcatgaacagcggcagccccgctagggataatgccccttcccaacgtttctgtaccaatctgtctgaaggattgcggttcggtattagcccaagctggcgggaggccctgtacgggtgccatgcttag

SEQ ID NO: 320813 - protein, 343 aa, Artificial Sequence
  derived and/or modified sequence
MWPNGSSLGPCFRPTNITLEERRLIASPWFAASFCVVGLASNLLALSVLAGARQGGSHTRSSFLTFLCGLVLTDFLGLLVTGTIVVSQHAALFEWHAVDPGCRLCRFMGVVMIFFGLSPLLLGAAMASERYLGITRPFSRPAVASQRRAWATVGLVWAAALALGLLPLLGVGRYTVQYPGSWCFLTLGAESGDVAFGLLFSMLGGLSVGLSFLLNTVSVATLCHVYHGQEAAQQRPRDSEVEMMAQLLGIMVVASVCWLPLLVFIAQTVLRNPPAMSPAGQLSRTTEKELLIYLRVATWNQILDPWVYILFRRAVLRRLQPRLSTRPRSLSLQPQLTQRSGLQ

SEQ ID NO: 320814 - DNA, 1032 bp, Artificial Sequence
  derived and/or modified sequence
atgtggcccaacggcagcagcctgggcccctgcttcagacccaccaacatcaccctggaggagagaagactgatcgccagcccctggttcgccgccagcttctgcgtggtgggcctggccagcaacctgctggccctgagcgtgctggccggcgccagacagggcggcagccacaccagaagcagcttcctgaccttcctgtgcggcctggtgctgaccgacttcctgggcctgctggtgaccggcaccatcgtggtgagccagcacgccgccctgttcgagtggcacgccgtggaccccggctgcagactgtgcagattcatgggcgtggtgatgatcttcttcggcctgagccccctgctgctgggcgccgccatggccagcgagagatacctgggcatcaccagacccttcagcagacccgccgtggccagccagagaagagcctgggccaccgtgggcctggtgtgggccgccgccctggccctgggcctgctgcccctgctgggcgtgggcagatacaccgtgcagtaccccggcagctggtgcttcctgaccctgggcgccgagagcggcgacgtggccttcggcctgctgttcagcatgctgggcggcctgagcgtgggcctgagcttcctgctgaacaccgtgagcgtggccaccctgtgccacgtgtaccacggccaggaggccgcccagcagagacccagagacagcgaggtggagatgatggcccagctgctgggcatcatggtggtggccagcgtgtgctggctgcccctgctggtgttcatcgcccagaccgtgctgagaaacccccccgccatgagccccgccggccagctgagcagaaccaccgagaaggagctgctgatctacctgagagtggccacctggaaccagatcctggacccctgggtgtacatcctgttcagaagagccgtgctgagaagactgcagcccagactgagcaccagacccagaagcctgagcctgcagccccagctgacccagagaagcggcctgcagtag

SEQ ID NO: 320815 - DNA, 1032 bp, Artificial Sequence
  derived and/or modified sequence
atgtggcccaatggctcctctctgggtccatgcttccggccaactaatattacactggaggagcggcggttgatcgctagcccctggtttgcagcttccttctgcgtcgtaggcctggctagcaatctgctcgcactcagcgtgctcgctggcgccaggcaggggggctcccatacacgctcttcgtttctcacgttcctgtgtggactagtactgactgatttcctcgggctcctggtgaccggcactatcgtggtctcacagcatgccgccctgttcgaatggcatgcagtggatccggggtgtcggctgtgtagattcatgggcgtcgtgatgatcttcttcgggttatctcctcttctacttggtgccgctatggccagcgaaagatacttagggattactcggcccttctccaggcctgccgtggcgagtcagcggcgcgcctgggctactgtggggttagtgtgggccgcagccctcgcactaggcctgcttccattgctcggggtcggaaggtatacagtccagtaccctggctcttggtgtttcctcaccctgggcgcagaaagcggagacgtcgccttcggcctcctgtttagcatgctgggaggcctgtcggtcggactgtccttcctgctgaataccgtctcagtagccactctttgccacgtgtatcatggccaggaggcagcccaacagcggccgagagactctgaagtcgaaatgatggctcaattattaggcattatggtggttgcttctgtatgctggctgccactactggtatttatagctcagactgtgctccggaatcctcctgccatgtctcccgccggtcagctctcccgaacaactgaaaaggaactgctaatatacttgcgcgtcgccacatggaatcagattctggacccctgggtctacatcctcttccgccgcgctgtcctaaggaggctgcaaccccgcctcagcacccgccctcgttccctgagcctgcagcctcagctgacacaacggtctggtctacaatag

SEQ ID NO: 320816 - DNA, 1032 bp, Artificial Sequence
  derived and/or modified sequence
atgtggcccaacggcagcagcctgggcccctgcttccggcccaccaacatcaccctggaggagcggcggctgattgccagcccctggtttgctgccagcttctgtgtggtgggcctggccagcaacctgctggccctgtctgtgctggccggggcccggcagggcggcagccacaccaggagcagcttcctgaccttcctgtgtggcctggtgctgacagacttcctgggcctgctggtgacaggcaccatcgtggtgtcccagcacgccgccctgtttgagtggcatgctgtggaccccggctgccgcctgtgccgcttcatgggcgtggtgatgatcttcttcggcctgagccccctgctgctgggcgccgccatggccagcgagcgctacctgggcatcacccggcccttcagcaggcctgctgtggccagccagaggcgggcctgggccaccgtgggcctggtgtgggccgccgccctggccctgggcctgctgcccctgctgggcgtgggccgctacacagtgcagtacccaggctcctggtgcttcctgaccctgggcgctgagagcggagatgtggccttcggcctgctcttctccatgctgggcggcctgtctgtgggcctgtccttcctgctgaacacagtgtctgtggccaccctgtgccacgtgtaccacggccaggaggccgcccagcagaggccccgggacagcgaggtggagatgatggcccagctgctgggcatcatggtggtggcctctgtgtgctggctgcccctgctggtgttcatcgcccagacagtgctgagaaatcctccagccatgagccctgctggccagctgagcaggaccacagagaaggagctgctgatctacctgcgggtggccacctggaaccagatcctggacccctgggtgtacatcctcttccggcgggctgtgctgcggcggctgcagccccggctgagcacccggcccaggagcctgagcctgcagccccagctgacccagaggagcggcctgcagtag

SEQ ID NO: 320817 - DNA, 1032 bp, Artificial Sequence
  derived and/or modified sequence
atgtggcccaacggcagcagcctgggcccctgcttccggcccaccaatatcacactggaggagcgacggttaattgcctccccctggttcgctgcatccttctgtgtggtgggcctggcttctaaccttcttgccttgtcagtcctcgcaggggcccggcagggcggatctcatactcgatcctcgtttctcactttcctgtgcggcttggtactcaccgacttcctcggtctgcttgttaccggtaccatcgtggtctcccagcacgctgctctgtttgagtggcatgctgttgatcctggctgtcggctctgtaggtttatgggggtggtaatgatcttcttcggcctgtcccccctcctcctgggcgccgctatggcgtctgaacgatacctagggatcacacgcccgttcagtcgaccagctgtggcttcacagagaagagcctgggcaacagtggggttagtgtgggccgccgctttggcgctggggctcctgcctctgctgggcgtcggcagatacaccgtgcagtatcctggctcctggtgcttcctaacgctgggggctgaatctggggatgtcgctttcggactgctattcagcatgctcgggggactgtcagtgggcctgagcttcctgctgaatactgtctcagtggcaactctgtgtcacgtgtatcatggtcaagaagcagcacaacagcgtcctagagattcagaggtcgagatgatggcacagttgctcggcataatggtcgtcgcatcagtgtgctggctgcccctgttagtgttcattgctcaaacagtgcttcggaatccacctgctatgtcacccgccgggcagctatctcggacaaccgagaaagagctcctgatttatctgagagtcgctacatggaaccaaatcttggatccttgggtgtatatcctgttccggcgcgcagtcctcaggcgtctgcaacccaggctgtccactcgccctagatcactcagcctccagccccagctgacacaaaggagcggccttcaatag

SEQ ID NO: 320818 - DNA, 1032 bp, Artificial Sequence
  derived and/or modified sequence
atgtggccgaatggcagtagcctgggcccatgcttccggccaacgaacatcacactcgaagaaagacggctgatcgcttctccatggtttgccgcatccttctgcgtggtgggcttggcttcaaacttgttggccctgtcggtgctggccggtgctagacagggcggtagtcacacaagatcgtctttcctgacatttctctgcggcctcgtcctaactgactttctgggcctcctcgttaccgggacgatagtggtgtcacagcatgctgctctgtttgagtggcatgctgttgaccccggatgtcggctgtgcagatttatgggtgtggtaatgatattcttcggcctctctcctcttctgttgggtgctgccatggcctcagagaggtacctgggaataacccgcccttttagcagaccagccgtagcctcacagcgcagagcttgggcaaccgtaggactagtttgggccgcagcactggccctgggcttacttcccctcctgggggtgggcagatataccgtgcagtatcccggatcttggtgtttcctgaccctgggcgctgagagtggtgatgttgctttcggccttctcttttcaatgctgggcggtctatctgtggggctatctttcctgctgaatactgtctctgtggccaccctttgtcatgtctatcatggccaggaggccgctcagcagcggccacgagactctgaggtggagatgatggcacaactcctgggtatcatggtggtggcttccgtgtgttggttaccactgttagtgtttattgcacagactgtcctacgtaatccccctgctatgagccctgccggacagctgtcacgaacaacagaaaaagagctcttgatctacctgagagtcgcaacctggaatcaaatactggatccctgggtgtatatcctctttcgcagagccgtgctgcgaaggttgcagcccaggctgtccacacggcctcgtagcctcagtttacagcctcagcttactcaacgcagcggacttcagtag

SEQ ID NO: 320819 - DNA, 2601 bp, Artificial Sequence
  derived and/or modified sequence
cccacccgtcccagctcggcttagcccccgcggacccctccaggccgcgaccccagggcgtcctgtgccgccacgccctccatctgtgtgggtcctctgctgggcccgcccctggtcacagccagactgactcagtttccctgggaggtcccgctcgagcccgtccttcccctccctctgcccgcccccagccctcgccccaccctcggcgcccgcacatctgcctgctcagctccagacggcgcccggacccccgggcgcgggatccagccaggtgggagccccgcagatgaggtctctgaaggtgtgcctgaaccagtgccagcctgccctgtctgcagcatcggcctgatggggtggtgactgatccctcagggctccggagccatgtggcccaacggcagttccctggggccctgtttccggcccacaaacattaccctggaggagagacggctgatcgcctcgccctggttcgccgcctccttctgcgtggtgggcctggcctccaacctgctggccctgagcgtgctggcgggcgcgcggcaggggggttcgcacacgcgctcctccttcctcaccttcctctgcggcctcgtcctcaccgacttcctggggctgctggtgaccggtaccatcgtggtgtcccagcacgccgcgctcttcgagtggcacgccgtggaccctggctgccgtctctgtcgcttcatgggcgtcgtcatgatcttcttcggcctgtccccgctgctgctgggggccgccatggcctcagagcgctacctgggtatcacccggcccttctcgcgcccggcggtcgcctcgcagcgccgcgcctgggccaccgtggggctggtgtgggcggccgcgctggcgctgggcctgctgcccctgctgggcgtgggtcgctacaccgtgcaatacccggggtcctggtgcttcctgacgctgggcgccgagtccggggacgtggccttcgggctgctcttctccatgctgggcggcctctcggtcgggctgtccttcctgctgaacacggtcagcgtggccaccctgtgccacgtctaccacgggcaggaggcggcccagcagcgtccccgggactccgaggtggagatgatggctcagctcctggggatcatggtggtggccagcgtgtgttggctgccccttctggtcttcatcgcccagacagtgctgcgaaacccgcctgccatgagccccgccgggcagctgtcccgcaccacggagaaggagctgctcatctacttgcgcgtggccacctggaaccagatcctggacccctgggtgtatatcctgttccgccgcgccgtgctccggcgtctccagcctcgcctcagcacccggcccaggtcgctgtccctccagccccagctcacgcagcgctccgggctgcagtaggaagtggacagagcgcccctcccgcgcctttccgcggagcccttggcccctcggacagcccatctgcctgttctgaggattcaggggctgggggtgctggatggacagtgggcatcagcagcagggttttgggttgaccccaatccaacccggggacccccaactcctccctgatccttttaccaagcactctcccttcctcggcccctttttcccatccagagctcccaccccttctctgcgtccctcccaaccccaggaagggcatgcagacattggaagagggtcttgcattgctatttttttttttagacggagtcttgctctgtcccccaggctggagtgcagtggcgcaatctcagctcactgcaacctccacctcccgggttcaagcgattctcctgcctcagcctcctgagtagctgggactataggcgcgcgccaccacgcccggctaatttttgtatttttagtagagacggggtttcaccgtgttggccaggctggtcttgaactcctgacctcaggtgattcaccagcctcagcctcccaaagtgctgggatcacaggcatgaaccaccacacctggccatttttttttttttttttagacggagtctcactctgtggcccagcctggagtacagtggcacgatctcggctcactgcaacctccgcctcccgggttcaagcgattctcgtgcctcagcctcccgagcagctgggattacaggcgtaagccactgcgcccggccttgcatgctctttgaccctgaatttgacctacttgctggggtacagttgcttccttttgaacctccaacagggaaggctctgtccagaaaggattgaatgtgaacgggggcacccccttttcttgccaaaatatatctctgcctttggttttattttcctttgggtccagaagttttcaatctctggagtttgtgcattgggcctcacccggagcagacgagggcagggctgggaaggatggggagggacatagaggattcggttcctcccccaccttgtttcttgagtgtttcctaatcacttgatgggtggtaccacctagaattcttccagcagcctgtaatgggagggctacaggttagccctggaacctgcaatcaaaccacctttgaatctgtgtgtcattaaaagtagatataaatgggc

SEQ ID NO: 320820 - protein, 658 aa, Artificial Sequence
  derived and/or modified sequence
MNQPQRMAPVGTDKELSDLLDFSMMFPLPVTNGKGRPASLAGAQFGGSGKSGERGAYASFGRDAGVGGLTQAGFLSGELALNSPGPLSPSGMKGTSQYYPSYSGSSRRRAADGSLDTQPKKVRKVPPGLPSSVYPPSSGEDYGRDATAYPSAKTPSSTYPAPFYVADGSLHPSAELWSPPGQAGFGPMLGGGSSPLPLPPGSGPVGSSGSSSTFGGLHQHERMGYQLHGAEVNGGLPSASSFSSAPGATYGGVSSHTPPVSGADSLLGSRGTTAGSSGDALGKALASIYSPDHSSNNFSSSPSTPVGSPQGLAGTSQWPRAGAPGALSPSYDGGLHGLQSKIEDHLDEAIHVLRSHAVGTAGDMHTLLPGHGALASGFTGPMSLGGRHAGLVGGSHPEDGLAGSTSLMHNHAALPSQPGTLPDLSRPPDSYSGLGRAGATAAASEIKREEKEDEENTSAADHSEEEKKELKAPRARTRCQPTPRHSPPSPHQDAHVHRPHAHRTHTGRPSAGPTLFPQPHCLPLAPSRRPPHSPDEDEDDLLPPEQKAEREKERRVANNARERLRVRDINEAFKELGRMCQLHLNSEKPQTKLLILHQAVSVILNLEQQVRERNLNPKAACLKRREEEKVSGVVGDPQMVLSAPHPGLSEAHNPAGHM

SEQ ID NO: 320821 - DNA, 1977 bp, Artificial Sequence
  derived and/or modified sequence
atgaaccagccccagagaatggcccccgtgggcaccgacaaggagctgagcgacctgctggacttcagcatgatgttccccctgcccgtgaccaacggcaagggcagacccgccagcctggccggcgcccagttcggcggcagcggcaagagcggcgagagaggcgcctacgccagcttcggcagagacgccggcgtgggcggcctgacccaggccggcttcctgagcggcgagctggccctgaacagccccggccccctgagccccagcggcatgaagggcaccagccagtactaccccagctacagcggcagcagcagaagaagagccgccgacggcagcctggacacccagcccaagaaggtgagaaaggtgccccccggcctgcccagcagcgtgtacccccccagcagcggcgaggactacggcagagacgccaccgcctaccccagcgccaagacccccagcagcacctaccccgcccccttctacgtggccgacggcagcctgcaccccagcgccgagctgtggagcccccccggccaggccggcttcggccccatgctgggcggcggcagcagccccctgcccctgccccccggcagcggccccgtgggcagcagcggcagcagcagcaccttcggcggcctgcaccagcacgagagaatgggctaccagctgcacggcgccgaggtgaacggcggcctgcccagcgccagcagcttcagcagcgcccccggcgccacctacggcggcgtgagcagccacaccccccccgtgagcggcgccgacagcctgctgggcagcagaggcaccaccgccggcagcagcggcgacgccctgggcaaggccctggccagcatctacagccccgaccacagcagcaacaacttcagcagcagccccagcacccccgtgggcagcccccagggcctggccggcaccagccagtggcccagagccggcgcccccggcgccctgagccccagctacgacggcggcctgcacggcctgcagagcaagatcgaggaccacctggacgaggccatccacgtgctgagaagccacgccgtgggcaccgccggcgacatgcacaccctgctgcccggccacggcgccctggccagcggcttcaccggccccatgagcctgggcggcagacacgccggcctggtgggcggcagccaccccgaggacggcctggccggcagcaccagcctgatgcacaaccacgccgccctgcccagccagcccggcaccctgcccgacctgagcagaccccccgacagctacagcggcctgggcagagccggcgccaccgccgccgccagcgagatcaagagagaggagaaggaggacgaggagaacaccagcgccgccgaccacagcgaggaggagaagaaggagctgaaggcccccagagccagaaccagatgccagcccacccccagacacagcccccccagcccccaccaggacgcccacgtgcacagaccccacgcccacagaacccacaccggcagacccagcgccggccccaccctgttcccccagccccactgcctgcccctggcccccagcagaagacccccccacagccccgacgaggacgaggacgacctgctgccccccgagcagaaggccgagagagagaaggagagaagagtggccaacaacgccagagagagactgagagtgagagacatcaacgaggccttcaaggagctgggcagaatgtgccagctgcacctgaacagcgagaagccccagaccaagctgctgatcctgcaccaggccgtgagcgtgatcctgaacctggagcagcaggtgagagagagaaacctgaaccccaaggccgcctgcctgaagagaagagaggaggagaaggtgagcggcgtggtgggcgacccccagatggtgctgagcgccccccaccccggcctgagcgaggcccacaaccccgccggccacatgtag

SEQ ID NO: 320822 - DNA, 1977 bp, Artificial Sequence
  derived and/or modified sequence
atgaaccaaccgcaacgcatggcaccggttggaaccgataaggaattaagtgatctgcttgacttttccatgatgtttcccttacccgtaactaacgggaaagggcggcctgcttccctggcgggtgctcaatttggtgggagcggcaagtccggggaacgtggcgcttatgcaagcttcggcagagatgccggtgtgggagggctaactcaggccggttttttgagcggtgaactggcgcttaattcgccggggcctctgtctccttcaggcatgaagggcactagccagtactatccctcatactctggcagctcaaggagaagggctgccgacggcagcttagacactcagcccaagaaggtacgcaaagtgcccccagggctcccgagtagtgtttatcccccaagcagtggggaagattacggccgcgacgccaccgcgtatccttcagcaaagacgccatcatcaacctaccccgctcccttctacgtggctgatggctccctgcaccctagcgcggaattatggagtccaccaggccaggccggcttcggccctatgctcggtggggggtcatcaccgctgcccttgccacccgggtctggtcccgttgggtcatcgggcagctccagcaccttcggcggactgcaccagcatgaacggatgggctaccagctgcatggtgcagaagtgaacggcgggcttccttctgcatcgtcattctcctccgctcctggtgctacgtacggcggtgtgtcctcacacaccccacctgtgagtggggcggactccctcttagggagcagagggaccacagctggaagttctggtgacgctctcggaaaggcgctcgcctcgatttattcccccgatcattctagtaacaatttctcatctagccccagtactcctgtgggatcccctcagggccttgcggggacaagccagtggccacgggctggcgcaccaggtgccctaagtccctcttacgatggtggtctgcatggcctccagtcaaagatcgaggaccacctggacgaggctattcatgtcctcagatcacacgccgtagggactgcaggggatatgcacactctgctgcccggccatggcgccctggctagtggatttactggacccatgtccctgggcggccgacacgccggactggttggaggatcgcaccccgaggatggcctggccggcagcacctccctcatgcacaatcacgcggctctgccctcacagccagggactctgcctgatctgagtaggcctccagattcctatagcggtctaggccgagctggcgctacggcagccgcgtctgaaatcaagcgagaggagaaggaagatgaggagaatacatctgctgcagatcattcagaagaggagaagaaagaacttaaggctccgcgggccagaacccgctgccagcccacccccagacactctccgccctcgccacatcaagacgcccatgtgcataggccgcatgcccaccggacacacactggccgaccatcagccggtcctacgttgttcccccagccccactgtctcccacttgctccttcaaggcgcccccctcactctcctgacgaggatgaggacgacctcctgcctcctgaacagaaagccgagcgagaaaaggagagacgggtcgctaataatgcacgggagagacttagagtgcgtgatataaatgaggcgttcaaagaactgggacggatgtgtcagctccatctgaatagcgagaaaccgcaaaccaagctcctgatcctccaccaagctgtaagtgttatcctaaatctggaacagcaagtccgcgagaggaacctcaatccaaaagctgcctgcctaaagagaagggaggaggaaaaggtgtctggggtcgttggtgacccccaaatggtattgagcgcaccacaccctggcttgagcgaagcgcataaccctgctgggcacatgtag

SEQ ID NO: 320823 - DNA, 1977 bp, Artificial Sequence
  derived and/or modified sequence
atgaaccagccccagaggatggcccctgtgggcacagacaaggagctgagtgacctgctggacttctccatgatgttccccctgcctgtgaccaacgggaagggccgcccagccagcctggccggggcccagtttggaggcagcggcaagtctggagagcggggggcctatgccagctttggaagagatgctggggtgggcggcctgacccaggccggcttcctgagcggggagctggccctgaacagccctggccccctgagccccagcggcatgaagggcaccagccagtactaccccagctacagcggcagcagcagaagaagagctgctgatggcagcctggacacccagcccaagaaggtgaggaaggtgcccccaggcctgcccagctctgtgtacccacccagcagcggggaggactatggaagagatgccacagcctaccccagcgccaagacccccagcagcacctacccagcccccttctacgtggctgatggcagcctgcaccccagcgctgagctgtggagccccccaggccaggccggcttcggccccatgctgggcggcggcagcagccccctgcccctgcccccaggcagcggccctgtgggcagcagcggcagcagcagcaccttcggcggcctgcaccagcacgagaggatgggctaccagctgcacggggctgaggtgaatggaggcctgcccagcgccagcagcttcagcagcgcccctggggccacctacggcggcgtgagcagccacaccccacctgtgtctggagctgacagcctgctgggcagccggggcaccacagctggcagcagtggagatgccctgggcaaggccctggccagcatctacagcccagaccacagcagcaacaacttcagcagcagccccagcacccctgtgggcagcccccagggcctggccggcaccagccagtggcccagggctggggcccctggggccctgagccccagctatgatggcggcctgcacggcctgcagagcaagattgaggaccacctggatgaggccatccacgtgctgcggagccatgctgtgggcacagctggggacatgcacaccctgctgcccggccatggagccctggccagcggcttcaccggccccatgagcctgggcggcagacatgctggcctggtgggcggcagccacccagaagatggcctggccggcagcaccagcctgatgcacaaccacgccgccctgcccagccagcccggcaccctgcctgacctgagccggcccccagacagctacagcggcctgggccgggccggggccacagctgctgccagcgagatcaagcgggaggagaaggaggatgaggagaacaccagcgctgctgaccacagcgaggaggagaagaaggagctgaaggccccccgggcccggacccgctgccagcccacccccaggcacagcccccccagcccccaccaggatgcccacgtgcaccggccccacgcccacaggacccacacaggccggcccagcgctggccccaccctcttcccccagccccactgcctgcccctggcccccagccggcggcccccccacagcccagatgaagatgaagatgacctgctgcccccagagcagaaggccgagcgggagaaggagcggcgggtggccaacaatgcccgggagcggctgcgggtgcgggacatcaatgaggccttcaaggagctgggccgcatgtgccagctgcacctgaacagcgagaagccccagaccaagctgctgatcctgcaccaggccgtgtctgtcatcctgaacctggagcagcaggtgcgggagaggaacctgaaccccaaggccgcctgcctgaagaggcgggaggaggagaaggtgtctggagtggtgggggacccccagatggtgctgagcgccccccaccctggcctgtctgaggcccacaacccagctggccacatgtag

SEQ ID NO: 320824 - DNA, 1977 bp, Artificial Sequence
  derived and/or modified sequence
atgaaccagccccagcggatggcccccgtgggcaccgacaaggagttgtctgatttactggactttagtatgatgtttccgctgccagtcacaaatggaaaaggacggcctgcttctctggctggagctcagttcggagggagcgggaagagcggagagagaggcgcatatgcgtccttcggacgtgatgcgggggtgggcggccttactcaagcgggattcctcagtggtgaactggctctaaatagccccgggcctctctcacctagcggtatgaagggtacctcccagtactatccctcctattcaggtagttcacgcaggcgagccgctgacgggagcctggatacccagccaaaaaaggtaaggaaagtgccccccggcctgccctcttccgtttacccccctagttctggcgaggactacggaagggacgccacggcttacccttctgccaaaacaccgtcctcaacataccctgctccattctatgtggccgatggaagtctgcaccctagcgcagagctgtggtcaccgccaggtcaggctggcttcggccctatgctaggaggaggcagctcacccctgcccctgcccccaggcagtgggccagtgggaagcagcggtagcagcagtaccttcggcggtctgcatcagcacgaaagaatggggtatcagttacatggagccgaagtgaacggaggattaccttcggcctcttccttctcatcagcccccggggccacatatggcggcgtaagctcacacacacctcccgttagcggcgccgattccttactgggatccaggggtactaccgccgggagctccggtgacgcgctaggcaaggctctggctagtatctatagtcccgatcacagcagcaacaatttttcgtcgtccccttcaactcccgttggttcacctcaaggattggccggcactagccagtggcccagagcgggagcccctggggccctctccccgtcttacgacgggggattacacggtctccagtccaaaatagaggaccatctggacgaggccattcacgtgctgaggtcccacgcggtcggcacagcaggcgacatgcatacactcctgcccggtcatggcgctttagcttccggatttacagggccaatgagcctgggaggacggcacgcgggactcgtaggcggttctcatcctgaggacggtctcgccggctccacctcgctaatgcacaatcacgccgctctgcctagccaacccggcactcttcccgatttgtcaaggccccccgatagctatagtggcttgggacgcgcaggagccacggcagccgcctctgagattaagcgggaagagaaggaggatgaggagaacacatccgctgctgatcatagcgaggaagagaaaaaggaacttaaggcaccgcgtgcaaggacacgctgccagccaacgcccaggcactcccccccatcaccccatcaagacgcccatgtgcataggccccatgcccatcgcacacacaccggacggccttcagcaggcccaaccctgtttccacaaccccactgcctcccgttggcgcctagccgccggccaccacattctccagacgaggacgaagacgatcttctccccccagagcagaaggccgaacgggaaaaggagagacgggttgctaacaacgcaagggagagactgagagtgcgggacatcaacgaggctttcaaagagctgggtagaatgtgtcaactccacctgaactcggaaaagccccaaactaaattgctgattttgcaccaggccgtgtccgtgattctcaatctagagcagcaggttcgcgaacgcaatttgaatccaaaggcggcatgcctcaagaggagagaggaggaaaaggtctcaggagtggtcggcgatccccagatggtgctgagtgccccgcacccgggccttagtgaagcacataacccggctgggcatatgtag

SEQ ID NO: 320825 - DNA, 1977 bp, Artificial Sequence
  derived and/or modified sequence
atgaaccagccacagcggatggctcctgttgggaccgataaagagttgagcgatctattggatttttcaatgatgttcccactccccgttactaatggaaaggggagacccgcatcactggctggagctcagttcggaggttccgggaaatccggcgaaaggggggcttacgcttcttttggcagagatgctggcgtgggtggactaactcaggcaggctttctgagcggtgagctagcactaaattctccgggacctctctctccttctggaatgaaaggtacttctcaatattacccatcatattcaggctcttcccgacgccgtgcagccgatgggtctcttgatacccagccaaaaaaggtcaggaaagtcccgcctggattgcctagctccgtataccccccatccagcggtgaggattatggacgagacgcaacagcctacccttccgccaaaacaccgagcagcacctacccagctcctttctatgttgcagatggatctttgcatccctctgcggagctctggtctcctccgggtcaggctgggttcggaccaatgcttgggggaggctcatctccccttcctctccctccaggatccggacctgttggatcttcggggagttcctccacatttggcggactgcaccagcatgagcggatggggtaccagttacacggcgctgaggtgaacggaggtctcccctctgcatcttctttctcttccgctcccggtgctacatacggcggagtcagttcgcacacgcctcctgtatcaggggctgacagtctcctgggtagtcgcggaaccactgcgggttctagtggggatgcgcttggcaaggcgctggcctccatctattcaccggatcacagtagcaacaatttctctagcagcccaagtacccccgtaggcagcccccaaggccttgctgggacttcgcagtggcccagagctggcgcacctggggctctttccccctcttatgacggaggcctccatggtcttcaaagcaagatagaggaccatttagacgaagctatccatgtactgcgaagccacgcagttggaaccgctggagacatgcacactttactgcctggacacggggctctcgctagtggcttcacaggcccaatgagcctgggtggaaggcacgctggattggtaggaggctcccacccagaggacggcctagcaggatctaccagtcttatgcataatcatgcagcgctccccagtcagccgggtaccctgcccgacttgagccgcccacctgacagctactctggtctcgggagggcaggagcaaccgcagcagcttcagagatcaagcgagaggagaaggaggacgaagagaacacgtctgccgctgatcattccgaggaggagaagaaggaacttaaggcaccgagggcacgtacacggtgccagcctactccaagacacagccctcctagtcctcaccaggatgcccacgtccaccgaccccacgcccatcggactcataccgggcgaccttccgccggacctaccctatttccgcagccgcactgcctccctctcgcgccatcacggagacctccccactccccagacgaagacgaggacgacctcttgcccccagaacagaaagctgaaagggagaaagaacgcagggtcgccaacaatgctagagagcgcctccgcgtcagagatatcaacgaagcgttcaaggagttggggcgtatgtgtcagctccacttgaacagcgaaaaacctcaaactaagctgctcatactgcaccaggccgtgtctgtcattttaaatctggagcagcaagtccgtgagagaaatctgaatcctaaggctgcttgtttgaagagacgggaagaggaaaaggtttcaggcgtagtgggagatcctcagatggtcctatctgctccacacccaggtctgagcgaagcccacaatcccgcagggcacatgtag

SEQ ID NO: 320826 - DNA, 2463 bp, Artificial Sequence
  derived and/or modified sequence
ctgaggtgcccgccctggccccaggagaatgaaccagccgcagaggatggcgcctgtgggcacagacaaggagctcagtgacctcctggacttcagcatgatgttcccgctgcctgtcaccaacgggaagggccggcccgcctccctggccggggcgcagttcggaggttcaggcaagagcggtgagcggggcgcctatgcctccttcgggagagacgcaggcgtgggcggcctgactcaggctggcttcctgtcaggcgagctggccctcaacagccccgggcccctgtccccttcgggcatgaaggggacctcccagtactacccctcctactccggcagctcccggcggagagcggcagacggcagcctagacacgcagcccaagaaggtccggaaggtcccgccgggtcttccatcctcggtgtacccacccagctcaggtgaggactacggcagggatgccaccgcctacccgtccgccaagacccccagcagcacctatcccgcccccttctacgtggcagatggcagcctgcacccctcagccgagctctggagtcccccgggccaggcgggcttcgggcccatgctgggtgggggctcatccccgctgcccctcccgcccggtagcggcccggtgggcagcagtggaagcagcagcacgtttggtggcctgcaccagcacgagcgtatgggctaccagctgcatggagcagaggtgaacggtgggctcccatctgcatcctccttctcctcagcccccggagccacgtacggcggcgtctccagccacacgccgcctgtcagcggggccgacagcctcctgggctcccgagggaccacagctggcagctccggggatgccctcggcaaagcactggcctcgatctactccccggatcactcaagcaataacttctcgtccagcccttctacccccgtgggctccccccagggcctggcaggaacgtcacagtggcctcgagcaggagcccccggtgccttatcgcccagctacgacgggggtctccacggcctgcagagtaagatagaagaccacctggacgaggccatccacgtgctccgcagccacgccgtgggcacagccggcgacatgcacacgctgctgcctggccacggggcgctggcctcaggtttcaccggccccatgtcactgggcgggcggcacgcaggcctggttggaggcagccaccccgaggacggcctcgcaggcagcaccagcctcatgcacaaccacgcggccctccccagccagccaggcaccctccctgacctgtctcggcctcccgactcctacagtgggctagggcgagcaggtgccacggcggccgccagcgagatcaagcgggaggagaaggaggacgaggagaacacgtcagcggctgaccactcggaggaggagaagaaggagctgaaggccccccgggcccggaccaggtgccaacccacccctcggcactccccaccctcaccccatcaggacgcacatgtgcacaggccacacgcacaccgcacccacactgggaggccgtcggcgggccccacgctcttcccccaacctcactgtctccctctggccccctcccggcgccctccccatagcccagacgaggacgaggacgaccttctccccccagagcagaaggccgagcgggagaaggagcgccgggtggccaataacgcccgggagcggctgcgggtccgtgacatcaacgaggcctttaaggagctggggcgcatgtgccaactgcacctcaacagcgagaagccccagaccaaactgctcatcctgcaccaggctgtctcggtcatcctgaacttggagcagcaagtgcgagagcggaacctgaatcccaaagcagcctgtttgaaacggcgagaagaggaaaaggtgtcaggtgtggttggagacccccagatggtgctttcagctccccacccaggcctgagcgaagcccacaaccccgccgggcacatgtgaaaggtatgcctccgtgggacgagccacccgctttcagccctgtgctctggccccagaacggccactcgagaccccgggcttcatccacatccacacctcacacacctgttgtcagcatcgagccaacaccaacctgacaaggttcggagtgatgggggcggccaaggtgacactgggtccaggagctccctggggccctggcctaccactcactggcctcgctccccctgtccccgaatctcagccaccgtgtcactctgtgacctgtcccatggatcctgaaactgcatcttggccctgttgcctgggctgacaggagcattttttttttttccagtaaacaaaacctgaaagcaagcaacaaaacatacactttgtcagagaagaaaaaaatgccttaactataaaaagcggagaaatggaaacatatcactcaagggggatgctgtggaaacctg

SEQ ID NO: 320827 - DNA, 1177 bp, Artificial Sequence
  derived and/or modified sequence
cagatggcagcctgcacccctcagccgagctctggagtcccccgggccaggcgggcttcgggcccatgctgggtgggggctcatccccgctgcccctcccgcccggtagcggcccggtgggcagcagtggaagcagcagcacgtttggtggcctgcaccagcacgagcgtatgggctaccagctgcatggagcagaggtgaacggtgggctcccatctgcatcctccttctcctcagcccccggagccacgtacggcggcgtctccagccacacgccgcctgtcagcggggccgacagcctcctgggctcccgagggaccacagctggcagctccggggatgccctcggcaaagcactggcctcgatctactccccggatcactcaagcaataacttctcgtccagcccttctacccccgtgggctccccccagggcctggcaggaacgtcacagtggcctcgagcaggagcccccggtgccttatcgcccagctacgacgggggtctccacggcctggttggaggcagccaccccgaggacggcctcgcaggcagcaccagcctcatgcacaaccacgcggccctccccagccagccaggcaccctccctgacctgtctcggcctcccgactcctacagtgggctagggcgagcaggtgccacggcggccgccagcgagatcaagcgggaggagaaggaggacgaggagaacacgtcagcggctgaccactcggaggaggagaagaaggagctgaaggccccccgggcccggaccagcccagacgaggacgaggacgaccttctccccccagagcagaaggccgagcgggagaaggagcgccgggtggccaataacgcccgggagcggctgcgggtccgtgacatcaacgaggcctttaaggagctggggcgcatgtgccaactgcacctcaacagcgagaagccccagaccaaactgctcatcctgcaccaggctgtctcggtcatcctgaacttggagcagcaagtgcgagagcggaacctgaatcccaaagcagcctgtttgaaacggcgagaagaggaaaaggtgtcaggtgtggttggagacccccagatggtgctttcagctccccacccaggcctgagcgaagcccacaaccccgccgggcacatgtgaaaggtatgcctccgtgggac

SEQ ID NO: 320828 - protein, 157 aa, Artificial Sequence
  derived and/or modified sequence
MGYQLHGAEVNGGLPSASSFSSAPGATYGGVSSHTPPVSGADSLLGSRGTTAGSSGDALGKALASIYSPDHSSNNFSSSPSTPVGSPQGLAGTSQWPRAGAPGALSPSYDGGLHGLVGGSHPEDGLAGSTSLMHNHAALPSQPGTLPDLSRPPDSYS

SEQ ID NO: 320829 - DNA, 474 bp, Artificial Sequence
  derived and/or modified sequence
atgggctaccagctgcacggcgccgaggtgaacggcggcctgcccagcgccagcagcttcagcagcgcccccggcgccacctacggcggcgtgagcagccacaccccccccgtgagcggcgccgacagcctgctgggcagcagaggcaccaccgccggcagcagcggcgacgccctgggcaaggccctggccagcatctacagccccgaccacagcagcaacaacttcagcagcagccccagcacccccgtgggcagcccccagggcctggccggcaccagccagtggcccagagccggcgcccccggcgccctgagccccagctacgacggcggcctgcacggcctggtgggcggcagccaccccgaggacggcctggccggcagcaccagcctgatgcacaaccacgccgccctgcccagccagcccggcaccctgcccgacctgagcagaccccccgacagctacagctag

SEQ ID NO: 320830 - DNA, 474 bp, Artificial Sequence
  derived and/or modified sequence
atgggatatcagttacatggcgctgaggtgaatgggggactgccatccgctagcagtttctccagcgccccaggggccacctacggaggggtctcttcccacacaccaccagtgagcggggcggacagcctgctagggtcccgcgggactaccgcaggaagctccggggatgctctagggaaggctcttgcctctatctacagccctgaccactccagcaataacttctctagcagcccctctactccagttggctccccccagggcttggcaggcacctctcaatggcctagggctggtgcccccggcgcactgagcccttcatacgacggggggctacatggactggtcgggggttcccatccagaggacggcctcgccgggtcaacttctcttatgcataaccacgccgcactgccatcacagcctggtactctgccagatctatcgagaccccctgattcttatagttag

SEQ ID NO: 320831 - DNA, 474 bp, Artificial Sequence
  derived and/or modified sequence
atgggctaccagctgcacggggctgaggtgaatggaggcctgcccagcgccagcagcttcagcagcgcccctggggccacctacggcggcgtgagcagccacaccccacctgtgtctggagctgacagcctgctgggcagccggggcaccacagctggcagcagtggagatgccctgggcaaggccctggccagcatctacagcccagaccacagcagcaacaacttcagcagcagccccagcacccctgtgggcagcccccagggcctggccggcaccagccagtggcccagggctggggcccctggggccctgagccccagctatgatggcggcctgcacggcctggtgggcggcagccacccagaagatggcctggccggcagcaccagcctgatgcacaaccacgccgccctgcccagccagcccggcaccctgcctgacctgagccggcccccagacagctacagctag

SEQ ID NO: 320832 - DNA, 474 bp, Artificial Sequence
  derived and/or modified sequence
atgggctaccagctgcacggcgccgaggtgaacggcggcctgccctctgctagttctttctcatctgcaccaggcgcaacatacggtggtgtctcctcacacactcctccagttagtggcgcagacagcttactgggctcccgcggaaccacggccgggtcttctggagacgccctgggcaaagctctggcaagcatctactcaccagatcactcatccaataatttctcttctagtccctccacgcctgttggaagcccccaggggctggcaggtacaagccagtggccccgcgccggggctcccggtgccttgtcaccaagttatgacggcggcctccacggccttgtcggcgggagccatcccgaggacgggcttgctggttccaccagtctcatgcataatcatgctgctttgccttcgcagcctggcaccctccctgacttatcacggccacccgatagttactcttag

SEQ ID NO: 320833 - DNA, 474 bp, Artificial Sequence
  derived and/or modified sequence
atgggttaccagctccatggtgcggaggtgaatggaggccttccctcagcttcttccttttcatccgctcccggagcaacatacgggggagtaagcagccatactcctcctgtgagcggggctgacagtctactcggttccagaggaactaccgccggatcctccggagacgcacttggaaaggccttggccagtatttacagccctgatcactcaagtaacaacttttcatcctcaccgtctacccccgtcggctccccacagggacttgctggaacatctcaatggcctcgggcaggcgcacccggagccttatccccctcttacgacggaggacttcatggcctcgtgggaggctctcatcctgaggacgggctggctggatccacgtctctcatgcacaaccatgccgcactcccctcacagccaggcaccctcccagacctatcgcgacccccagactcttattcttag

SEQ ID NO: 320834 - DNA, 777 bp, Artificial Sequence
  derived and/or modified sequence
atgttcagcggcacccacgtggagagagacttcgtggaggcccccagccagatgctggagaactgggtgtgggagcaggagcccctgctgagaatgagcagacactacagaaccggcagcgccgtgcccagagagctgctggagaagctgatcgagagcagacaggccaacaccggcctgttcaacctgagacagatcgtgctggccaaggtggaccaggccctgcacacccagaccgacgccgaccccgccgaggagtacgccagactgtgccaggagatcctgggcgtgcccgccacccccggcaccaacatgcccgccaccttcggccacctggccggcggctacgacgcccagtactacggctacctgtggagcgaggtgtacagcatggacatgttccacaccagattcaagcaggagggcgtgctgaacagcaagttcccccactacgaggtgagacccctgagacacgtgagcctgtgcctgcccctgacctggtgcgaccccggcagcggccagccccccgagagcctgaccagaaacagatggctgcccgccctgagagccggccccgccctgcccggctgcaacatcgccctgggcagcctgcaggtgggcatggactacagaagctgcatcctgagacccggcggcagcgaggacgccagcgccatgctgagaagattcctgggcagagaccccaagcaggacgccttcctgctgagcaagggcctgcaggtgggcggctgcgagcccgagccccaggtgtgctag

SEQ ID NO: 320835 - DNA, 777 bp, Artificial Sequence
  derived and/or modified sequence
atgttcagtggaacacacgtcgaacgcgactttgtagaagctccctcccaaatgcttgaaaattgggtctgggagcaagaaccccttctgcgcatgtcgcgacactataggactggaagtgcagtgccacgcgagctgctcgaaaaattgattgagagccggcaggcgaatactggcttgtttaatctaagacaaattgtcctagcaaaggtcgaccaggctctgcatacacagacagacgccgacccagctgaagaatacgctcggctgtgccaagagatcctgggagtgcccgcgacccccgggaccaacatgcccgccacattcggacacctcgccgggggatatgacgcccagtactatggatatctgtggagtgaggtttactctatggatatgtttcacacacgcttcaaacaggaaggcgttctgaactctaagttccctcattatgaagtgaggcccctgaggcacgtgagcctgtgtctacctcttacctggtgcgatcccggaagcggacagcccccagagagcctgacccgaaatcgctggttgcccgctctgagagcaggccccgcactcccgggctgcaacatcgccctcggctctctccaggtggggatggattacaggtcttgtattctgaggccaggcgggtcggaggacgccagcgctatgctaaggagattcctcggccgagaccctaaacaggacgcttttctgctgtcgaaaggcctccaggtgggcgggtgtgaacccgagcctcaggtctgctag

SEQ ID NO: 320836 - DNA, 777 bp, Artificial Sequence
  derived and/or modified sequence
atgttttctggcacccacgtggagcgggactttgtggaggcccccagccagatgctggagaactgggtgtgggagcaggagcccctgctgaggatgagccgccactacagaacaggcagcgctgtgccccgggagctgctggagaagctgattgagagccggcaggccaacacaggcctcttcaacctgcggcagatcgtgctggccaaggtggaccaggccctgcacacccagacagatgctgaccctgctgaggagtatgcccggctgtgccaggagatcctgggcgtgcctgccaccccaggcaccaacatgcctgccaccttcggccacctggccggcggctatgatgcccagtactacggctacctgtggagcgaggtgtacagcatggacatgttccacacccgcttcaagcaggagggcgtgctgaacagcaagttcccccactatgaggtgcggcccctgcggcacgtgtccctgtgcctgcccctgacctggtgtgaccccggcagcggccagcccccagagagcctgaccaggaaccgctggctgcctgccctgcgggccggccctgccctgcccggctgcaacatcgccctgggcagcctgcaggtgggcatggactaccgcagctgcatcctgcggcctgggggctctgaagatgccagcgccatgctgcggcgcttcctgggccgggaccccaagcaggatgccttcctgctgagcaagggcctgcaggtgggcggctgtgagcctgagccccaggtgtgctag

SEQ ID NO: 320837 - DNA, 777 bp, Artificial Sequence
  derived and/or modified sequence
atgttcagcggcacccacgtggagcgggacttcgtggaggccccctcccagatgctcgaaaattgggtgtgggaacaggaacccctgctcaggatgtcgagacattatcgcactggatccgccgtgccacgagaactccttgagaagctgatagaatcccgtcaagctaacactggcctttttaacctgcggcaaatcgtgcttgcaaaggtggaccaggctctgcatacccagactgacgctgacccagcagaggagtatgccagactttgccaagaaattcttggcgtcccggcaactccaggcaccaatatgccagctacattcggacatttggccggaggctacgacgcacagtattatggctacctctggagcgaagtgtacagtatggatatgttccacacgagattcaaacaagaaggtgtgttaaattctaaattcccgcattatgaggtgcgtcctctaaggcacgtgtccctctgcctcccgctgacctggtgcgatccgggatccggtcaaccgcctgagagtctcaccaggaaccgctggttgcccgcactgcgggctgggcctgccctgccgggatgcaacatcgcccttggatcactgcaggtagggatggactacagatcatgcatcttgcgacctggaggatccgaggacgcatccgcgatgctacgccgcttccttggcagagacccaaagcaggatgccttcctcctctcgaaaggactccaggtcgggggatgtgagccagagccacaggtctgttag

SEQ ID NO: 320838 - DNA, 777 bp, Artificial Sequence
  derived and/or modified sequence
atgttttcgggtactcacgtcgaacgtgactttgtggaagccccttcccagatgcttgagaactgggtgtgggaacaagaaccactgctccggatgtcaagacattataggacaggttccgccgtgcccagagagctgcttgaaaagttgattgaaagccgtcaggccaacacaggccttttcaatttgagacaaatcgtgctagctaaagtcgatcaggccctacacacacagacagacgcagaccctgcagaggagtacgccagactgtgtcaggagattcttggagtgccagccacccctgggactaacatgcccgctactttcggtcatttagctgggggttacgacgctcaatactatgggtacctgtggagtgaagtttactctatggatatgtttcatactcgcttcaagcaggagggtgtattgaattctaagtttccacactatgaggtccgaccacttagacatgtgtcgctctgcctacccctgacgtggtgtgatcctggcagtgggcaaccccctgaatccctaacaaggaataggtggctgcctgctttgagagccggtcctgctctgccagggtgcaacatagcgcttgggtcactgcaagtgggtatggattatcgaagctgcatcctcaggccaggcggatcagaagatgccagtgccatgctgaggcgattcctgggcagggatccaaagcaggatgccttcctcctgtcaaagggtctgcaggtcggcggttgcgagccagagccacaagtttgctag

SEQ ID NO: 320839 - DNA, 1879 bp, Artificial Sequence
  derived and/or modified sequence
ttttgtggatcttagtaggcgagtttgaaaacacggagtccaggaatgaggatcgaccgtgtgtccacctttcctggcttccctgccacactgtttgcacagcactcgtagccagcacacgcgtgtgcacatccacacaggtgctcacacaggtgcccacgcacgtgcctgcaggcctgctttgcatgctgctttctgcgtgtccctggcgcctggcacggcgagtcccttggtgcattccgtcgggacaaggagtgtggctgcgtggtccttggaacagaaaagcctcggtgttgcagagaggaccttgaggatcacccaggagttccctcgccgttggctgcctgccatggttccagcgggactcagtcaagggctgtgcttttagggaaggttccacacacacacgagcagggagatgcagcatgcctcacagcgtccccacccggacctggccgtccccaggtcccaacccctcggggtgcggagctttcagggagcagcagctctgtggctagaggagaagcgtgggtggcctccagggacggggtcatgtggccggcatcttcaggtgtgtcctgctgccaccggcagccagcagcagcccaggggcctccgggtcccggtcgttttccagttttggggtgggagggccgggcccagcgcatcacctgtgcactcgccctgtttgcactgtggcagctgacacgggccaggccggcgggaacgggctaggcaggacctgggcactctgaggctctgccccatccctgcaggcggagttcgccatgttcagcgggacccacgtggagcgggactttgtggaggcgccgtcgcagatgctggagaactgggtgtgggagcaggagccgctgctgcggatgtcgcggcactaccgcacaggcagcgccgtgccccgggagctcctggagaagctcattgagtcccggcaggccaacacaggcctcttcaacctgcgccagatcgtcctcgccaaggtggaccaggccctgcacacgcagacggacgcagaccccgccgaggagtatgcgcggctctgccaggagatcctcggggtcccggccacgccaggaaccaacatgcctgcaaccttcggccatctggcaggtggctacgacgcccagtactacgggtacctgtggagcgaggtgtattccatggacatgttccacacgcgcttcaagcaggagggtgtcctgaacagcaagtttcctcactatgaagtgcggccgttacgccatgtgagcctgtgcctcccgctgacttggtgtgacccaggctcgggacagccgccagagtccctcacaaggaacaggtggctaccagctttgagggccggccctgccctgcctgggtgcaacattgcactgggcagcctgcaggttggcatggattacagaagctgcatcctgagacccggcggttccgaggatgccagcgccatgctgaggcgcttcctgggccgtgaccccaagcaggacgccttcctcctgagcaaggggctgcaggtcgggggctgcgagcccgagccgcaggtctgctgaggcctggcactgcgactgcccagtctggcctgcgctcccgccgccctggtgccttagcccccggcacaggatggggcaggctctggcacagtgcctgggactggcagggtggctgagcggctgtcttgcctcttgtcattgtctgtccccacccggtcgtggcccacccggctagagacggcgtcctcaaggcatctggagggctttcgtggctgccagggcctggtctttgttgcactaacacgtctcctctctgggaaacgtcccttgtcaggagacggctcttctttgaaatgaggtcattaaaaggaaac

SEQ ID NO: 320840 - DNA, 87 bp, Artificial Sequence
  derived and/or modified sequence
aagagaactgcaaaacactgctcaaagaaatcagagatgacaaaaacacatggaaaaacgtttcatgctcatggattggaagactta

SEQ ID NO: 320841 - protein, 454 aa, Artificial Sequence
  derived and/or modified sequence
MAVTDLSHGFFPREPICPFEEKTKIGTMVEDYLANSYQDSVTFDDVAVEFTPEEWALLDTTEKCLYRDVMLENYVNLASVEATVDGNSENCGEVFSEWFCLKTHMRAQNGGNIFEGNCYGKDILSVHKEASIGQELSKFNPCGKVFTLTPDLAAHLGILNARQPYKCKECRKGFKYFASLDNHMGIHIGEKFCEFQECRRAITHSSHLKQCVTVHTGKKSKKTKKHGKSFTNFSQLSAHVKIHKGEKSFECKECGRSFRNSSSFNVHIQIHTGIKPHKYTECGKAFTRSTHLTQHVRTHTGIKPYECKECGQAFTQYTGLAIHIRNHTGEKHYQCKECGKAFNGSSTLTQHKIIHTGEKPYGCVECGKTFITSSYRSKHLKTHHEERPFVCKICGKAFLYSSPLNVHLQTHTREKALICKECGKAFAVSSHLSRHERIHTGEEPYEYKGMNVTI

SEQ ID NO: 320842 - DNA, 1365 bp, Artificial Sequence
  derived and/or modified sequence
atggccgtgaccgacctgagccacggcttcttccccagagagcccatctgccccttcgaggagaagaccaagatcggcaccatggtggaggactacctggccaacagctaccaggacagcgtgaccttcgacgacgtggccgtggagttcacccccgaggagtgggccctgctggacaccaccgagaagtgcctgtacagagacgtgatgctggagaactacgtgaacctggccagcgtggaggccaccgtggacggcaacagcgagaactgcggcgaggtgttcagcgagtggttctgcctgaagacccacatgagagcccagaacggcggcaacatcttcgagggcaactgctacggcaaggacatcctgagcgtgcacaaggaggccagcatcggccaggagctgagcaagttcaacccctgcggcaaggtgttcaccctgacccccgacctggccgcccacctgggcatcctgaacgccagacagccctacaagtgcaaggagtgcagaaagggcttcaagtacttcgccagcctggacaaccacatgggcatccacatcggcgagaagttctgcgagttccaggagtgcagaagagccatcacccacagcagccacctgaagcagtgcgtgaccgtgcacaccggcaagaagagcaagaagaccaagaagcacggcaagagcttcaccaacttcagccagctgagcgcccacgtgaagatccacaagggcgagaagagcttcgagtgcaaggagtgcggcagaagcttcagaaacagcagcagcttcaacgtgcacatccagatccacaccggcatcaagccccacaagtacaccgagtgcggcaaggccttcaccagaagcacccacctgacccagcacgtgagaacccacaccggcatcaagccctacgagtgcaaggagtgcggccaggccttcacccagtacaccggcctggccatccacatcagaaaccacaccggcgagaagcactaccagtgcaaggagtgcggcaaggccttcaacggcagcagcaccctgacccagcacaagatcatccacaccggcgagaagccctacggctgcgtggagtgcggcaagaccttcatcaccagcagctacagaagcaagcacctgaagacccaccacgaggagagacccttcgtgtgcaagatctgcggcaaggccttcctgtacagcagccccctgaacgtgcacctgcagacccacaccagagagaaggccctgatctgcaaggagtgcggcaaggccttcgccgtgagcagccacctgagcagacacgagagaatccacaccggcgaggagccctacgagtacaagggcatgaacgtgaccatctag

SEQ ID NO: 320843 - DNA, 1365 bp, Artificial Sequence
  derived and/or modified sequence
atggcagtcacagacctgtcccacggtttcttcccaagggaacccatatgcccctttgaagagaaaacaaagatcggtactatggtggaagattaccttgctaactcataccaggatagcgttacattcgatgatgtagctgtcgaatttacccctgaagagtgggcattactggacacaacagaaaagtgtctctatagggatgtgatgttagagaattacgttaacctcgctagcgttgaggccactgtcgatgggaactcggaaaactgcggcgaggtattctccgaatggttctgcttgaagacgcatatgagagcccagaacggtggcaacatatttgaaggtaattgctacggcaaagacatcctgagcgtacacaaagaggcttcaatagggcaagaactatccaagttcaacccatgcggaaaggttttcaccctcaccccagacctggctgcccacctcggaatactgaacgcccgtcaaccttacaagtgtaaagaatgccgaaaaggttttaagtacttcgccagcctggataatcacatgggcatccacattggggagaaattttgtgagtttcaagaatgccggcgtgccataacgcatagttctcatttgaaacagtgtgtgaccgtccatacagggaagaaatcgaagaagacaaagaaacacggaaagagtttcactaacttctcccagctcagtgcgcatgtaaagatccacaagggagaaaaaagctttgaatgtaaggagtgcggaaggtcctttaggaattcctcttccttcaatgtgcatatccagatccataccggaataaagccccacaagtataccgagtgcggaaaggccttcactcggtctacgcacttaactcagcacgttagaactcacacgggcataaagccttatgagtgtaaagaatgcggacaggcattcacccagtacactggcctggctatccacatcaggaatcatactggcgagaaacattaccagtgcaaagagtgtggcaaagcctttaacggctcctccaccttgacccaacacaagataattcacaccggagaaaaaccatacggttgcgtcgagtgcggcaagaccttcatcacgagttcgtaccggtccaagcaccttaaaacccatcacgaagagagaccttttgtgtgtaaaatttgcgggaaggccttcctgtattcctcccctcttaatgtccacctgcagacgcacacgcgggaaaaagccctcatctgcaaggaatgtgggaaagcattcgcagtgtcttcccatctgagtaggcacgagagaatccacacgggtgaagaaccatatgagtataagggaatgaacgttacgatatag

SEQ ID NO: 320844 - DNA, 1365 bp, Artificial Sequence
  derived and/or modified sequence
atggctgtgacagacctgagccacggcttcttcccccgggagcccatctgcccctttgaggagaagaccaagattggcaccatggtggaggactacctggccaacagctaccaggacagcgtgacctttgatgatgtggccgtggagttcaccccagaggagtgggccctgctggacaccacagagaagtgcctgtacagagatgtgatgctggagaactacgtgaacctggcctctgtggaggccaccgtggatggcaacagcgagaactgtggggaggtgttcagcgagtggttctgcctgaagacccacatgagggcccagaatggaggcaacatctttgagggcaactgctacggcaaggacatcctgtctgtgcacaaggaggccagcatcggccaggagctgagcaagttcaacccctgtgggaaggtgttcaccctgaccccagacctggccgcccacctgggcatcctgaatgcccggcagccctacaagtgcaaggaatgtaggaagggcttcaagtactttgccagcctggacaaccacatgggcatccacatcggggagaagttctgtgagttccaggagtgcagaagagccatcacccacagcagccacctgaagcagtgtgtgacagtgcacacaggcaagaagagcaagaagaccaagaagcacggcaagagcttcaccaacttcagccagctgagcgcccacgtgaagatccacaagggggagaagagctttgagtgcaaggaatgtggccgctccttcaggaacagcagcagcttcaacgtgcacatccagatccacacaggcatcaagccccacaagtacacagaatgtgggaaggccttcaccaggagcacccacctgacccagcacgtgaggacccacacaggcatcaagccctatgagtgcaaggaatgtggccaggccttcacccagtacacaggcctggccatccacatccggaaccacactggagagaagcactaccagtgcaaggaatgtgggaaggccttcaacggcagcagcaccctgacccagcacaagatcatccacactggagagaagccctacggctgtgtggagtgtgggaagaccttcatcaccagcagctaccgcagcaagcacctgaagacccaccacgaggagcggccctttgtgtgcaagatctgtgggaaggccttcctgtacagcagccccctgaatgtgcacctgcagacccacacccgggagaaggccctgatctgcaaggaatgtgggaaggcctttgctgtgagcagccacctgagcagacatgagcgcatccacactggagaggagccctatgagtacaagggcatgaatgtgaccatctag

SEQ ID NO: 320845 - DNA, 1365 bp, Artificial Sequence
  derived and/or modified sequence
atggccgtgaccgacctgagccacggcttcttcccccgggagcccatttgtcccttcgaggagaagaccaagatcggcacaatggtcgaagactatcttgccaattcgtatcaggatagcgtgacatttgatgacgtggcggtggaattcacccctgaggagtgggccctgttggacacgacagagaagtgcctctatcgcgatgtcatgttggagaactacgtcaatctggccagtgtggaagctactgtggacggaaactccgagaattgcggcgaggtgttcagtgaatggttctgcctgaagacacacatgcgggcccagaatggcgggaatatatttgagggcaattgctacggaaaagatatacttagtgtgcacaaggaggccagtatcggtcaggagctctccaaatttaacccatgtgggaaggtattcaccctcacccctgatctggccgcccacctgggtatcctgaatgctcggcaaccgtataaatgtaaagagtgccggaaaggctttaaatactttgcaagtttagataatcatatgggaatccacattggggagaagttttgcgaatttcaagaatgccgacgcgcaatcacacacagtagtcatcttaagcaatgcgtgaccgttcacacgggtaagaagtccaaaaaaaccaagaagcacggaaaatcttttacgaatttcagccagctctctgcgcacgttaaaatccacaagggcgaaaagtcttttgagtgcaaagagtgcggtcgctcttttagaaacagcagctcatttaacgtgcacatccagatccatactggcatcaagccccacaagtacaccgagtgcggaaaagcttttactaggtccacacacttaacacagcatgtgcgaacccatactggcatcaagccttacgagtgcaaggagtgcggacaggcatttacccagtacaccggcctggctatccacattagaaatcacactggcgagaaacactatcagtgcaaagagtgcggaaaggcatttaatggtagctccacgctgacccagcataaaatcatccatacgggagaaaaaccatatggatgtgttgaatgcgggaaaaccttcattaccagcagttaccggagcaagcatctgaaaacgcaccacgaggagcgcccgtttgtatgcaaaatctgtggcaaggctttcttgtatagttcgccactgaacgtccacttacaaacacatacgagggaaaaagctctgatctgcaaagaatgcggcaaagcctttgctgtgtcttctcacctctccagacacgagcgaatccataccggggaggaaccttatgaatataaaggaatgaatgtcacaatttag

SEQ ID NO: 320846 - DNA, 1365 bp, Artificial Sequence
  derived and/or modified sequence
atggccgtaactgacctgtcacacggcttctttcccagagagcctatatgtcccttcgaggagaaaacaaaaatcgggacaatggtagaagactacctagcgaattcctaccaagactcggtcaccttcgatgacgttgcagttgagttcacccctgaggagtgggcattactcgacactaccgagaagtgcctatacagagatgtcatgctcgagaactatgtgaacctggcttcagtcgaagccacggttgacggcaacagcgaaaactgcggtgaggtcttttctgagtggttctgcctgaaaacacatatgcgcgcacaaaatggcggaaacatcttcgaaggaaactgctatggaaaagacattctgagcgtgcacaaagaagcgagcatcgggcaagagctgtcgaagttcaatccttgcggcaaagtatttacactgactcccgatctggctgcacaccttggtatcctgaacgccagacaaccgtataagtgcaaggaatgcaggaaaggatttaagtattttgcctccctggataaccacatgggcatccacatcggcgaaaagttctgtgaatttcaggaatgcaggagagctattacccattcatcccatttaaaacagtgcgtaaccgttcatacgggcaagaagtctaaaaagacaaagaaacacggcaagtcatttacaaacttttcgcagctgagtgcccatgtgaagatacataaaggggagaagagctttgagtgtaaagagtgcggcaggtcattccgtaactcgtcgtccttcaatgtgcatattcagattcataccgggatcaaaccccacaagtataccgaatgcgggaaagcctttacccgctccacccatctgactcagcatgtccggactcataccggaattaagccctatgagtgcaaagaatgcggacaggcatttacccagtacacagggctcgccatccacattcgaaatcataccggggagaaacattaccagtgcaaagagtgcggcaaagctttcaacggatcttcaacactgacacagcataaaatcatacacacaggggagaagccttacggatgtgtggagtgtgggaaaacttttatcaccagtagctacagatcaaagcacctcaagactcaccacgaagaacggcctttcgtgtgtaaaatatgtggcaaagcattcttgtatagttcccctctcaacgtccacttacagactcatacaagagagaaggccttaatttgcaaggaatgcggcaaagccttcgccgttagcagtcatcttagcagacacgaacgaatccataccggagaggaaccttacgagtataagggtatgaatgtcaccatatag

SEQ ID NO: 320847 - DNA, 2098 bp, Artificial Sequence
  derived and/or modified sequence
gtcaaatacagaatgtgatgttccattccagccaatggaaaccggacgctgcagtagggtggacacgtcaggttataaatgaccctgtttcctttgtttagtgtactctagtggcaaaactgctggctagtgtacctgttctgccaaaagtaaaatgggcttactgaggaaattaaatttatgttcaagtgctatttctttatgcaccggggaacaagcatttctaacaacctggtcctacgtggctgaaactggatcccagaagccccgtccttcccgaagctcgtagcggaagtgacatcagcccgccgccactatcttttcccgcgctggctgcccacggtcagtgctgtttcacctttatcttggtggagtcgaccccggctgtggacttcaaataaccctgtacaaagaggaatggagattgcctctattcacctagattcataagttgccctgaggcaatcttggcatcaaggaagagagcattgaggcacaactgaccatcagcttcagagaatggcagtcactgatttgtcccatgggttttttcccagggaaccaatctgcccttttgaagaaaagacaaagataggaacgatggtggaggactacctggcaaattcttatcaggattcagtgacgtttgatgatgtggctgtggagttcaccccagaggagtgggctttactggacacaactgagaaatgcctctacagagatgtgatgttggagaactatgtgaacctggcctctgtggaagctacagtggatggaaactctgagaattgtggagaggtcttcagtgaatggttttgccttaaaacacacatgagagctcagaatggagggaacatctttgagggtaattgttatggaaaagacatcctcagtgtgcacaaggaagcctctattggacaggaactttccaaatttaatccatgtggaaaagtcttcaccttaactccagatcttgctgcacatcttggaattctcaatgcaagacaaccatacaaatgtaaggaatgtagaaaaggctttaagtattttgcaagccttgataatcacatgggaatccacattggagagaaattctgtgaatttcaggaatgtaggagagccatcactcattcctcacacctaaagcagtgtgtaacagttcatactggaaagaaatctaaaaagactaagaaacatgggaaatccttcactaatttttctcaactttctgcacatgtgaaaattcataaaggagagaagtcctttgaatgtaaagaatgtggaagatcctttagaaattcctcatcctttaatgttcacattcaaattcacactggaataaaaccacacaaatatacggaatgtgggaaagccttcactaggtcaactcaccttactcaacatgtaagaactcacactggaataaaaccctatgaatgtaaggaatgtggccaagccttcactcagtacacgggccttgctatacacatacgaaatcacactggagagaaacactatcagtgtaaggaatgtgggaaagccttcaatggatcctcaacccttactcaacataaaataattcacacaggagagaagccttatggatgtgttgaatgtgggaagaccttcattacttcttcctatcgtagtaaacatttgaaaactcaccatgaagaaaggccctttgtatgcaagatatgtgggaaagcatttctatattcctcaccccttaatgttcacctgcaaactcataccagagagaaagccctcatatgtaaagaatgtgggaaagcttttgctgtttcctcacacctaagtagacatgaaagaattcacactggggaggaaccctatgaatataagggtatgaatgttaccatttagctcattggttgccatctttaattagtggcagtgacactaaagatattcagatttgtcctaaatgccttttggaggttgtaatggctcatgaattggccttgggtgccatcacaagggtctgaaattaaacctacaggttctgaatacaacatcatggttgcctgagtctgggcatctgtgaagaagggtaatggatggtgaggtcagtactgca

SEQ ID NO: 320848 - protein, 1187 aa, Artificial Sequence
  derived and/or modified sequence
MPLRHWGMARGSKPVGDGAQPMAAMGGLKVLLHWAGPGGGEPWVTFSESSLTAEEVCIHIAHKVGITPPCFNLFALFDAQAQVWLPPNHILEIPRDASLMLYFRIRFYFRNWHGMNPREPAVYRCGPPGTEASSDQTAQGMQLLDPASFEYLFEQGKHEFVNDVASLWELSTEEEIHHFKNESLGMAFLHLCHLALRHGIPLEEVAKKTSFKDCIPRSFRRHIRQHSALTRLRLRNVFRRFLRDFQPGRLSQQMVMVKYLATLERLAPRFGTERVPVCHLRLLAQAEGEPCYIRDSGVAPTDPGPESAAGPPTHEVLVTGTGGIQWWPVEEEVNKEEGSSGSSGRNPQASLFGKKAKAHKAVGQPADRPREPLWAYFCDFRDITHVVLKEHCVSIHRQDNKCLELSLPSRAAALSFVSLVDGYFRLTADSSHYLCHEVAPPRLVMSIRDGIHGPLLEPFVQAKLRPEDGLYLIHWSTSHPYRLILTVAQRSQAPDGMQSLRLRKFPIEQQDGAFVLEGWGRSFPSVRELGAALQGCLLRAGDDCFSLRRCCLPQPGETSNLIIMRGARASPRTLNLSQLSFHRVDQKEITQLSHLGQGTRTNVYEGRLRVEGSGDPEEGKMDDEDPLVPGRDRGQELRVVLKVLDPSHHDIALAFYETASLMSQVSHTHLAFVHGVCVRGPENIMVTEYVEHGPLDVWLRRERGHVPMAWKMVVAQQLASALSYLENKNLVHGNVCGRNILLARLGLAEGTSPFIKLSDPGVGLGALSREERVERIPWLAPECLPGGANSLSTAMDKWGFGATLLEICFDGEAPLQSRSPSEKEHFYQRQHRLPEPSCPQLATLTSQCLTYEPTQRPSFRTILRDLTRLQPHNLADVLTVNPDSPASDPTVFHKRYLKKIRDLGEGHFGKVSLYCYDPTNDGTGEMVAVKALKADCGPQHRSGWKQEIDILRTLYHEHIIKYKGCCEDQGEKSLQLVMEYVPLGSLRDYLPRHSIGLAQLLLFAQQICEGMAYLHAQHYIHRDLAARNVLLDNDRLVKIGDFGLAKAVPEGHEYYRVREDGDSPVFWYAPECLKEYKFYYASDVWSFGVTLYELLTHCDSSQSPPTKFLELIGIAQGQMTVLRLTELLERGERLPRPDKCPCEVYHLMKNCWETEASFRPTFENLIPILKTVHEKYQGQAPSVFSVC

SEQ ID NO: 320849 - DNA, 3564 bp, Artificial Sequence
  derived and/or modified sequence
atgcccctgagacactggggcatggccagaggcagcaagcccgtgggcgacggcgcccagcccatggccgccatgggcggcctgaaggtgctgctgcactgggccggccccggcggcggcgagccctgggtgaccttcagcgagagcagcctgaccgccgaggaggtgtgcatccacatcgcccacaaggtgggcatcacccccccctgcttcaacctgttcgccctgttcgacgcccaggcccaggtgtggctgccccccaaccacatcctggagatccccagagacgccagcctgatgctgtacttcagaatcagattctacttcagaaactggcacggcatgaaccccagagagcccgccgtgtacagatgcggcccccccggcaccgaggccagcagcgaccagaccgcccagggcatgcagctgctggaccccgccagcttcgagtacctgttcgagcagggcaagcacgagttcgtgaacgacgtggccagcctgtgggagctgagcaccgaggaggagatccaccacttcaagaacgagagcctgggcatggccttcctgcacctgtgccacctggccctgagacacggcatccccctggaggaggtggccaagaagaccagcttcaaggactgcatccccagaagcttcagaagacacatcagacagcacagcgccctgaccagactgagactgagaaacgtgttcagaagattcctgagagacttccagcccggcagactgagccagcagatggtgatggtgaagtacctggccaccctggagagactggcccccagattcggcaccgagagagtgcccgtgtgccacctgagactgctggcccaggccgagggcgagccctgctacatcagagacagcggcgtggcccccaccgaccccggccccgagagcgccgccggcccccccacccacgaggtgctggtgaccggcaccggcggcatccagtggtggcccgtggaggaggaggtgaacaaggaggagggcagcagcggcagcagcggcagaaacccccaggccagcctgttcggcaagaaggccaaggcccacaaggccgtgggccagcccgccgacagacccagagagcccctgtgggcctacttctgcgacttcagagacatcacccacgtggtgctgaaggagcactgcgtgagcatccacagacaggacaacaagtgcctggagctgagcctgcccagcagagccgccgccctgagcttcgtgagcctggtggacggctacttcagactgaccgccgacagcagccactacctgtgccacgaggtggccccccccagactggtgatgagcatcagagacggcatccacggccccctgctggagcccttcgtgcaggccaagctgagacccgaggacggcctgtacctgatccactggagcaccagccacccctacagactgatcctgaccgtggcccagagaagccaggcccccgacggcatgcagagcctgagactgagaaagttccccatcgagcagcaggacggcgccttcgtgctggagggctggggcagaagcttccccagcgtgagagagctgggcgccgccctgcagggctgcctgctgagagccggcgacgactgcttcagcctgagaagatgctgcctgccccagcccggcgagaccagcaacctgatcatcatgagaggcgccagagccagccccagaaccctgaacctgagccagctgagcttccacagagtggaccagaaggagatcacccagctgagccacctgggccagggcaccagaaccaacgtgtacgagggcagactgagagtggagggcagcggcgaccccgaggagggcaagatggacgacgaggaccccctggtgcccggcagagacagaggccaggagctgagagtggtgctgaaggtgctggaccccagccaccacgacatcgccctggccttctacgagaccgccagcctgatgagccaggtgagccacacccacctggccttcgtgcacggcgtgtgcgtgagaggccccgagaacatcatggtgaccgagtacgtggagcacggccccctggacgtgtggctgagaagagagagaggccacgtgcccatggcctggaagatggtggtggcccagcagctggccagcgccctgagctacctggagaacaagaacctggtgcacggcaacgtgtgcggcagaaacatcctgctggccagactgggcctggccgagggcaccagccccttcatcaagctgagcgaccccggcgtgggcctgggcgccctgagcagagaggagagagtggagagaatcccctggctggcccccgagtgcctgcccggcggcgccaacagcctgagcaccgccatggacaagtggggcttcggcgccaccctgctggagatctgcttcgacggcgaggcccccctgcagagcagaagccccagcgagaaggagcacttctaccagagacagcacagactgcccgagcccagctgcccccagctggccaccctgaccagccagtgcctgacctacgagcccacccagagacccagcttcagaaccatcctgagagacctgaccagactgcagccccacaacctggccgacgtgctgaccgtgaaccccgacagccccgccagcgaccccaccgtgttccacaagagatacctgaagaagatcagagacctgggcgagggccacttcggcaaggtgagcctgtactgctacgaccccaccaacgacggcaccggcgagatggtggccgtgaaggccctgaaggccgactgcggcccccagcacagaagcggctggaagcaggagatcgacatcctgagaaccctgtaccacgagcacatcatcaagtacaagggctgctgcgaggaccagggcgagaagagcctgcagctggtgatggagtacgtgcccctgggcagcctgagagactacctgcccagacacagcatcggcctggcccagctgctgctgttcgcccagcagatctgcgagggcatggcctacctgcacgcccagcactacatccacagagacctggccgccagaaacgtgctgctggacaacgacagactggtgaagatcggcgacttcggcctggccaaggccgtgcccgagggccacgagtactacagagtgagagaggacggcgacagccccgtgttctggtacgcccccgagtgcctgaaggagtacaagttctactacgccagcgacgtgtggagcttcggcgtgaccctgtacgagctgctgacccactgcgacagcagccagagcccccccaccaagttcctggagctgatcggcatcgcccagggccagatgaccgtgctgagactgaccgagctgctggagagaggcgagagactgcccagacccgacaagtgcccctgcgaggtgtaccacctgatgaagaactgctgggagaccgaggccagcttcagacccaccttcgagaacctgatccccatcctgaagaccgtgcacgagaagtaccagggccaggcccccagcgtgttcagcgtgtgctag

SEQ ID NO: 320850 - DNA, 3564 bp, Artificial Sequence
  derived and/or modified sequence
atgcctctaaggcattggggaatggctagagggagcaagccggtgggagacggcgcccaacccatggctgccatggggggtctgaaggtgctgctgcattgggcgggccctgggggcggggagccctgggtcacgttctccgagagttcgttaacggcagaggaagtttgtattcacattgctcacaaggtcgggataacacccccttgttttaatctctttgcactctttgatgcccaagctcaggtgtggctgccacccaaccatatcttggaaattcctagagacgcctcactgatgttgtacttcaggatcaggttttactttcgcaactggcacgggatgaatcctagggagcctgctgtttacaggtgtggcccgcctgggacagaagcttcctcagatcagacagcgcagggcatgcaactgctggatcccgcttcatttgaatacttattcgagcagggtaaacacgagtttgtgaatgatgttgctagcctgtgggaactcagcacggaagaagaaatccatcacttcaagaatgaaagtctcggcatggcattcctccacctgtgccacttggccttacggcatgggattccattggaagaagtcgccaagaaaacctcttttaaagactgcatccccagaagtttccgaaggcacattagacagcacagtgccttgaccaggctgcggttaaggaatgttttcaggcggtttctcagggatttccagcctggccgtctgtctcagcagatggtgatggtgaagtatctggcgactcttgaacgacttgctccgcgcttcggtaccgagagggttccagtgtgccatttgcgcctcctagcccaggctgagggtgagccatgttacatcagggattcaggggtagctccaacagaccctgggccggagagtgctgcagggccccccacacacgaggtgctagttacagggacaggggggatccaatggtggcctgtcgaagaagaggttaataaggaagagggatccagtggctctagtggtcggaacccccaggccagcttgtttggaaagaaagccaaggctcataaagcggttggtcagcctgctgaccggccacgcgagccactatgggcttatttctgcgacttcagagacatcacccacgtggtgctcaaggagcattgtgtgtctatacataggcaggataacaaatgcttagagctatcattaccttccagagccgccgctctgagcttcgttagcctggtggacgggtactttagacttaccgctgacagctcacattatctctgccatgaagtggccccacccaggctcgtgatgtcaataagagatggcatccacggcccgctcctcgaaccatttgtgcaggcaaagctcagacccgaggatggtttgtacctgattcactggtcgactagtcatccgtaccgcttgattttaaccgtggcccaacggtcacaggccccagacggaatgcaaagtcttagactccgaaagtttcccattgaacagcaggacggagcgttcgtcctggaaggatggggccgcagctttccttctgtgcgtgagctcggcgccgccttacagggctgcctgctgcgggccggcgacgattgcttttcactgaggcgctgttgtttgccacagccaggagaaacatccaatctgatcataatgcgtggggctcgggcgtcccctcgaaccctgaatttgagtcagctttcatttcatcgcgttgaccagaaggaaataacccagctcagtcatctgggacagggcacccggaccaacgtgtatgagggacggctcagggtcgaaggctctggtgacccagaggagggtaaaatggacgatgaggatccattggtcccaggacgcgacaggggccaggagctgagggtggtgctcaaggtgcttgacccctctcatcacgatatcgccttagccttttacgagaccgctagcctgatgagtcaagtcagccacacccaccttgcttttgtgcacggcgtctgtgtgagaggccctgagaacattatggtcacagaatatgtggagcacggtccgctagacgtgtggctccgcagagagaggggccacgtgcctatggcatggaaaatggtggttgcacagcagctggccagcgcactgtcatatttggaaaataaaaatttagtgcatggaaatgtttgcgggcgcaacatcctgcttgcacggcttggtctggccgaggggacctcacctttcattaaactgtctgaccccggagtggggctgggagctctgtcccgggaggaacgcgtcgagcgaattccatggctggctccagagtgcctccctgggggcgccaactcactaagcactgctatggataagtggggatttggcgctacgctcctggagatctgtttcgatggcgaagcccccctgcagagccgcagtccgtctgaaaaagagcacttttaccaaaggcagcataggctgcctgagccctcctgccctcagctcgccactctcacatcgcagtgcctaacgtacgaacctactcaacggccttcattcagaaccatccttagagacctgactaggctgcagccgcacaatcttgccgacgtactcacagtgaatccagattctcccgcctccgatcctaccgtgtttcacaagcgctacttaaaaaagattcgtgacctaggggagggtcactttgggaaggttagcctgtactgttacgatccaacaaatgacggtacgggagagatggtggcggttaaggccctgaaagcagattgtggcccacagcaccgctcaggatggaaacaggagattgatatcctgcggaccctctaccatgaacatattatcaagtataagggatgttgtgaggatcaaggggagaagagtctgcaactggtcatggaatacgttcctctaggctctctccgagactatcttcctcggcactcaatcggactcgcccagttgctcctgtttgctcaacagatctgcgagggcatggcctatctgcacgctcaacactatatccaccgagatctagctgccaggaatgtactgttagacaatgaccgccttgtgaagatcggggatttcggccttgctaaagctgtgcctgagggccatgaatactatagggttcgcgaagacggcgactctccagtgttctggtatgccccagaatgcttgaaggagtacaaattctactacgcctctgatgtctggtcattcggcgttacactttacgagctgcttacccattgtgattcttcacagtccccaccaaccaaattccttgaactcattggcattgcacaaggccagatgactgttttacgccttacagaactgctggagcggggggagagacttccacgccccgataaatgtccctgtgaagtttaccatttaatgaagaactgttgggaaaccgaagcctcttttagacctactttcgagaacctaataccaattctgaaaacagtgcacgaaaaataccaaggacaagccccttcggtcttctctgtgtgctag

SEQ ID NO: 320851 - DNA, 3564 bp, Artificial Sequence
  derived and/or modified sequence
atgcctctgagacactgggggatggcgcggggcagcaaacccgtgggggatggggcccagcccatggcagctatgggaggccttaaggtgcttctgcattgggctggccccggggggggagagccatgggtcactttcagtgaaagttcgctgacagccgaagaggtgtgcattcatatagcccacaaggtggggataacaccaccctgcttcaatctttttgctttatttgacgctcaagcgcaggtttggctgccccccaaccatatccttgaaattccgagggacgcctcacttatgctctatttccggatcaggttctattttaggaactggcacggtatgaatcctcgtgaacccgcggtttatcggtgcggaccccccggcacggaggcatcttcagaccaaactgctcagggcatgcagttgctagatccagcctcatttgaatacctgttcgaacagggcaagcacgaattcgttaatgacgtggcgagtctttgggaactgagtacagaagaggaaatccaccacttcaaaaacgagtcactgggaatggcattcctgcacttgtgtcatctggctttgcggcatggtattcctttggaagaggtagctaaaaagactagctttaaagactgcattcccaggtcgtttagacggcacatacgccagcatagcgcactcacacgtctgcgactgaggaatgtgtttcgcaggtttctgagagactttcaacctggtaggctgtcccaacagatggttatggtaaaatacttggcaaccctggagcgactggccccgagattcgggacggaaagagtgccggtgtgtcatctgaggctgctcgcgcaggccgaaggcgaaccctgttacatcagggactccggcgttgcgcccaccgacccgggccctgagagtgcagccggcccgcctacacatgaagtgcttgttaccggaacaggtggtattcaatggtggcctgtggaagaggaggttaataaagaagagggcagttctggctcaagcggccggaacccgcaagcaagtctgttcggtaagaaggcaaaagcccataaagccgttgggcaaccagcggatcggccacgcgaaccactttgggcatacttttgcgacttccgggacatcacacacgtggtactgaaagagcattgcgtcagtatccatcgccaggataataagtgtctggagctgagcctgccgagtagagcagctgctttgtcattcgtgtccctggtggatggctactttcgcctaactgctgatagctctcattacctgtgccacgaagtggctccccccagactggtgatgtccattcgagacggcatacatggacctctgcttgagccattcgttcaggccaagcttcgacctgaagatggactgtacctgatccactggtcaacatcgcacccctaccggctgatcttaacagtcgcccagaggtcccaggcccccgacggaatgcagagcctccgtctgcgcaagttcccaatcgaacaacaggacggcgcatttgtgctggagggttggggccgatcattcccgagtgtcagagagctcggcgcggccctgcagggctgtttacttagggccggcgacgattgtttctctcttcgcagatgttgcttaccgcagccgggcgagacatctaacctgataataatgcggggtgcccgcgcttcccctcgcacgctgaacctatctcagctctcgtttcacagggtggatcaaaaggagatcacccaactgtcacatcttggtcaggggacaaggaccaacgtgtacgaaggccggctgcgggtagaaggctcaggtgacccagaggagggaaaaatggacgatgaggaccccctggtgcctggccgcgacaggggccaagaactgcgggtggtgttaaaagtgctggatccttcccaccacgatatcgcactggctttctacgaaactgcaagtcttatgtctcaggtatcccatacacatctggcattcgttcacggtgtatgtgtacgcggaccagagaatattatggtgacagaatatgtggagcacggccctctcgacgtgtggctccggagagagaggggacacgttcccatggcctggaagatggttgtcgcccagcagctggcctcagctctgtcctacttagagaataagaatttggtgcacggcaacgtgtgtggccgcaatatactcttggcacggctgggtctggccgagggtacttctccctttattaaactgagtgaccccggggtgggtctgggtgccctgtcccgcgaggagcgggtggaaaggataccctggctggctcctgaatgcctgcccggcggggccaacagtctcagtaccgcaatggataaatggggtttcggagcgacattgctcgagatatgctttgacggcgaggcacctttacagagcaggagcccaagcgaaaaggaacatttctatcagcgccagcataggttaccagagccttcctgtcctcagctagctacactcacctcccagtgtttgacatatgagcccacccagcgtccctcatttcgaactatcctgagggacttaactagactccagccccacaatctggccgatgtgctcacagtgaatcccgactcccctgccagtgaccctactgtgttccataagcgctacctcaaaaaaatacgtgatttaggcgaagggcatttcgggaaagtgagtctgtactgttatgaccccacaaatgatggaactggggagatggttgccgtaaaagccctcaaggcagattgcggccctcagcataggagtggctggaaacaggagatcgacattctgaggaccctgtaccacgaacacattatcaagtataagggatgctgtgaagaccagggcgaaaaatcccttcagctggtgatggaatatgtcccgctgggttccttacgggattacctgcctagacattcaatcggcctagcccagctcctgttgttcgcgcagcagatttgtgagggaatggcatacttgcacgcacagcattatattcatagggatctcgcagctcgcaatgtactcctggacaacgacagattggtcaagattggagacttcggactcgccaaggccgtccccgagggccatgagtactatagggttcgcgaggacggcgactcgcctgtgttctggtacgctcctgaatgtctaaaggagtataaattctattatgccagcgatgtgtggagctttggggtgactctctacgagctcctgactcattgcgattcttcgcagagcccaccaactaagttcctggagctgatcggcatagcccagggacagatgacggtcctcagacttacagagttgctcgaacgtggggaacgacttccgaggcctgataagtgcccttgcgaagtgtaccacctgatgaaaaactgttgggagaccgaggcatcttttcgtcctactttcgagaacctgatccctatccttaagaccgtacacgagaaataccagggacaagcaccatccgtgtttagtgtatgctag

SEQ ID NO: 320852 - DNA, 3564 bp, Artificial Sequence
  derived and/or modified sequence
atgcccctgcggcactggggcatggcccggggcagcaagcctgtgggagatggagcccagcccatggccgccatgggcggcctgaaggtgctgctgcactgggccggccctgggggcggggagccctgggtgaccttcagcgagagcagcctgacagctgaggaggtgtgcatccacatcgcccacaaggtgggcatcaccccaccctgcttcaacctgtttgccctgtttgatgcccaggcccaggtgtggctgccccccaaccacatcctggagatccccagagatgccagcctgatgctgtacttccgcatccgcttctacttcaggaactggcacggcatgaacccccgggagcctgctgtgtaccgctgtggccccccaggcacagaggccagcagtgaccagacagcccagggcatgcagctgctggaccctgccagctttgagtacctgtttgagcagggcaagcatgaatttgtgaatgatgtggccagcctgtgggagctgagcacagaggaggagatccaccacttcaagaatgaaagcctgggcatggccttcctgcacctgtgccacctggccctgcggcacggcatccccctggaggaggtggccaagaagaccagcttcaaggactgcatccccaggagcttccgccgccacatccggcagcacagcgccctgacccggctgcggctgagaaatgtgttccgccgcttcctgcgggacttccagcccggccgcctgagccagcagatggtgatggtgaagtacctggccaccctggagcggctggccccccgcttcggcacagagcgggtgcctgtgtgccacctgcggctgctggcccaggccgagggggagccctgctacatccgggacagcggcgtggcccccacagatcctggccctgagagcgctgctggcccccccacccatgaggtgctggtgactggaactggaggcatccagtggtggcctgtggaggaggaggtgaacaaggaggagggcagcagcggcagcagtggaagaaacccccaggccagcctgtttgggaagaaggccaaggcccacaaggctgtgggccagcctgctgaccggccccgggagcccctgtgggcctacttctgtgacttccgggacatcacccacgtggtgctgaaggagcactgtgtgtccatccaccggcaggacaacaagtgcctggagctgagcctgcccagcagagctgctgccctgagctttgtgtccctggtggatggctacttccggctgacagctgacagcagccactacctgtgccacgaggtggccccaccccggctggtgatgagcatcagagatggcatccacggccccctgctggagccctttgtgcaggccaagctgcggccagaagatggcctgtacctgatccactggagcaccagccacccctaccgcctcatcctgactgtggcccagaggagccaggccccagatggcatgcagagcctgcggctgaggaagttccccatcgagcagcaggatggagcctttgtgctggagggctggggccgctccttccccagcgtgcgggagctgggcgccgccctgcagggctgcctgctgcgggctggagatgactgcttcagcctgcggcgctgctgcctgccccagcctggagagaccagcaacctgatcatcatgagaggagcccgggccagccccaggaccctgaacctgagccagctgtccttccaccgggtggaccagaaggagatcacccagctgagccacctgggccagggcaccaggaccaacgtgtatgagggccgcctgcgggtggagggcagcggggaccctgaggagggcaagatggatgatgaggaccccctggtgcccggccgggaccggggccaggagctgcgggtggtgctgaaggtgctggaccccagccaccacgacatcgccctggccttctatgaaacagccagcctgatgagccaggtgagccacacccacctggcctttgtgcacggcgtgtgtgtgcggggccctgagaacatcatggtgacagaatatgtggagcacggccccctggatgtgtggctgcggcgggagcggggccacgtgcccatggcctggaagatggtggtggcccagcagctggccagcgccctgagctacctggagaacaagaacctggtgcacggcaatgtgtgtggcaggaacatcctgctggcccggctgggcctggccgagggcaccagccccttcatcaagctgagtgaccccggggtgggcctgggcgccctgagccgggaggagcgggtggagcgcatcccctggctggcccctgagtgcctgcctggaggagccaacagcctgagcacagccatggacaagtggggctttggagccaccctgctggagatctgctttgatggagaggcccccctgcagagccgcagccccagcgagaaggagcacttctaccagaggcagcaccggctgcctgagcccagctgcccccagctggccaccctgaccagccagtgcctgacctatgagcccacccagaggcccagcttccgcaccatcctgcgggacctgacccggctgcagccccacaacctggctgatgtgctgactgtgaacccagacagccctgccagtgaccccaccgtcttccacaagcgctacctgaagaagatccgggacctgggggagggccactttgggaaggtgtccctgtactgctatgaccccaccaatgatggcactggagagatggtggccgtgaaggccctgaaggctgactgtggcccccagcacaggagcggctggaagcaggagattgacatcctgcggaccctgtaccacgagcacatcatcaagtacaagggctgctgtgaggaccagggcgagaagagcctgcagctggtgatggagtatgtgcccctgggcagcctgcgggactacctgcccaggcacagcatcggcctggcccagctgctgctgtttgcccagcagatctgtgagggcatggcctacctgcacgcccagcactacatccaccgggacctggccgccagaaatgtgctgctggacaatgaccggctggtgaagattggagactttggcctggccaaggctgtgcctgagggccacgagtactacagagtgagagaagatggagacagccctgtgttctggtacgccccagaatgtctgaaggagtacaagttctactatgccagtgatgtgtggagctttggagtgaccctgtatgagctgctgacccactgtgacagcagccagagcccccccaccaagttcctggagctgattggcatcgcccagggccagatgacagtgctgcggctgacagagctgctggagcggggggagcggctgcccaggccagacaagtgcccctgtgaggtgtaccacctgatgaagaactgctgggagacagaggccagcttccggcccacctttgaaaatctcatccccatcctgaagacagtgcatgagaagtaccagggccaggcccccagcgtcttctctgtgtgctag

SEQ ID NO: 320853 - DNA, 3564 bp, Artificial Sequence
  derived and/or modified sequence
atgcccctgcggcactggggcatggcccggggcagcaagcccgtgggagacggcgctcaacctatggccgcgatgggcggtctgaaggttcttctgcactgggctgggccaggaggcggcgaaccatgggtgacattctccgaaagctctctgaccgccgaagaagtgtgcatccatatagcccacaaagttggcattactcctccatgtttcaacctgttcgccttgttcgacgcccaggcccaggtgtggttaccccctaaccacatcctggagattcctcgcgacgcgtcgctcatgctctattttcgcatcagattttatttccgcaattggcacggcatgaacccccgcgaacctgctgtgtatcgatgcggaccaccaggcacagaggctagttccgaccagactgcacaaggcatgcagctactcgatccagcctcgttcgagtacctctttgaacagggcaaacatgagttcgtcaatgacgttgcctccctctgggagttgagtaccgaagaggaaattcatcatttcaaaaacgagtccctgggcatggcgtttctgcacttgtgccatctggccctgcgacacggcatcccactggaggaggtcgcaaaaaagacctcattcaaagactgcatcccacgatcctttagacggcacatccgtcagcacagcgcgctgacccggctgagactgcgaaacgtgtttcgccgcttcctgcgtgacttccagcccggaaggctgtcccaacagatggtgatggttaagtatctcgccaccctggaaaggctcgctccaaggtttggtacagagagggtgcccgtgtgccacctgcgcctgctggcacaagctgagggagaaccctgttacatcagagattctggtgtggcccctacggatccggggcccgaatccgccgccgggccacctacgcacgaggtcctggtgacagggacgggcggcattcaatggtggcctgtcgaggaggaggtaaataaagaagagggatcctccggttcaagcggcaggaacccccaggcctccctttttggcaagaaggccaaagcccataaggccgttggtcaacccgccgaccgtcctcgtgagcccttatgggcctatttttgcgattttcgcgatattactcatgtagtgctgaaagagcattgcgtatcaatccataggcaggacaataagtgtctcgaattatcgctgcccagccgagctgctgcactatcatttgtgtccctggtggatggttactttagactgactgccgactcctcccactacttatgccacgaggtggctccaccgcgcctcgtcatgtccatacgtgacggcatacatggtccgctcctcgagccctttgtacaggcaaagttgaggcctgaggatgggttgtatctaattcactggagcacctcccatccttacagactgatcctgacagttgcccagaggtctcaggctcccgacgggatgcagtccctccgcctgcggaaattcccgattgaacagcaggacggagctttcgttctcgaggggtggggaagaagcttcccttcagtgagagagctgggggccgcactgcagggctgtctgttgagggcaggtgacgactgcttcagcctgcgacgctgttgcctccctcagccaggtgagacatctaacctcatcattatgagaggtgctcgcgctagtcctcgaacgcttaatctgtctcagctttcttttcaccgggtagaccagaaagagatcacacagctgtcccaccttggccaaggtactcgcacaaacgtatacgagggcaggctccgggttgagggcagtggtgaccctgaagagggcaagatggatgatgaggaccccctggtgcctgggcgcgacagaggtcaggagctgcgtgtcgttttaaaagtcctcgacccctctcaccacgacatagcattggctttttatgagacagcatctctaatgtcccaggtatcgcacacacatctggctttcgtgcacggcgtgtgcgtgcgaggcccagaaaatatcatggtgaccgagtacgtagaacatggaccgctggacgtctggctgcggcgtgagcggggacatgtgccaatggcttggaaaatggtagtggcacaacagctcgcatccgccctgtcctacctcgagaacaaaaatctggttcatggaaatgtgtgtggtcgcaacattctgcttgcacgacttgggctagccgagggtacctcaccattcatcaagctgtccgaccccggggtcggtctaggcgcgctcagtagagaagagagagtggaacgaataccatggcttgctccagagtgtcttcccggaggcgcaaactctctctcgaccgcgatggataagtggggatttggcgctactctgctggagatatgttttgatggcgaagcgccactgcagtcaagaagcccatccgagaaggagcatttttatcagagacaacacaggctgccagaacccagttgtccccagttggcaaccctgacatcacagtgcctgacttacgagccgacacaacgacctagttttagaactattctgcgagacctcacccggttgcagccccacaatctagccgatgtgctgactgtaaaccccgacagtccagcatcagatccaactgttttccataaaagatacctgaaaaagataagagacctgggggaaggtcattttgggaaagtaagtctctactgctatgatcctacaaacgatggcacaggagagatggtcgccgtgaaggcactgaaagctgattgcggacctcagcatcgaagtggctggaaacaagagatcgatatccttaggaccctatatcacgagcacattatcaaatataaggggtgttgtgaagatcagggtgaaaagtccctgcagctggtcatggaatacgtccctttgggatccctgagagattatctccctcgccacagtataggactcgctcaattactgttattcgcgcagcagatctgcgagggtatggcctatttacacgctcagcactatattcaccgggatctggccgctcgtaatgtactcttggataatgaccgccttgtaaaaattggggactttggccttgccaaagccgttcccgaagggcacgagtattatcgtgtccgggaagatggcgattcccccgtgttctggtatgcgccggagtgtttaaaggagtacaaattttattacgcatctgatgtctggtccttcggcgtcacgctgtacgagttactgacacattgtgacagctctcaatcacctcctactaagttcctcgagctcattggtatcgcgcaaggacagatgactgtgctgcgcctgacagagttgctagagaggggtgaaaggctaccccgtccggataaatgtccatgcgaggtgtaccacttgatgaagaattgctgggagactgaggcttcattccgtcctacctttgaaaacttaattcccattctcaagaccgtgcacgagaaataccaagggcaagccccctctgtcttctccgtgtgttag

SEQ ID NO: 320854 - DNA, 3564 bp, Artificial Sequence
  derived and/or modified sequence
atgcccctgcggcactggggcatggcccggggcagcaagcccgtgggtgacggtgcacagccgatggcggctatggggggcctgaaggttctgctccattgggccgggccaggggggggagaaccctgggtgaccttcagtgagagttctctgacagccgaggaagtgtgcattcatatagcgcataaggttggtataactccaccttgctttaatctttttgcactctttgacgcccaggctcaggtctggttgccccccaatcacattcttgagatccccagggatgcaagcttgatgttgtacttccgcatacggttttatttcaggaattggcacggaatgaaccccagagaacccgcagtgtatagatgcggcccaccaggaacggaggcctcttccgaccaaacagcacagggcatgcaactcctggaccctgcatcttttgagtatctctttgaacaaggcaaacacgaatttgtgaatgatgttgcctccctctgggagctgagtaccgaggaggagattcatcatttcaagaacgaaagtctcggaatggcctttttacatctgtgccacttggccctaaggcacggtattccactggaagaggttgctaagaagacaagcttcaaagattgtatccccagatcatttcgacgacatataagacaacattcggcccttactcggctccggctgcgcaatgtgttccggagatttctgcgagacttccagcccggtaggttatctcagcagatggttatggtgaagtacctagccaccctggagcgcctcgccccccgctttggcaccgagagggtgccagtttgccacttgagactgctcgcacaggccgaaggggagccttgttacatcagggactccggcgtggcacctacggatccaggccccgagtctgctgccgggcctcctactcacgaagtgcttgtgactggaaccggtggtattcagtggtggcccgtggaagaggaggtcaacaaggaagagggaagctcaggctcatctggaaggaatcctcaagcctcactgtttggaaaaaaggcgaaagcacacaaggcagtcggtcagcccgcggaccggccaagagagcccctgtgggcatacttttgcgacttccgggacattacacacgtggtgctgaaggagcactgtgtttcaattcatcgtcaggacaataagtgcctggagttaagcctgccctctcgcgcagccgccttgagctttgtgagcctagtagatgggtattttagactcaccgctgatagtagccattatttatgccacgaagtagccccccctcgcttagtcatgagtatcagggacggaattcacgggcccctgctggagcccttcgtacaagctaagctcaggcccgaggacggcctgtatttgatccattggagtacgagtcatccttatcgactcatactgactgtggcgcagagaagtcaggcgcccgatggcatgcagtccctgcggctccgcaagtttcctatcgagcagcaagacggggccttcgtactcgagggctggggcagatcattcccaagcgtgagggagttaggggcagctttgcaggggtgcttgctgagagccggcgacgattgctttagcttgaggcgctgctgcctgcctcagccgggcgaaacttcaaatctgattataatgcgaggagcacgagcgtcaccgcgcactctaaatctttcccagctcagcttccaccgagttgatcaaaaagaaataacccaattatcccaccttggccagggcacacggacgaacgtctacgagggcaggctgcgagtcgagggatccggggacccagaagagggaaagatggatgacgaagacccactggtgccagggcgcgatcgtggccaggagctgcgcgttgtgctgaaggtcctcgacccaagtcaccacgacatcgcacttgcattctatgagactgcatctttgatgtcccaggtgtcccacacacacctggcttttgtccacggcgtatgcgtccgggggcccgagaatattatggttaccgagtacgtggaacacggcccactggacgtctggctgagacgcgagcgcggacacgtccctatggcgtggaaaatggtcgtagcccagcaattagccagcgctttgtcttacctggaaaataagaatttagttcacggaaacgtctgcggtcgcaacattttactggctagactcggactagcggaggggacctccccttttattaagctcagcgacccaggtgtgggccttggcgcgctatcacgggaagaacgggtggaaaggatcccgtggctggcaccagagtgtctgccgggaggagcgaactcactttctaccgccatggacaaatgggggttcggcgccaccctcctcgaaatctgcttcgatggagaagctcccctgcagagtaggtctccctccgagaaagaacacttctaccagagacagcatagactgcccgagccgtcctgcccccagttggccactctcaccagtcagtgcttgacctatgagccaacccagcggccctcattccgaaccatcttgcgcgatctgacaagacttcagccacacaacctggccgatgtgctgaccgtcaatccggattctccagcttcagatcctaccgtgttccacaagaggtatctcaaaaaaatccgggatctaggagagggccactttggaaaggtgagtctgtattgctatgacccaacaaacgacggcaccggggaaatggtggcggtcaaggcgctgaaggccgactgcggtccccaacataggtctggctggaagcaggagattgacattctgcgcacgctgtaccacgaacacataatcaaatataagggctgctgcgaggaccagggcgaaaagtctctacagcttgttatggagtatgtcccactcggcagtctgcgcgactacctgcctcgacattctatcggacttgctcagctgcttctgttcgcacagcagatttgcgagggcatggcttacctacatgctcagcattacatacaccgggacctcgctgctcgtaatgttctcttagacaatgaccgcctggtgaagatcggcgattttggtctggcaaaagctgttccagagggtcatgagtattatcgtgtgcgagaggatggggattcgccggtgttttggtatgccccggagtgcctgaaggaatataaattttattacgcctcagatgtgtggtcttttggcgtaaccttatacgagctgctgacacactgtgactcctcacagtctccgccaactaagttcctggaattaatcggcattgctcaaggccaaatgacagttctccggctcaccgagttattggaacggggcgaacggcttccgcggcccgacaaatgtccctgtgaagtctatcaccttatgaaaaattgctgggagaccgaagcctcatttagacccacattcgagaacctgataccaattttgaagacagtccacgaaaaataccagggacaagccccctcagttttcagcgtgtgctag

SEQ ID NO: 320855 - DNA, 3564 bp, Artificial Sequence
  derived and/or modified sequence
atgcccctgagacattggggaatggccagagggtcaaaaccagtgggcgatggcgcacagcccatggcagccatgggtggcctcaaggtgctcctgcactgggccggacccggtggcggagaaccgtgggtcaccttctcagaaagttcactgaccgccgaagaggtttgcattcacatcgcacacaaggttggtataacccctccctgtttcaacctgtttgccctgtttgatgcccaagcccaggtgtggcttccccctaaccacatattggaaattccacgggacgcttccctgatgctctacttccggattagattctactttcggaactggcacggaatgaaccctagggagcccgcagtatacaggtgcggcccaccagggaccgaggcgtcctccgaccaaaccgcacaggggatgcagttactggatccagccagctttgagtatctgttcgagcagggaaaacacgagtttgttaacgacgtggcttcactctgggagctctctacggaagaggagattcaccattttaagaatgagagcctgggaatggcatttctgcacttatgtcacttggctctacggcacgggattccattggaggaagtggccaagaagacttcattcaaggactgcatccctcggtccttccggaggcacatcaggcagcacagtgccctgacaagactgagactgcgcaacgtgtttaggcggttccttagggactttcagcccggaaggttaagccagcagatggtgatggtgaaatacctggctactctggagcggttagcccctaggttcggcaccgaaagggtgccggtctgccatctaagacttcttgcccaggcagagggcgagccatgttacattcgggacagtggcgtcgcccctacagaccccggtcccgaatcagcggctggcccacccactcacgaggtactcgtgaccggaaccggtggcatccagtggtggcctgtcgaagaggaagttaacaaggaagaggggtcttcaggatcttctggccgtaacccccaggcttcccttttcggcaagaaagctaaagctcacaaggctgtggggcaacctgccgacagacctcgagaacccctctgggcgtatttctgtgactttagagacatcacacatgtagtgctgaaggagcactgtgtgagcatccaccgacaggataataagtgcttggagctgtcactacccagcagagctgccgctctgtcctttgtctctcttgtggatgggtactttaggctcactgcggatagttcgcattacctgtgccatgaagtcgcgccaccccgactggtgatgtcaataagagacggcatccatggaccattgctagagcctttcgtacaagcaaaattaaggcctgaagacggattgtatctgatccactggtcaactagccacccgtatcggctgattcttactgtggcacaacggtcccaggctcccgacggcatgcaaagcctccgattgaggaaattccccatagagcaacaagacggggcttttgtactggaaggctggggaaggagcttccccagcgtgcgggagctaggcgctgccctgcaggggtgcctgctgagggctggtgacgattgtttttctctgaggaggtgctgtctcccccaacctggcgaaacaagcaacctgataattatgaggggggctcgtgccagcccacgcacattgaacctatcacaactgtcctttcatcgggtggaccaaaaggagattacgcagcttagccacttgggacagggcactaggaccaatgtttatgaaggtaggctccgggtcgaggggtccggagaccctgaagagggcaagatggatgatgaggaccccctggttccagggagagataggggtcaggagctacgcgtcgtgcttaaagtgctggatccttcacaccacgacattgccctcgcattttacgaaacagcttctctcatgagtcaggtgtcccatactcacctagcgttcgtacacggtgtctgtgtcagaggccctgagaacatcatggtcacagagtatgtagagcatggcccactggacgtttggctcagaagggagcggggtcatgtgccgatggcctggaagatggtagtggcccagcagctggcctctgccctgagctatctagaaaataagaatctggtgcatgggaacgtctgtggcaggaatatcctgctcgcgaggctaggcctcgctgaaggaaccagtccatttattaagctctctgatccaggagtgggactcggagctttatctagagaggaaagagtggaacgtataccttggttggcccctgagtgcctgcccggtggcgctaacagcctttccactgcgatggacaagtggggattcggtgccacgctgttagaaatatgttttgatggagaagcaccactgcagagcaggtctcctagcgaaaaagaacatttctatcagcgtcagcatagactgcccgaaccctcctgtccacaattagccaccctcacatcccagtgtctcacatatgaaccaacacagcgtcctagcttcaggactattttacgcgatttgactaggctgcaaccacacaacctggcggatgttttgacagtgaatcccgactcacccgcttctgaccctacagtgttccacaaacgatatctcaaaaagatccgggacctgggcgagggccacttcggaaaggtttctctgtattgttatgacccaacaaacgacggaaccggtgagatggtggccgttaaagctttaaaggcagattgcggaccccaacaccgatctgggtggaaacaggaaatcgatatcttgagaacactgtaccatgagcacatcattaaatataagggatgttgcgaggatcagggagaaaagtcactccagctggtgatggaatatgtgcccttgggatcgctgagggattatcttccgcgacatagcatcggtctggcccagttgctgctcttcgcccaacagatttgcgagggaatggcatatctgcatgcccagcactatattcacagggacctcgctgcgcgaaacgttttgttggataacgataggctagttaagatcggggacttcggcctggccaaggcagttcccgaaggccatgaatattatcgagttagggaggatggggattcaccagtcttctggtacgcccctgagtgcctgaaagagtataaattctactatgcatcagacgtgtggtcatttggggtcacactgtacgaattgcttactcactgcgactccagtcaaagtcctccaactaaatttctggaactcatcggaattgcccagggccagatgaccgtcctcagactcactgaattgctggagaggggggaacgattaccacggccagacaagtgtccgtgtgaggtatatcatctaatgaagaattgctgggagaccgaagcatcgttccgcccaaccttcgaaaacctgatcccaatcctaaagaccgttcatgagaaataccaggggcaggcaccgtctgtatttagcgtgtgttag

SEQ ID NO: 320856 - DNA, 3564 bp, Artificial Sequence
  derived and/or modified sequence
atgcctctgcggcattggggcatggcaaggggatcaaaacccgtgggggacggggcacagcctatggcagcaatggggggtcttaaagtcctcctgcattgggcaggccctggagggggagagccatgggtgacattctccgaatctagtctaacagccgaagaggtctgcattcatatagctcataaggttggcataacacccccttgtttcaatctatttgcgttgtttgacgcccaggcccaggtgtggttgccacctaatcacattctcgagattcctcgtgatgctagcctgatgctctatttcaggatcagattttatttccggaattggcacgggatgaacccacgggaacccgctgtgtacaggtgtggccctcctggaactgaagctagctctgaccagaccgcccaggggatgcagctgttagatcccgcatcctttgagtacctttttgaacagggcaagcatgagttcgtaaacgatgttgcttcgctatgggaattgagtaccgaggaggagatacaccatttcaagaacgaatccttagggatggcctttctgcacctctgccatctggcacttagacacggcatacctcttgaggaggtggcaaaaaagactagctttaaggattgtattcctaggtccttccgtcgccacattcgccagcactcagctttgactcgactccggctacggaacgtgtttcggcgatttctccgagactttcagccgggaagactcagccagcagatggtgatggttaagtacctggcgacactggagcgcctggcccctaggtttgggacagaacgcgtccccgtgtgccatctgcgactgctggctcaagcagagggcgagccctgctacatcagggattccggggtggctccaacggatcctggcccagagtccgccgcaggtcctcctactcacgaggtgctggtaaccgggacagggggaatacaatggtggccagttgaggaagaggtgaataaggaggaaggatcatccggcagtagtggaagaaatccccaagctagcctattcggcaagaaggcaaaagcacataaggcagtgggtcagccagcagaccggccacgagagcccctttgggcttacttttgtgatttccgagacatcactcacgttgtgctgaaagaacactgtgtctccattcaccggcaggataataagtgtctcgagctgtcacttcccagcagggcagccgctctgagctttgtatctttggtggatggctatttcaggctgacagccgattcctctcactacctctgccatgaggtcgctcctcccagactggtgatgtctataagggacggtattcacggccctctgctcgaaccatttgtgcaggcaaagctcaggcccgaggacggactgtacttaatacattggagcacctcccatccataccgcctaatccttaccgttgcgcagcggtcccaggcacctgatggaatgcagtctctcagacttagaaaatttcctatagagcaacaagacggcgcattcgtgctcgaaggttggggtcggagcttcccatccgtgcgcgagctgggggcagctttacaggggtgtcttctgcgggctggggacgattgtttctctctcagaaggtgctgcctcccccagccaggtgaaacttccaatcttatcataatgcggggagctcgcgcatcacccagaaccctaaacctatcccagctgagtttccacagagtggaccaaaaggagattactcagttgtcccacctcggccagggcactcggacgaatgtttatgaggggaggctcagagtcgagggtagcggcgacccggaggaaggaaagatggatgacgaagacccgttggtgcccggtagagatagggggcaggagctccgcgtcgttctcaaggtcttggacccctcccaccacgatatcgccttagcattttatgaaaccgcttcacttatgtcccaggtgtcgcatacacaccttgcttttgttcatggggtgtgcgttcgcggtcctgagaatatcatggtgacagaatatgtggagcacggaccgcttgatgtgtggcttagaagagaacggggtcatgttcccatggcctggaaaatggtagtcgctcagcagttagcctcggctctttcctatctcgaaaataagaatctggtccatgggaatgtctgtgggagaaacatcctccttgcaaggctgggactggccgagggcacttcccctttcattaaactgtccgacccaggcgtgggactcggggctctcagtagggaagaacgggtggaacgcattccctggcttgccccagagtgtcttcccggaggcgcaaattccctgtccaccgcgatggataaatgggggttcggcgcaacgctcctcgagatctgcttcgatggcgaggccccactgcagtctagatcccccagcgaaaaggagcacttctatcagcggcaacaccggcttcccgaaccttcctgcccccagctggcaacgctcacttcccagtgccttacctacgagcctacccagcgcccatctttcagaacaattttaagggatctgactcgactgcagcctcataaccttgccgatgtccttactgtaaaccccgatagccctgccagtgatcctacagtttttcacaagaggtacctaaaaaagatccgggatctgggtgagggacactttggcaaagtatccttgtactgctacgatccgactaatgacggtaccggtgaaatggtggcagtcaaggccctaaaggccgattgtggcccacagcatcgctcaggatggaaacaggagatagacatccttcgcacactgtaccacgaacatattataaaatacaagggatgttgtgaagaccagggcgaaaagtcccttcagctagtgatggaatatgtccctcttgggtctcttcgggattacctgcccagacactcaatcggcctggcacagcttcttctttttgcacaacagatttgtgaggggatggcttaccttcacgcacagcactacatacacagagatctcgcagcgcgaaacgtcctcctggacaatgatagactggtgaagatcggagattttggactggcaaaggcggtgcctgagggacatgaatattaccgcgtgagagaggacggggattcacccgtgttctggtatgctccggaatgtctgaaagaatacaagttttactatgcttcagacgtctggtcctttggtgtgacactatacgagctactgacacactgtgactcctctcagtcccctccgacaaagtttctagagctgatagggattgcacagggccagatgactgtcttaagactcactgagttgctggagagaggagagagacttccccgtcccgataaatgtccatgtgaggtgtaccaccttatgaagaattgctgggaaacagaggccagcttcaggcctaccttcgagaacttaatccctattctgaagacagtccacgagaagtaccagggccaggccccatctgttttttctgtctgttag

SEQ ID NO: 320857 - DNA, 3865 bp, Artificial Sequence
  derived and/or modified sequence
atgcctctgcgccactgggggatggccaggggcagtaagcccgttggggatggagcccagcccatggctgccatgggaggcctgaaggtgcttctgcactgggctggtccaggcggcggggagccctgggtcactttcagtgagtcatcgctgacagctgaggaagtctgcatccacattgcacataaagttggtatcactcctccttgcttcaatctctttgccctcttcgatgctcaggcccaagtctggttgcccccaaaccacatcctagagatccccagagatgcaagcctgatgctatatttccgcataaggttttatttccggaactggcatggcatgaatcctcgggaaccggctgtgtaccgttgtgggcccccaggaaccgaggcatcctcagatcagacagcacaggggatgcaactcctggacccagcctcatttgagtacctctttgagcagggcaagcatgagtttgtgaatgacgtggcatcactgtgggagctgtcgaccgaggaggagatccaccactttaagaatgagagcctgggcatggcctttctgcacctctgtcacctcgctctccgccatggcatccccctggaggaggtggccaagaagaccagcttcaaggactgcatcccgcgctccttccgccggcatatccggcagcacagcgccctgacccggctgcgccttcggaacgtcttccgcaggttcctgcgggacttccagccgggccgactctcccagcagatggtcatggtcaaatacctagccacactcgagcggctggcaccccgcttcggcacagagcgtgtgcccgtgtgccacctgaggctgctggcccaggccgagggggagccctgctacatccgggacagtggggtggcccctacagaccctggccctgagtctgctgctgggcccccaacccacgaggtgctggtgacaggcactggtggcatccagtggtggccagtagaggaggaggtgaacaaggaggagggttctagtggcagcagtggcaggaacccccaagccagcctgtttgggaagaaggccaaggctcacaaggcagtcggccagccggcagacaggccgcgggagccactgtgggcctacttctgtgacttccgggacatcacccacgtggtgctgaaagagcactgtgtcagcatccaccggcaggacaacaagtgcctggagctgagcttgccttcccgggctgcggcgctgtccttcgtgtcgctggtggacggctatttccgcctgacggccgactccagccactacctgtgccacgaggtggctcccccacggctggtgatgagcatccgggatgggatccacggacccctgctggagccatttgtgcaggccaagctgcggcccgaggacggcctgtacctcattcactggagcaccagccacccctaccgcctgatcctcacagtggcccagcgtagccaggcaccagacggcatgcagagcttgcggctccgaaagttccccattgagcagcaggacggggccttcgtgctggagggctggggccggtccttccccagcgttcgggaacttggggctgccttgcagggctgcttgctgagggccggggatgactgcttctctctgcgtcgctgttgcctgccccaaccaggagaaacctccaatctcatcatcatgcggggggctcgggccagccccaggacactcaacctcagccagctcagcttccaccgggttgaccagaaggagatcacccagctgtcccacttgggccagggcacaaggaccaacgtgtatgagggccgcctgcgagtggagggcagcggggaccctgaggagggcaagatggatgacgaggaccccctcgtgcctggcagggaccgtgggcaggagctacgagtggtgctcaaagtgctggaccctagtcaccatgacatcgccctggccttctacgagacagccagcctcatgagccaggtctcccacacgcacctggccttcgtgcatggcgtctgtgtgcgcggccctgaaaatatcatggtgacagagtacgtggagcacggacccctggatgtgtggctgcggagggagcggggccatgtgcccatggcttggaagatggtggtggcccagcagctggccagcgccctcagctacctggagaacaagaacctggttcatggtaatgtgtgtggccggaacatcctgctggcccggctggggttggcagagggcaccagccccttcatcaagctgagtgatcctggcgtgggcctgggcgccctctccagggaggagcgggtggagaggatcccctggctggcccccgaatgcctaccaggtggggccaacagcctaagcaccgccatggacaagtgggggtttggcgccaccctcctggagatctgctttgacggagaggcccctctgcagagccgcagtccctccgagaaggagcatttctaccagaggcagcaccggctgcccgagccctcctgcccacagctggccacactcaccagccagtgtctgacctatgagccaacccagaggccatcattccgcaccatcctgcgtgacctcacccggctgcagccccacaatcttgctgacgtcttgactgtgaacccggactcaccggcgtcggaccctacggttttccacaagcgctatttgaaaaagatccgagatctgggcgagggtcacttcggcaaggtcagcttgtactgctacgatccgaccaacgacggcactggcgagatggtggcggtgaaagccctcaaggcagactgcggcccccagcaccgctcgggctggaagcaggagattgacattctgcgcacgctctaccacgagcacatcatcaagtacaagggctgctgcgaggaccaaggcgagaagtcgctgcagctggtcatggagtacgtgcccctgggcagcctccgagactacctgccccggcacagcatcgggctggcccagctgctgctcttcgcccagcagatctgcgagggcatggcctatctgcacgcgcagcactacatccaccgagacctagccgcgcgcaacgtgctgctggacaacgacaggctggtcaagatcggggactttggcctagccaaggccgtgcccgaaggccacgagtactaccgcgtgcgcgaggatggggacagccccgtgttctggtatgccccagagtgcctgaaggagtataagttctactatgcgtcagatgtctggtccttcggggtgaccctgtatgagctgctgacgcactgtgactccagccagagcccccccacgaaattccttgagctcataggcattgctcagggtcagatgacagttctgagactcactgagttgctggaacgaggggagaggctgccacggcccgacaaatgtccctgtgaggtctatcatctcatgaagaactgctgggagacagaggcgtcctttcgcccaaccttcgagaacctcatacccattctgaagacagtccatgagaagtaccaaggccaggccccttcagtgttcagcgtgtgctgaggcacaatggcagccctgcctgggaggactggaccaggcagtggctgcagagggagcctcctgctccctgctccaggatgaaaccaagagggggatgtcagcctcacccacaccgtgtgccttactcctgtctagagaccccacctctgtgaacttatttttctttcttggccgtgagcctaaccatgatcttgagggacccaacatttgtaggggcactaatccagcccttaaatcccccagcttccaaacttgaggcccaccatctccaccatctggtaataaactcatgttttctctg

SEQ ID NO: 320858 - DNA, 4347 bp, Artificial Sequence
  derived and/or modified sequence
aaaaaaaaaaaaatccaatggtgacgagcagggagaacagagcagctgccaatgggcgtgtgcgtttcaggcggccaatgggaggaggcgtctcggcgggggacaagcagtagctacccgcgggagcggggaggggtccgggttcgagcttgtgttcccccggaagggtgagtctggacgcgggcgcggaaggagcgcggccggaggtcctcaggaagaagccgcggggactggctgcgcttgacaggctgcacttggatgggagcacctggtgcctcgggactgctccgatgcccgggtctgtgctgaatgtgtaatatgcggaactatattgaaacattacaaccatcttttgatggcaacaccctgaggacctcccttttccagatggggaaactgaggcccagaattgctaagtggcttgcttgagttgacacagggagctccaggactcaccctcagctgagccacctgccgggagcatgcctctgcgccactgggggatggccaggggcagtaagcccgttggggatggagcccagcccatggctgccatgggaggcctgaaggtgcttctgcactgggctggtccaggcggcggggagccctgggtcactttcagtgagtcatcgctgacagctgaggaagtctgcatccacattgcacataaagttggtatcactcctccttgcttcaatctctttgccctcttcgatgctcaggcccaagtctggttgcccccaaaccacatcctagagatccccagagatgcaagcctgatgctatatttccgcataaggttttatttccggaactggcatggcatgaatcctcgggaaccggctgtgtaccgttgtgggcccccaggaaccgaggcatcctcagatcagacagcacaggggatgcaactcctggacccagcctcatttgagtacctctttgagcagggcaagcatgagtttgtgaatgacgtggcatcactgtgggagctgtcgaccgaggaggagatccaccactttaagaatgagagcctgggcatggcctttctgcacctctgtcacctcgctctccgccatggcatccccctggaggaggtggccaagaagaccagcttcaaggactgcatcccgcgctccttccgccggcatatccggcagcacagcgccctgacccggctgcgccttcggaacgtcttccgcaggttcctgcgggacttccagccgggccgactctcccagcagatggtcatggtcaaatacctagccacactcgagcggctggcaccccgcttcggcacagagcgtgtgcccgtgtgccacctgaggctgctggcccaggccgagggggagccctgctacatccgggacagtggggtggcccctacagaccctggccctgagtctgctgctgggcccccaacccacgaggtgctggtgacaggcactggtggcatccagtggtggccagtagaggaggaggtgaacaaggaggagggttctagtggcagcagtggcaggaacccccaagccagcctgtttgggaagaaggccaaggctcacaaggcagtcggccagccggcagacaggccgcgggagccactgtgggcctacttctgtgacttccgggacatcacccacgtggtgctgaaagagcactgtgtcagcatccaccggcaggacaacaagtgcctggagctgagcttgccttcccgggctgcggcgctgtccttcgtgtcgctggtggacggctatttccgcctgacggccgactccagccactacctgtgccacgaggtggctcccccacggctggtgatgagcatccgggatgggatccacggacccctgctggagccatttgtgcaggccaagctgcggcccgaggacggcctgtacctcattcactggagcaccagccacccctaccgcctgatcctcacagtggcccagcgtagccaggcaccagacggcatgcagagcttgcggctccgaaagttccccattgagcagcaggacggggccttcgtgctggagggctggggccggtccttccccagcgttcgggaacttggggctgccttgcagggctgcttgctgagggccggggatgactgcttctctctgcgtcgctgttgcctgccccaaccaggagaaacctccaatctcatcatcatgcggggggctcgggccagccccaggacactcaacctcagccagctcagcttccaccgggttgaccagaaggagatcacccagctgtcccacttgggccagggcacaaggaccaacgtgtatgagggccgcctgcgagtggagggcagcggggaccctgaggagggcaagatggatgacgaggaccccctcgtgcctggcagggaccgtgggcaggagctacgagtggtgctcaaagtgctggaccctagtcaccatgacatcgccctggccttctacgagacagccagcctcatgagccaggtctcccacacgcacctggccttcgtgcatggcgtctgtgtgcgcggccctgaaaatatcatggtgacagagtacgtggagcacggacccctggatgtgtggctgcggagggagcggggccatgtgcccatggcttggaagatggtggtggcccagcagctggccagcgccctcagctacctggagaacaagaacctggttcatggtaatgtgtgtggccggaacatcctgctggcccggctggggttggcagagggcaccagccccttcatcaagctgagtgatcctggcgtgggcctgggcgccctctccagggaggagcgggtggagaggatcccctggctggcccccgaatgcctaccaggtggggccaacagcctaagcaccgccatggacaagtgggggtttggcgccaccctcctggagatctgctttgacggagaggcccctctgcagagccgcagtccctccgagaaggagcatttctaccagaggcagcaccggctgcccgagccctcctgcccacagctggccacactcaccagccagtgtctgacctatgagccaacccagaggccatcattccgcaccatcctgcgtgacctcacccggctgcagccccacaatcttgctgacgtcttgactgtgaacccggactcaccggcgtcggaccctacggttttccacaagcgctatttgaaaaagatccgagatctgggcgagggtcacttcggcaaggtcagcttgtactgctacgatccgaccaacgacggcactggcgagatggtggcggtgaaagccctcaaggcagactgcggcccccagcaccgctcgggctggaagcaggagattgacattctgcgcacgctctaccacgagcacatcatcaagtacaagggctgctgcgaggaccaaggcgagaagtcgctgcagctggtcatggagtacgtgcccctgggcagcctccgagactacctgccccggcacagcatcgggctggcccagctgctgctcttcgcccagcagatctgcgagggcatggcctatctgcacgcgcagcactacatccaccgagacctagccgcgcgcaacgtgctgctggacaacgacaggctggtcaagatcggggactttggcctagccaaggccgtgcccgaaggccacgagtactaccgcgtgcgcgaggatggggacagccccgtgttctggtatgccccagagtgcctgaaggagtataagttctactatgcgtcagatgtctggtccttcggggtgaccctgtatgagctgctgacgcactgtgactccagccagagcccccccacgaaattccttgagctcataggcattgctcagggtcagatgacagttctgagactcactgagttgctggaacgaggggagaggctgccacggcccgacaaatgtccctgtgaggtctatcatctcatgaagaactgctgggagacagaggcgtcctttcgcccaaccttcgagaacctcatacccattctgaagacagtccatgagaagtaccaaggccaggccccttcagtgttcagcgtgtgctgaggcacaatggcagccctgcctgggaggactggaccaggcagtggctgcagagggagcctcctgctccctgctccaggatgaaaccaagagggggatgtcagcctcacccacaccgtgtgccttactcctgtctagagaccccacctctgtgaacttatttttctttcttggccgtgagcctaaccatgatcttgagggacccaacatttgtaggggcactaatccagcccttaaatcccccagcttccaaacttgaggcccaccatctccaccatctggtaataaactcatgttttctctg

SEQ ID NO: 320859 - protein, 934 aa, Artificial Sequence
  derived and/or modified sequence
MVMVKYLATLERLAPRFGTERVPVCHLRLLAQAEGEPCYIRDSGVAPTDPGPESAAGPPTHEVLVTGTGGIQWWPVEEEVNKEEGSSGSSGRNPQASLFGKKAKAHKAVGQPADRPREPLWAYFCDFRDITHVVLKEHCVSIHRQDNKCLELSLPSRAAALSFVSLVDGYFRLTADSSHYLCHEVAPPRLVMSIRDGIHGPLLEPFVQAKLRPEDGLYLIHWSTSHPYRLILTVAQRSQAPDGMQSLRLRKFPIEQQDGAFVLEGWGRSFPSVRELGAALQGCLLRAGDDCFSLRRCCLPQPGETSNLIIMRGARASPRTLNLSQLSFHRVDQKEITQLSHLGQGTRTNVYEGRLRVEGSGDPEEGKMDDEDPLVPGRDRGQELRVVLKVLDPSHHDIALAFYETASLMSQVSHTHLAFVHGVCVRGPENIMVTEYVEHGPLDVWLRRERGHVPMAWKMVVAQQLASALSYLENKNLVHGNVCGRNILLARLGLAEGTSPFIKLSDPGVGLGALSREERVERIPWLAPECLPGGANSLSTAMDKWGFGATLLEICFDGEAPLQSRSPSEKEHFYQRQHRLPEPSCPQLATLTSQCLTYEPTQRPSFRTILRDLTRLQPHNLADVLTVNPDSPASDPTVFHKRYLKKIRDLGEGHFGKVSLYCYDPTNDGTGEMVAVKALKADCGPQHRSGWKQEIDILRTLYHEHIIKYKGCCEDQGEKSLQLVMEYVPLGSLRDYLPRHSIGLAQLLLFAQQICEGMAYLHAQHYIHRDLAARNVLLDNDRLVKIGDFGLAKAVPEGHEYYRVREDGDSPVFWYAPECLKEYKFYYASDVWSFGVTLYELLTHCDSSQSPPTKFLELIGIAQGQMTVLRLTELLERGERLPRPDKCPCEVYHLMKNCWETEASFRPTFENLIPILKTVHEKYQGQAPSVFSVC

SEQ ID NO: 320860 - DNA, 2805 bp, Artificial Sequence
  derived and/or modified sequence
atggtgatggtgaagtacctggccaccctggagagactggcccccagattcggcaccgagagagtgcccgtgtgccacctgagactgctggcccaggccgagggcgagccctgctacatcagagacagcggcgtggcccccaccgaccccggccccgagagcgccgccggcccccccacccacgaggtgctggtgaccggcaccggcggcatccagtggtggcccgtggaggaggaggtgaacaaggaggagggcagcagcggcagcagcggcagaaacccccaggccagcctgttcggcaagaaggccaaggcccacaaggccgtgggccagcccgccgacagacccagagagcccctgtgggcctacttctgcgacttcagagacatcacccacgtggtgctgaaggagcactgcgtgagcatccacagacaggacaacaagtgcctggagctgagcctgcccagcagagccgccgccctgagcttcgtgagcctggtggacggctacttcagactgaccgccgacagcagccactacctgtgccacgaggtggccccccccagactggtgatgagcatcagagacggcatccacggccccctgctggagcccttcgtgcaggccaagctgagacccgaggacggcctgtacctgatccactggagcaccagccacccctacagactgatcctgaccgtggcccagagaagccaggcccccgacggcatgcagagcctgagactgagaaagttccccatcgagcagcaggacggcgccttcgtgctggagggctggggcagaagcttccccagcgtgagagagctgggcgccgccctgcagggctgcctgctgagagccggcgacgactgcttcagcctgagaagatgctgcctgccccagcccggcgagaccagcaacctgatcatcatgagaggcgccagagccagccccagaaccctgaacctgagccagctgagcttccacagagtggaccagaaggagatcacccagctgagccacctgggccagggcaccagaaccaacgtgtacgagggcagactgagagtggagggcagcggcgaccccgaggagggcaagatggacgacgaggaccccctggtgcccggcagagacagaggccaggagctgagagtggtgctgaaggtgctggaccccagccaccacgacatcgccctggccttctacgagaccgccagcctgatgagccaggtgagccacacccacctggccttcgtgcacggcgtgtgcgtgagaggccccgagaacatcatggtgaccgagtacgtggagcacggccccctggacgtgtggctgagaagagagagaggccacgtgcccatggcctggaagatggtggtggcccagcagctggccagcgccctgagctacctggagaacaagaacctggtgcacggcaacgtgtgcggcagaaacatcctgctggccagactgggcctggccgagggcaccagccccttcatcaagctgagcgaccccggcgtgggcctgggcgccctgagcagagaggagagagtggagagaatcccctggctggcccccgagtgcctgcccggcggcgccaacagcctgagcaccgccatggacaagtggggcttcggcgccaccctgctggagatctgcttcgacggcgaggcccccctgcagagcagaagccccagcgagaaggagcacttctaccagagacagcacagactgcccgagcccagctgcccccagctggccaccctgaccagccagtgcctgacctacgagcccacccagagacccagcttcagaaccatcctgagagacctgaccagactgcagccccacaacctggccgacgtgctgaccgtgaaccccgacagccccgccagcgaccccaccgtgttccacaagagatacctgaagaagatcagagacctgggcgagggccacttcggcaaggtgagcctgtactgctacgaccccaccaacgacggcaccggcgagatggtggccgtgaaggccctgaaggccgactgcggcccccagcacagaagcggctggaagcaggagatcgacatcctgagaaccctgtaccacgagcacatcatcaagtacaagggctgctgcgaggaccagggcgagaagagcctgcagctggtgatggagtacgtgcccctgggcagcctgagagactacctgcccagacacagcatcggcctggcccagctgctgctgttcgcccagcagatctgcgagggcatggcctacctgcacgcccagcactacatccacagagacctggccgccagaaacgtgctgctggacaacgacagactggtgaagatcggcgacttcggcctggccaaggccgtgcccgagggccacgagtactacagagtgagagaggacggcgacagccccgtgttctggtacgcccccgagtgcctgaaggagtacaagttctactacgccagcgacgtgtggagcttcggcgtgaccctgtacgagctgctgacccactgcgacagcagccagagcccccccaccaagttcctggagctgatcggcatcgcccagggccagatgaccgtgctgagactgaccgagctgctggagagaggcgagagactgcccagacccgacaagtgcccctgcgaggtgtaccacctgatgaagaactgctgggagaccgaggccagcttcagacccaccttcgagaacctgatccccatcctgaagaccgtgcacgagaagtaccagggccaggcccccagcgtgttcagcgtgtgctag

SEQ ID NO: 320861 - DNA, 2805 bp, Artificial Sequence
  derived and/or modified sequence
atggttatggtgaaatacctcgccacccttgagcgactcgccccaagatttggcaccgagcgagtgcctgtctgccacctccggctgctcgcccaggcagagggcgagccctgctatatacgagattctggcgtggccccaaccgaccccggcccagaaagcgcagctggtccgcccactcatgaagtgctggtaacgggcacaggcgggatacaatggtggcccgtcgaagaggaagtaaacaaggaggagggctcttccggctcatccggtaggaacccccaggcctcccttttcgggaagaaagcgaaggcacataaggcggtgggccagcctgcagaccggcctagagagcccctttgggcttatttttgcgattttcgggatattacccacgttgtattaaaggagcactgtgtttctatccatcgccaagataacaagtgcttagagctcagtctaccatctcgggctgctgcgctttcatttgtgtccctggtggatggctacttcagattgaccgcagacagtagtcattatctctgccatgaagtggctccaccaaggctggtcatgtctatccgggacggaattcatggtcctttactagagccattcgtgcaagctaagcttagacccgaggatggcctgtacctgattcattggtcaacctcacatccctatagattgattcttaccgtggcccaacggtcccaggccccagatggcatgcaatcactccgcctccgtaaattccccattgagcagcaagatggcgccttcgtgctagaggggtggggaagaagcttcccctctgtaagagagttaggagccgcactccaaggatgtcttcttagagccggcgatgattgcttcagcttgcgacgttgctgcctgccccaacccggagagacgagtaaccttataatcatgcgaggagcgcgagccagccctagaacgttaaacctgagccagctgagctttcaccgcgtagatcagaaggagatcacacagctgtcccacctcggtcagggaaccaggacaaatgtgtatgaaggacggcttcgtgtggaggggtcgggcgatccggaagagggaaaaatggatgacgaagaccccctcgtaccaggcagagatcgcgggcaggagctgagggtggtccttaaagtactggatccaagccatcacgatatcgccctggctttctatgaaacagctagcttaatgagccaggtgagtcatacccacctggcattcgtccacggcgtgtgcgtcagagggcctgaaaatatcatggtgaccgagtacgtggagcacggacccttggacgtgtggctgcgcagggagaggggccacgtccctatggcctggaagatggtcgtggcccagcagctggcctcggccctctcataccttgaaaacaaaaacctggtgcatggaaacgtgtgtggtaggaatattttgctagccagattaggcctcgccgaaggaacatccccgtttattaaactgtccgatcccggtgtgggactgggggctcttagtcgtgaggagcgagttgagcgcataccctggttagcaccagagtgcctccctggtggcgcaaactccctatcaacggcaatggataagtggggctttggggctaccctcctggaaatctgttttgacggagaggctcccttgcagtcccgatccccctcagaaaaggagcacttttatcagaggcaacacaggctgcctgagccgagctgcccgcagctcgcgaccctcaccagccagtgtctgacttatgaacctactcagagaccaagctttagaacaatactaagggacctaaccagactccagcctcacaatcttgctgacgtgcttaccgtcaatcccgattcacctgcgtcggaccctaccgtgttccacaagagatacttgaaaaaaatccgcgatctgggtgagggccactttggcaaagtttccctgtattgttatgacccaaccaacgacggaaccggcgaaatggttgctgttaaagctctcaaggcagactgcggcccccagcatcgatcgggttggaaacaggagatcgacatactacggaccctgtatcacgaacacataatcaagtacaaaggttgctgcgaagaccagggggaaaaatcactccagctggttatggaatatgtcccgcttggatcccttcgggactacctccccagacatagcattggtctggctcagctcctgctcttcgctcagcagatctgtgaaggtatggcatatctgcatgcccagcactacatacaccgtgatttagctgccaggaacgtactgctcgataacgaccggctcgtgaagattggggactttggactagctaaggccgtgccggaggggcacgagtactaccgggtacgcgaagatggggactctcccgtgttttggtacgcgcctgagtgcctgaaggagtacaaattttattacgcttccgacgtctggtcattcggcgtaacactctacgaactgctcactcattgtgacagttcccaatcccctcctacaaagttcctcgagctcatcggcatagcccaagggcaaatgaccgtcttaagacttactgagcttctcgaaagaggagagcggctgccccgacctgacaagtgcccctgcgaggtgtatcacctgatgaagaactgctgggaaacagaggcaagctttcgccctaccttcgaaaacctgattcctatcctcaaaacagtacacgaaaagtaccagggacaggccccgtccgttttttctgtgtgttag

SEQ ID NO: 320862 - DNA, 2805 bp, Artificial Sequence
  derived and/or modified sequence
atggtgatggtgaagtacctggccaccctggagcggctggcccccaggtttggaacagagcgggtgcctgtgtgccacctgcggctgctggcccaggccgagggggagccctgctacatccgggacagcggcgtggcccccacagaccccggccctgagagcgctgctggcccccccacccatgaggtgctggtgacaggcaccggcggcatccagtggtggcctgtggaggaggaggtgaacaaggaggagggcagcagcggcagcagcggcaggaacccccaggccagcctgtttgggaagaaggccaaggcccacaaggctgtgggccagcctgctgaccggccccgggagcccctgtgggcctacttctgtgacttccgggacatcacccacgtggtgctgaaggagcactgtgtgtccatccaccggcaggacaacaagtgcctggagctgagcctgcccagcagagctgctgccctgagctttgtgtccctggtggatggctacttccggctgacagctgacagcagccactacctgtgccacgaggtggccccaccccggctggtgatgagcatcagagatggcatccacggccccctgctggagccctttgtgcaggccaagctgcggccagaagatggcctgtacctgatccactggagcaccagccacccctaccgcctcatcctgactgtggcccagaggagccaggccccagatggcatgcagagcctgcggctgaggaagttccccatcgagcagcaggatggagcctttgtgctggagggctggggccgctccttccccagcgtgcgggagctgggcgccgccctgcagggctgcctgctgcgggctggagatgactgcttcagcctgcggcgctgctgcctgccccagcccggggagaccagcaacctgatcatcatgagaggagcccgggccagccccaggaccctgaacctgagccagctgtccttccaccgggtggaccagaaggagatcacccagctgagccacctgggccagggcaccaggaccaacgtgtatgagggccgcctgcgggtggagggcagcggggaccctgaggagggcaagatggatgatgaggaccccctggtgcccggccgggaccggggccaggagctgcgggtggtgctgaaggtgctggaccccagccaccacgacatcgccctggccttctatgaaacagccagcctgatgagccaggtgagccacacccacctggcctttgtgcatggagtgtgtgtgcggggccctgagaacatcatggtgacagaatatgtggagcacggccccctggatgtgtggctgcggcgggagcggggccacgtgcccatggcctggaagatggtggtggcccagcagctggccagcgccctgagctacctggagaacaagaacctggtgcatggaaatgtgtgtggcaggaacatcctgctggcccggctgggcctggccgagggcaccagccccttcatcaagctgagtgaccccggggtgggcctgggcgccctgagccgggaggagcgggtggagcgcatcccctggctggccccagaatgtctgcccggcggggccaacagcctgagcacagccatggacaagtggggctttggagccaccctgctggagatctgctttgatggagaggcccccctgcagagccgcagccccagcgagaaggagcacttctaccagaggcagcaccggctgcctgagcccagctgcccccagctggccaccctgaccagccagtgcctgacctatgagcccacccagaggcccagcttccgcaccatcctgcgggacctgacccggctgcagccccacaacctggctgatgtgctgactgtgaacccagacagccctgccagtgaccccaccgtcttccacaagcgctacctgaagaagatccgggacctgggggagggccactttgggaaggtgtccctgtactgctatgaccccaccaatgatggcaccggggagatggtggccgtgaaggccctgaaggctgactgtggcccccagcacaggagcggctggaagcaggagattgacatcctgcggaccctgtaccacgagcacatcatcaagtacaagggctgctgtgaggaccagggcgagaagagcctgcagctggtgatggagtatgtgcccctgggcagcctgcgggactacctgcccaggcacagcatcggcctggcccagctgctgctgtttgcccagcagatctgtgagggcatggcctacctgcacgcccagcactacatccaccgggacctggccgccagaaatgtgctgctggacaatgaccggctggtgaagatcggggactttggcctggccaaggctgtgcctgagggccacgagtactacagagtgcgggaggatggagacagccctgtgttctggtacgcccctgagtgcctgaaggagtacaagttctactatgccagtgatgtgtggagctttggagtgaccctgtatgagctgctgacccactgtgacagcagccagagcccccccaccaagttcctggagctgattggaattgcccagggccagatgacagtgctgcggctgacagagctgctggagcggggggagcggctgcccaggccagacaagtgcccctgtgaggtgtaccacctgatgaagaactgctgggagacagaggccagcttccggcccacctttgagaacctgatccccatcctgaagacagtgcatgagaagtaccagggccaggcccccagcgtcttctctgtgtgctag

SEQ ID NO: 320863 - DNA, 2805 bp, Artificial Sequence
  derived and/or modified sequence
atggtgatggtgaagtacctggccaccctggagcggctggccccccgatttgggactgagcgcgttccggtgtgccatctcagactgctcgctcaggcagaaggagagccctgttacatcagggattctggcgttgcccctactgatcccggccctgagtcggctgcgggtccgcccacgcacgaggttctggtgacaggcaccggagggatccaatggtggcctgtggaggaggaagtgaacaaagaagagggcagctctggctctagcggtcggaacccccaggcaagcctgtttggtaagaaagccaaagctcacaaagctgtgggacagcctgcggaccgcccaagggaacccctctgggcctatttttgcgacttcagggatatcacccatgtggtgcttaaagaacattgtgtctcaattcatcgccaggacaataaatgtttggagctgagcttgcccagtcgcgccgctgcactgagctttgtgagcctggtggacggttactttcgcctgaccgccgatagcagccactatttgtgtcacgaagtggccccacccaggctggttatgtcaatcagagatggaattcatgggccgctactggagccattcgtgcaggctaaattgcggccagaggacgggctgtacctgattcattggtctacttctcacccataccgcctgattctgaccgtggcacagcgctctcaagcccctgatggcatgcagtcactgcgactcagaaaattcccgattgaacaacaggacggggccttcgttctagagggctgggggcgctcttttccctctgtgagagaactgggagcagccctgcagggttgtctgctgagggcaggtgatgattgcttttccctgcgtcgctgctgcctgccccagcccggagagacttcaaaccttattattatgcgcggggcccgggcgtcaccaaggaccctcaatttatcccaactttcatttcacagggtggaccagaaagaaataactcagttgagccacctggggcagggcactagaacgaacgtgtacgagggcaggctgcgcgtggaaggcagtggtgaccctgaggagggcaaaatggacgacgaagaccctcttgtccctgggagggatcgtgggcaggaacttcgcgtcgtactgaaggttcttgatccaagtcatcacgacatcgctcttgctttttacgagaccgcctctctgatgtcccaagtgtcacacacccatctggccttcgtgcatggagtttgtgttagggggccagagaacattatggtcaccgagtacgtggaacatgggccccttgatgtgtggctgcggagggagcgaggccacgtgccaatggcatggaaaatggtggtggcacaacaacttgcatcagctctatcatatctggaaaacaaaaacctggtgcatgggaatgtctgtgggcgcaatatcctgctcgcccgcctagggcttgccgaagggacttcacctttcattaagctgtcggaccctggagttggcctgggggctctgtcccgggaggagcgagttgaacgtattccttggctcgcccctgagtgtttgcctggcggagcaaatagcctcagtacagccatggataaatgggggttcggagccaccctactcgagatatgctttgatggagaggcccccctgcagagtcgctcaccctcagagaaagagcatttctaccaacggcagcatcgactacccgagccttcttgcccgcagctggcgaccttgacatcccagtgcctcacgtacgagccgacccaacggccaagctttaggaccatcttgcgggacctcaccagattgcagccacacaacctggccgatgtactgaccgtcaacccggattccccagcctctgacccaaccgtgttccacaaacggtacttgaaaaagatccgagacttgggggagggacattttgggaaggtgagcttgtactgctacgatcctacgaatgacggcaccggggaaatggttgccgtcaaggccctgaaggctgattgtggaccgcagcacagatccggctggaagcaggaaatcgatattcttaggaccctgtaccacgaacatataatcaaatacaaaggctgctgcgaagatcagggtgaaaagtccttgcagttagtcatggaatatgtccctctaggctctctccgcgactaccttccaagacactctattggcctggcccaattgctcttatttgcccagcaaatctgcgagggaatggcatacctgcacgcccagcactatatccatcgcgacttggccgcccggaatgtgttgctggacaacgatcggcttgttaaaataggcgacttcggtcttgcgaaagccgttcccgaaggccacgagtattaccgggtgcgggaagatggcgactcaccagtgttctggtacgctcccgagtgcctgaaggagtataaattctactacgcgtcagatgtctggagctttggtgtgaccctgtacgagcttttaacccattgcgacagtagtcagtccccccctaccaagttcctagaactcatcgggattgcccagggacagatgaccgtcctccggttgaccgagctcctcgaacggggcgaacgacttcctagacccgataagtgcccctgtgaagtgtaccaccttatgaagaactgctgggagaccgaggcttcttttcggccaaccttcgaaaacctgatcccgatacttaagactgtgcacgaaaaataccagggtcaggccccatccgtgttcagtgtgtgctag

SEQ ID NO: 320864 - DNA, 2805 bp, Artificial Sequence
  derived and/or modified sequence
atggtgatggttaagtacttggccacgctcgagcgacttgccccacggtttggcacggaacgcgtccccgtctgtcatcttaggctcctggcacaggccgaaggtgaaccctgttacataagagacagtggcgtcgctccaacggatcccggaccggaaagtgccgcaggaccgcctacgcacgaagtcctggtgactggtaccgggggaattcagtggtggcctgtcgaggaagaagtaaacaaagaggaggggtctagcggtagctcaggacggaatccccaggccagtctgtttggtaagaaggccaaagctcataaagcagtgggccaacccgctgaccgcccacgcgagcctctctgggcctatttctgcgacttccgcgatattacacatgtggtgctaaaagaacattgcgtatccatccacaggcaggataacaagtgcctggagctttccttaccatcacgcgcagccgcactgagctttgttagcctggtggatggttacttcaggcttaccgcggattcgtcacattacctgtgccacgaggttgcaccccctcgactcgtaatgtcaatccgagatggcatccacggtccactccttgaaccttttgttcaagccaaactgcggccagaagatggcttgtacctcatccattggtctacatctcacccctacaggctcatactgaccgtggcgcagaggtcacaggcacctgacggaatgcagtccctaagattgaggaaattccccattgaacagcaagatggggcttttgttctggagggctgggggagaagctttccctcagtgagagagcttggtgccgcattacagggatgtttgctgcgggcaggggatgattgcttctctcttagacgctgttgcctgccacagccgggagagacctctaacctgatcatcatgcgcggagctagggccagtccccgtacactgaatctgtctcaactgtcctttcatcgagtggatcaaaaagaaatcacccagctatcccacttgggacagggtacacggactaatgtgtacgagggtcgtctccgagtcgagggaagtggagacccggaagaaggcaagatggacgacgaagacccgctcgtcccgggtagagacagagggcaagaattgagggtggtactgaaggtgcttgaccccagccaccatgatatcgcccttgcgttctatgaaacagcgtccctgatgtcacaggtatcacacacgcacctggcctttgtgcacggggtgtgcgtgagggggccagagaacatcatggttaccgagtacgtcgagcacggacctctagatgtgtggctgcgaagggagaggggacatgtgccaatggcttggaagatggtggtggcgcagcagctggcatccgctctgtcatacttggaaaataagaacctggtgcacgggaatgtctgtggcaggaatatcttactggcccgattagggcttgccgaaggtactagcccattcattaaactctctgatccaggggtgggcctcggagcactgagccgggaggaacgcgtagaacgtattccttggctggccccagagtgcctccccggaggcgcaaactctctgtctactgcaatggataaatggggcttcggagccacactgttggaaatctgttttgatggtgaagcacctctacaaagcagatctcctagcgaaaaggaacacttttatcagagacagcatagactcccagagccatcttgtccgcagcttgccactctgacaagtcagtgtctaacatacgagccgactcagcgcccaagctttcggactattctgcgggacctaacgaggctccagccacacaatctggccgacgtgctgacagtaaaccctgattcacctgcatccgacccaacagtctttcataaaagatatctgaaaaagatcagagatctcggcgaaggacacttcgggaaggtgagtctttactgctacgatccaaccaatgatggaaccggcgagatggtggcagtgaaagcattaaaggccgactgcggcccacagcatcgcagcggttggaagcaggagatcgacatcctgcgcacgctgtaccatgagcacatcattaaatacaaaggctgttgcgaagaccagggcgagaagtcactccagcttgtgatggaatatgtgcccctggggtctctgagagactacctacccagacacagtatcggactggcacagctgctgctattcgcgcagcagatctgcgagggcatggcttacctacacgcacagcactacattcaccgtgacctagcggctaggaacgtattactggacaatgaccggctcgtgaagataggtgacttcgggcttgcgaaagctgtgcccgaggggcacgaatactaccgcgtcagggaagacggcgacagccctgtgttttggtatgcgccagaatgtcttaaggagtacaagttttattatgccagtgacgtctggtcttttggagtaactctctatgaactgctgacacactgcgatagctctcagagccccccaacgaagtttctggaattgataggaatagctcagggtcagatgacagttctgcgactgaccgagctgcttgaaagaggagaacggcttcctaggcccgacaagtgtccctgtgaggtgtaccacctgatgaaaaactgctgggagactgaagcgtccttcaggcctaccttcgaaaacctgatccctatcctcaagaccgtgcacgagaaatatcaaggacaggccccatctgtgtttagcgtgtgttag

SEQ ID NO: 320865 - DNA, 3312 bp, Artificial Sequence
  derived and/or modified sequence
gccaatgggaggaggcgtctcggcgggggacaagcagtagctacccgcgggagcggggaggggtccgggttcgagcttgtgttcccccggaagggtgactccttccgccggcatatccggcagcacagcgccctgacccggctgcgccttcggaacgtcttccgcaggttcctgcgggacttccagccgggccgactctcccagcagatggtcatggtcaaatacctagccacactcgagcggctggcaccccgcttcggcacagagcgtgtgcccgtgtgccacctgaggctgctggcccaggccgagggggagccctgctacatccgggacagtggggtggcccctacagaccctggccctgagtctgctgctgggcccccaacccacgaggtgctggtgacaggcactggtggcatccagtggtggccagtagaggaggaggtgaacaaggaggagggttctagtggcagcagtggcaggaacccccaagccagcctgtttgggaagaaggccaaggctcacaaggcagtcggccagccggcagacaggccgcgggagccactgtgggcctacttctgtgacttccgggacatcacccacgtggtgctgaaagagcactgtgtcagcatccaccggcaggacaacaagtgcctggagctgagcttgccttcccgggctgcggcgctgtccttcgtgtcgctggtggacggctatttccgcctgacggccgactccagccactacctgtgccacgaggtggctcccccacggctggtgatgagcatccgggatgggatccacggacccctgctggagccatttgtgcaggccaagctgcggcccgaggacggcctgtacctcattcactggagcaccagccacccctaccgcctgatcctcacagtggcccagcgtagccaggcaccagacggcatgcagagcttgcggctccgaaagttccccattgagcagcaggacggggccttcgtgctggagggctggggccggtccttccccagcgttcgggaacttggggctgccttgcagggctgcttgctgagggccggggatgactgcttctctctgcgtcgctgttgcctgccccaaccaggagaaacctccaatctcatcatcatgcggggggctcgggccagccccaggacactcaacctcagccagctcagcttccaccgggttgaccagaaggagatcacccagctgtcccacttgggccagggcacaaggaccaacgtgtatgagggccgcctgcgagtggagggcagcggggaccctgaggagggcaagatggatgacgaggaccccctcgtgcctggcagggaccgtgggcaggagctacgagtggtgctcaaagtgctggaccctagtcaccatgacatcgccctggccttctacgagacagccagcctcatgagccaggtctcccacacgcacctggccttcgtgcatggcgtctgtgtgcgcggccctgaaaatatcatggtgacagagtacgtggagcacggacccctggatgtgtggctgcggagggagcggggccatgtgcccatggcttggaagatggtggtggcccagcagctggccagcgccctcagctacctggagaacaagaacctggttcatggtaatgtgtgtggccggaacatcctgctggcccggctggggttggcagagggcaccagccccttcatcaagctgagtgatcctggcgtgggcctgggcgccctctccagggaggagcgggtggagaggatcccctggctggcccccgaatgcctaccaggtggggccaacagcctaagcaccgccatggacaagtgggggtttggcgccaccctcctggagatctgctttgacggagaggcccctctgcagagccgcagtccctccgagaaggagcatttctaccagaggcagcaccggctgcccgagccctcctgcccacagctggccacactcaccagccagtgtctgacctatgagccaacccagaggccatcattccgcaccatcctgcgtgacctcacccggctgcagccccacaatcttgctgacgtcttgactgtgaacccggactcaccggcgtcggaccctacggttttccacaagcgctatttgaaaaagatccgagatctgggcgagggtcacttcggcaaggtcagcttgtactgctacgatccgaccaacgacggcactggcgagatggtggcggtgaaagccctcaaggcagactgcggcccccagcaccgctcgggctggaagcaggagattgacattctgcgcacgctctaccacgagcacatcatcaagtacaagggctgctgcgaggaccaaggcgagaagtcgctgcagctggtcatggagtacgtgcccctgggcagcctccgagactacctgccccggcacagcatcgggctggcccagctgctgctcttcgcccagcagatctgcgagggcatggcctatctgcacgcgcagcactacatccaccgagacctagccgcgcgcaacgtgctgctggacaacgacaggctggtcaagatcggggactttggcctagccaaggccgtgcccgaaggccacgagtactaccgcgtgcgcgaggatggggacagccccgtgttctggtatgccccagagtgcctgaaggagtataagttctactatgcgtcagatgtctggtccttcggggtgaccctgtatgagctgctgacgcactgtgactccagccagagcccccccacgaaattccttgagctcataggcattgctcagggtcagatgacagttctgagactcactgagttgctggaacgaggggagaggctgccacggcccgacaaatgtccctgtgaggtctatcatctcatgaagaactgctgggagacagaggcgtcctttcgcccaaccttcgagaacctcatacccattctgaagacagtccatgagaagtaccaaggccaggccccttcagtgttcagcgtgtgctgaggcacaatggcagccctgcctgggaggactggaccaggcagtggctgcagagggagcctcctgctccctgctccaggatgaaaccaagagggggatgtcagcctcacccacaccgtgtgccttactcctgtctagagaccccacctctgtgaacttatttttctttcttggccgtgagcctaaccatgatcttgagggacccaacatttgtaggggcactaatccagcccttaaatcccccagcttccaaacttgaggcccaccatctccaccatctggtaataaactcatgttttctct

SEQ ID NO: 320866 - protein, 118 aa, Artificial Sequence
  derived and/or modified sequence
MPLRHWGMARGSKPVGDGAQPMAAMGGLKVLLHWAGPGGGEPWVTFSESSLTAEEVCIHIAHKVGITPPCFNLFALFDAQAQVWLPPNHILEIPRDASLMLYFRIRFYFRNWHGMNPR

SEQ ID NO: 320867 - DNA, 357 bp, Artificial Sequence
  derived and/or modified sequence
atgcccctgagacactggggcatggccagaggcagcaagcccgtgggcgacggcgcccagcccatggccgccatgggcggcctgaaggtgctgctgcactgggccggccccggcggcggcgagccctgggtgaccttcagcgagagcagcctgaccgccgaggaggtgtgcatccacatcgcccacaaggtgggcatcacccccccctgcttcaacctgttcgccctgttcgacgcccaggcccaggtgtggctgccccccaaccacatcctggagatccccagagacgccagcctgatgctgtacttcagaatcagattctacttcagaaactggcacggcatgaaccccagatag

SEQ ID NO: 320868 - DNA, 357 bp, Artificial Sequence
  derived and/or modified sequence
atgccccttagacactggggcatggcgagaggcagtaagccagtcggtgatggcgcgcaacccatggccgctatgggcggacttaaagtgttgctgcactgggctggccccgggggaggcgaaccctgggttacattcagcgagtccagcctaaccgcagaggaggtgtgcattcatattgctcacaaggtggggattacaccgccctgcttcaatttgtttgccttatttgacgcccaggcacaggtgtggctgccccctaaccacattctggaaattcctcgcgatgccagcctgatgctgtactttcggatacggttctacttcaggaactggcacggaatgaatccgaggtag

SEQ ID NO: 320869 - DNA, 357 bp, Artificial Sequence
  derived and/or modified sequence
atgcccctgcggcactggggcatggcccggggcagcaagcctgtgggagatggagcccagcccatggccgccatgggcggcctgaaggtgctgctgcactgggccggccctgggggcggggagccctgggtgaccttcagcgagagcagcctgacagctgaggaggtgtgcatccacatcgcccacaaggtgggcatcaccccaccctgcttcaacctgtttgccctgtttgatgcccaggcccaggtgtggctgccccccaaccacatcctggagatccccagagatgccagcctgatgctgtacttccgcatccgcttctacttcaggaactggcacggcatgaaccccaggtag

SEQ ID NO: 320870 - DNA, 357 bp, Artificial Sequence
  derived and/or modified sequence
atgcccctgcggcactggggcatggcccggggcagcaagcccgtgggggatggcgcccaacctatggccgccatgggtggcctgaaggttctgttacattgggccgggcccgggggcggagaaccttgggttacattttccgaatcatctctgaccgcagaggaggtgtgcatacatattgctcacaaggtcggcatcacaccaccttgctttaacctgtttgcactgttcgatgcacaagcccaagtctggttaccccccaaccatattctagagataccccgggacgcatcactaatgctctattttcgcattaggttctatttccgcaactggcatggtatgaatcctcgttag

SEQ ID NO: 320871 - DNA, 357 bp, Artificial Sequence
  derived and/or modified sequence
atgcctctccggcactggggaatggctcggggtagcaagcccgtgggcgacggggctcagccaatggccgcaatgggtggtctgaaggtactgttgcattgggccggacccggtggaggagaaccctgggttaccttttccgagtctagtctgaccgcagaagaggtgtgtattcacatagcacataaggtgggtattacaccaccctgttttaacttgttcgctttgttcgacgcacaggcccaggtgtggttacccccaaatcatattctcgaaattccaagagatgcctccttgatgctatacttcaggattcggttttacttcagaaactggcacgggatgaacccaagatag

SEQ ID NO: 320872 - DNA, 644 bp, Artificial Sequence
  derived and/or modified sequence
aagcagtagctacccgcgggagcggggaggggtccgggttcgagcttgtgttcccccggaagggtgagtctggacgcgggcgcggaaggagcgcggccggaggtcctcaggaagaagccgcggggactggctgcgcttgacaggctgcacttggatgggagcacctggtgcctcgggactgctccgatgcccgatggggaaactgaggcccagaattgctaagtggcttgcttgagttgacacagggagctccaggactcaccctcagctgagccacctgccgggagcatgcctctgcgccactgggggatggccaggggcagtaagcccgttggggatggagcccagcccatggctgccatgggaggcctgaaggtgcttctgcactgggctggtccaggcggcggggagccctgggtcactttcagtgagtcatcgctgacagctgaggaagtctgcatccacattgcacataaagttggtatcactcctccttgcttcaatctctttgccctcttcgatgctcaggcccaagtctggttgcccccaaaccacatcctagagatccccagagatgcaagcctgatgctatatttccgcataaggttttatttccggaactggcatggcatgaatcctcggga

SEQ ID NO: 320873 - DNA, 1729 bp, Artificial Sequence
  derived and/or modified sequence
atcttttccggcgctggctccgcatggtcagtgccatttcgcctttatcgtggtggagtccaccctggctgtggacctattcaaactcagtctgtctcttgactggaggaggagaaggaaaagttgagcacattgccaaccggagttccccaagaatggcaagttaaaaccaaagtgtcagcacctcaacaacatttttttttggcttaacaaaacatcaaacggcatacaaatggcagaaatccacaatggaggggaactctgtgactttatggaaaatggagaaatcttcagtgaacactcatgccttaatgcacacatgggaactgaaaatacaggggacacttatgactgtgatgagtatggagaaaactttcccatgttacacaacagtgcccctgctggagagacactttctgtgttgaatcagtgcagaaaagccttcagcctgccaccaaatgttcaccagagaacgtggataggagacaaatcctttgaatacagtgactgtgaggaagcctttgttgatcagtcacatcttcaggcaaataggataactcacaatggagaaacactctatgaacagaagcaatgtgggagagcttttacttactccacaagccatgctgtgtctgttaaaatgcatactgtagaaaaaccctacgaatgtaaggaatgtggaaaattctttagatattcttcatatcttaatagtcacatgcgaacccatactggggagaaaccctatgaatgtaaggaatgtgggaaatgcttcactgtttcttcacacctagttgaacatgtaagaattcatactggagagaaaccttatcaatgtaaggaatgtggaagagccttcgctgggcgctcaggccttactaaacatgtacgaatacacactggagagaagccctatgaatgtaacgaatgtgggaaagcctacaataggttttatctactaactgaacattttaaaactcacacagaggagaagccctttgaatgtaaggtatgtggaaaatccttcagaagctcttcatgccttaagaatcactttagaattcacactggaataaaaccctataaatgtaaggagtgtgggaaagcattcactgtttcctcaagcttacataatcatgtaaaaatccatactggagagaagccctatgaatgtaaggactgtgggaaagcctttgctacatcttcacaactcattgaacatataagaactcacactggagagaaaccgtatatatgtaaggaatgtgggaaaaccttccgtgcttcttcacatctacagaaacatgttagaattcacactggagagaaaccctatatatgtaacgaatgtgggaaagcctacaatagattttatttacttactaaacatttaaaaacacactgaagaaaaactctgaatgtaaggaatgtggaaatcttttaggaatttctcataccataattaccacatttgaattcacactgaagagaaattttattggtacaaagaatgtgaggaggccttcagttatccccattcacttcgaagacatgaaagaactcatactctatgtgtcccctataaattttaggaatgttagggagccaatggaatctttttttattattttattttattttattttattttattttattttattttattttatttgagacagagttttgctgttgtcatcacacaggctggagtgcaatggcatgatcc

SEQ ID NO: 320874 - DNA, 2055 bp, Artificial Sequence
  derived and/or modified sequence
ggaggctgcggagccggcggccgcgggagctgaccctgcggggtcccggggggggagggggagccgcgaagcccccactgaggccgccgctgccgggcctcccctcccccccgggcgggcgccatgcgggggagcccgggcgacgcggagcggcggcagcgctggggtcgcctgttcgaggagctggacagtaacaaggatggccgcgtggacgtgcacgagttgcgccaggggctggccaggctgggcgggggcaacccagaccccggcgcccaacagggtatctcctctgagggtgatgctgacccagatggcgggctcgacctggaggaattttcccgctatctgcaggagcgggaacagcgtctgctgctcatgtttcacagtcttgaccggaaccaggatggtcacattgatgtctctgagatccaacagagtttccgagctctgggcatttccatctcgctggagcaggctgagaaaattttgcacagcatggaccgagacggcacaatgaccattgactggcaagaatggcgcgaccacttcctgttgcattcgctggaaaatgtggaggacgtgctgtatttctggaagcattccacgctctcttctgctgggttctctgcctggataaaagattctacggctgaacagaatcgttcaaaaaccacggtcttggccaggcgcagtggctcacacctaaaatcccagcactttgggaggccgaagtgggcggatcacgaggtcctggacattggcgagtgcctgacagtgccggacgagttctcaaagcaagagaagctgacgggcatgtggtggaaacagctggtggccggcgcagtggcaggtgccgtgtcacggacaggcacggcccctctggaccgcctcaaggtcttcatgcaggtccatgcctcaaagaccaaccggctgaacatccttggggggcttcgaagcatggtccttgagggaggcatccgctccctgtggcgcggcaatggtattaatgtactcaagattgcccccgagtcagctatcaagttcatggcctatgaacagatcaagagggccatcctggggcagcaggagacactgcatgtgcaggagcgcttcgtggctggctccctggctggtgccacagcccaaaccatcatttaccctatggaggtgctgaagacgcggctgaccttgcgccggacgggccagtataaggggctgctggactgcgccaggcgtatcctggagagggaggggccccgtgccttctaccgcggctacctccccaacgtgctgggcatcatcccctatgcgggcatcgacctggccgtctacgagactctgaagaactggtggcttcagcagtacagccacgactcggcagacccaggcatcctcgtgctcctggcctgcggtaccatatccagcacctgcggccagatagccagttacccgctggccctggtccggacccgcatgcaggcacaaggctggagtacagtggctcgatttcagatcactgcaacctctgccttccaggttcaagcgattctcctgcctcagcctccagagtagctggtattacaggatttcatcatgttgcccaggctcatctcgaactcgtggggtcaaggaattcgccagccttcagcctcccaacgtgctgggattacagccggtggtcatgccatgagcagccttatggagaggaccatgtggtaaggaactcagccaatagccatgtaactgagcttggaagaggatcttgctgtcctggccaacatctcactgcaattctatcagttgaattccctggatagtccaagctttgtggatccctccaccgaaacaactggatcccagtacctgaatcctgaatcttagactcttatacttcaaacactgatcacgggaacagccggctcagcggctcctgagttcctaatgctcagaatatgggtgagatgataaatgtttgttgtgttaagctgccaacctttggcgggggggtaattcgtcacatggcaacagctggctaatacatatatacctacatgt

SEQ ID NO: 320875 - protein, 482 aa, Artificial Sequence
  derived and/or modified sequence
MRGSPGDAERRQRWGRLFEELDSNKDGRVDVHELRQGLARLGGGNPDPGAQQGISSEGDADPDGGLDLEEFSRYLQEREQRLLLMFHSLDRNQDGHIDVSEIQQSFRALGISISLEQAEKILHSMDRDGTMTIDWQEWRDHFLLHSLENVEDVLYFWKHSTLSSAGFSAWIKDSTAEQNRSKTTVLARRSGSHLKSQHFGRPKWADHEVLDIGECLTVPDEFSKQEKLTGMWWKQLVAGAVAGAVSRTGTAPLDRLKVFMQVHASKTNRLNILGGLRSMVLEGGIRSLWRGNGINVLKIAPESAIKFMAYEQIKRAILGQQETLHVQERFVAGSLAGATAQTIIYPMEVLKTRLTLRRTGQYKGLLDCARRILEREGPRAFYRGYLPNVLGIIPYAGIDLAVYETLKNWWLQQYSHDSADPGILVLLACGTISSTCGQIASYPLALVRTRMQAQGWSTVARFQITATSAFQVQAILLPQPPE

SEQ ID NO: 320876 - DNA, 1449 bp, Artificial Sequence
  derived and/or modified sequence
atgagaggcagccccggcgacgccgagagaagacagagatggggcagactgttcgaggagctggacagcaacaaggacggcagagtggacgtgcacgagctgagacagggcctggccagactgggcggcggcaaccccgaccccggcgcccagcagggcatcagcagcgagggcgacgccgaccccgacggcggcctggacctggaggagttcagcagatacctgcaggagagagagcagagactgctgctgatgttccacagcctggacagaaaccaggacggccacatcgacgtgagcgagatccagcagagcttcagagccctgggcatcagcatcagcctggagcaggccgagaagatcctgcacagcatggacagagacggcaccatgaccatcgactggcaggagtggagagaccacttcctgctgcacagcctggagaacgtggaggacgtgctgtacttctggaagcacagcaccctgagcagcgccggcttcagcgcctggatcaaggacagcaccgccgagcagaacagaagcaagaccaccgtgctggccagaagaagcggcagccacctgaagagccagcacttcggcagacccaagtgggccgaccacgaggtgctggacatcggcgagtgcctgaccgtgcccgacgagttcagcaagcaggagaagctgaccggcatgtggtggaagcagctggtggccggcgccgtggccggcgccgtgagcagaaccggcaccgcccccctggacagactgaaggtgttcatgcaggtgcacgccagcaagaccaacagactgaacatcctgggcggcctgagaagcatggtgctggagggcggcatcagaagcctgtggagaggcaacggcatcaacgtgctgaagatcgcccccgagagcgccatcaagttcatggcctacgagcagatcaagagagccatcctgggccagcaggagaccctgcacgtgcaggagagattcgtggccggcagcctggccggcgccaccgcccagaccatcatctaccccatggaggtgctgaagaccagactgaccctgagaagaaccggccagtacaagggcctgctggactgcgccagaagaatcctggagagagagggccccagagccttctacagaggctacctgcccaacgtgctgggcatcatcccctacgccggcatcgacctggccgtgtacgagaccctgaagaactggtggctgcagcagtacagccacgacagcgccgaccccggcatcctggtgctgctggcctgcggcaccatcagcagcacctgcggccagatcgccagctaccccctggccctggtgagaaccagaatgcaggcccagggctggagcaccgtggccagattccagatcaccgccaccagcgccttccaggtgcaggccatcctgctgccccagccccccgagtag

SEQ ID NO: 320877 - DNA, 1449 bp, Artificial Sequence
  derived and/or modified sequence
atgcggggatccccgggagacgccgagaggcggcagaggtgggggaggctctttgaggaactggatagcaacaaagatggtagagtggacgtgcatgagctcaggcaaggcctggcgcgactcggaggcggaaaccccgatcccggagcgcaacaagggataagtagtgagggcgatgcagatccagacggcggtttagacctggaggaattctctagatatttacaggaacgagagcagaggcttctattgatgttccatagtctcgatagaaaccaggacgggcacattgatgttagcgagatccagcagtcctttcgggcccttggaatctctattagcctcgaacaggctgagaagatcctccactcaatggatcgagacgggaccatgacaattgactggcaggagtggagggatcactttctcctccactcccttgagaatgttgaagacgtgctctatttctggaagcacagcacactgagtagcgctggatttagtgcatggattaaggacagcactgccgaacagaaccggagcaagaccacggtacttgcccgccgatccggctcccatctcaaatctcagcactttggccgccccaagtgggcggatcacgaagtattggatattggcgaatgcttaacagtcccggatgagtttagtaaacaggaaaaactgaccggtatgtggtggaaacagctggtggccggtgccgtagcgggtgccgtttcccgcactggaaccgctccgctggaccggctcaaggtctttatgcaagtgcatgcttccaagactaaccgcctgaatatattaggcggactgcggtctatggtgctggagggaggcatccgctctttgtggcgaggcaatggtatcaatgttcttaagatcgcgcctgaaagtgccatcaaatttatggcctacgaacagatcaaacgcgctattctggggcagcaggagaccttacacgtccaggagagattcgttgctggaagcctggccggcgcaaccgcacagaccataatataccctatggaggttctcaaaactaggctcacattgcgtagaaccggccagtacaagggactgttagactgtgcccgaagaatattggaaagagaaggaccaagagccttttatagagggtatcttcctaacgttctcggtataattccttacgccgggatcgacctagcagtttatgaaactctcaaaaattggtggctgcagcagtattcccatgatagcgccgacccgggcatactcgtccttctggcatgcggcaccatctcatcgacctgtgggcaaatcgcttcatatcccttagccctggtgcgaacgcgcatgcaggcccaaggatggtcaaccgtcgccagatttcagatcactgccacaagcgctttccaggtgcaggcgattctcctgccacagcctcccgagtag

SEQ ID NO: 320878 - DNA, 1449 bp, Artificial Sequence
  derived and/or modified sequence
atgaggggcagccctggagatgctgagcggcggcagcgctggggccgcctgtttgaggagctggacagcaacaaggatggccgggtggatgtgcatgagctgcggcagggcctggcccggctgggcggcggcaacccagaccccggggcccagcagggcatcagcagtgaaggagatgctgaccctgatggcggcctggacctggaggagttcagccgctacctgcaggagcgggagcagaggctgctgctgatgttccacagcctggacaggaaccaggacggccacattgatgtgtctgagatccagcagagcttccgggccctgggcatcagcatcagcctggagcaggccgagaagatcctgcacagcatggacagagatggcaccatgaccatcgactggcaggagtggagggaccacttcctgctgcacagcctggagaatgtggaggatgtgctgtacttctggaagcacagcaccctgagcagcgctggcttcagcgcctggatcaaggacagcacagctgagcagaacagaagcaagaccaccgtgctggcccggcgcagcggcagccacctgaagagccagcacttcggccggcccaagtgggccgaccacgaggtgctggacatcggggagtgcctgactgtgcctgatgagttcagcaagcaggagaagctgaccggcatgtggtggaagcagctggtggccggggctgtggccggggctgtgtccaggactggaacagcccccctggaccggctgaaggtgttcatgcaggtgcacgccagcaagaccaaccggctgaacatcctgggcggcctgcgctccatggtgctggagggcggcatccgcagcctgtggagaggaaatggcatcaacgtgctgaagatcgcccctgagagcgccatcaagttcatggcctatgagcagatcaagagggccatcctgggccagcaggagaccctgcacgtgcaggagagatttgtggccggcagcctggccggggccacagcccagaccatcatctaccccatggaggtgctgaagacccggctgaccctgcggaggacaggccagtacaagggcctgctggactgtgcccggcgcatcctggagcgggagggcccccgggccttctaccggggctacctgcccaacgtgctgggcatcatcccctatgccggcatcgacctggccgtgtatgagaccctgaagaactggtggctgcagcagtacagccatgacagcgctgaccccggcatcctggtgctgctggcctgtggcaccatcagcagcacctgtggccagatcgccagctaccccctggccctggtgaggaccaggatgcaggcccagggctggagcacagtggcccgcttccagatcacagccaccagcgccttccaggtgcaggccatcctgctgccccagcccccagagtag

SEQ ID NO: 320879 - DNA, 1449 bp, Artificial Sequence
  derived and/or modified sequence
atgcggggcagccccggcgacgccgagcggcggcagcggtggggcagactgtttgaagaactggattcaaataaagatggtagggtagatgtccatgagctgaggcagggcctggccaggctggggggaggaaacccagatcccggtgcccagcagggaatttcatcagagggggacgctgacccggacggcggcctggatctggaagagttctctagatacctccaggagcgcgaacagagactgttgctgatgttccactccttggacaggaatcaggatggccatatcgatgtatcagagattcaacagagctttcgggcgctaggaatctcgatctcccttgaacaggccgagaaaatcctccatagcatggatagggatggcaccatgacaatagactggcaggaatggcgggatcacttcctcctccatagcctggagaatgtggaggatgtgctatacttctggaagcacagcactctttccagcgctggcttctctgcctggatcaaggatagcaccgcagaacagaatcgctccaaaacaaccgtacttgccaggagaagcggttcccacctcaagagtcagcatttcggaaggcctaagtgggccgatcacgaggtgctggatatcggggagtgtctcaccgttcccgatgagttcagcaaacaggaaaagctcacaggcatgtggtggaagcagttggtggccggagccgtggcgggagcggtcagcaggacgggtactgcacccctggatcgcctcaaagttttcatgcaagtgcacgcgagcaaaactaatcgacttaacatccttggaggactcagaagcatggtacttgagggcggcatccgttccctgtggcgcggcaatgggattaacgtgttgaaaatagcaccggagtcagctatcaagtttatggcttatgagcaaattaagagagccatactcggccaacaggaaaccctccatgtgcaggagcgatttgtggctgggagtttggcgggcgccacagctcagacaattatctaccccatggaagtgctgaaaacacgtcttacccttcggaggaccgggcagtataaaggcctgctggactgcgcccgacgtattctggagcgcgagggtcccagggctttctatcggggataccttcccaacgtcttaggcatcatcccctatgccggcatcgacctcgcagtgtatgagactctgaagaactggtggctgcagcagtacagtcacgacagtgcggatccgggcattttggttttgctggcatgcggcactattagcagcacctgtgggcagattgcgtcatatcccctcgccctggttcgtacacgaatgcaagcccagggttggagtaccgtagccaggttccaaatcaccgccacttccgccttccaagtacaggccattctgctccctcagcctcctgaatag

SEQ ID NO: 320880 - DNA, 1449 bp, Artificial Sequence
  derived and/or modified sequence
atgcggggaagtccaggagatgcagaaagacggcagaggtggggacgcctgtttgaagagctggatagcaacaaggatggtagagtggacgtgcacgaattgagacagggcttagcgagactgggaggcggtaacccagacccaggggcacagcagggtatctccagtgagggcgatgcagatcccgacgggggactggacctggaggagttttcaagatatctacaagagcgcgagcaaaggctacttctcatgttccattcactagatcgtaaccaggatggacacatagacgtgagcgagatccaacagtctttccgcgcattgggaatctccatttctctcgagcaggccgaaaaaatcctgcactctatggacagagacggtacaatgacaattgattggcaagagtggagggaccacttcctgctccattcactggagaatgtagaggatgttctatatttctggaagcacagtacactttcttccgctgggtttagtgcctggattaaagactcaacagcagagcagaacagatctaaaaccacggtgctggctagacgaagtggtagccatcttaagtcacagcacttcggtcgtcccaagtgggcagaccacgaggttctggatataggcgaatgcctgacagtgcctgatgagttcagtaagcaggagaagctaactggtatgtggtggaagcagctggtcgccggtgccgttgcaggggcagtgtctcgtaccggcaccgccccacttgaccgtctgaaggtctttatgcaggtgcacgcgtcaaaaaccaacagactgaacatcctgggtgggctgcggtctatggtcctcgaaggagggatacgctccctatggcgcggtaatggaattaacgtgctgaagatcgccccagagagcgcaatcaagtttatggcatacgaacagatcaaacgcgcaatcctgggacaacaagagaccttgcacgtacaggagcggtttgtggccggttctttggctggagcgaccgctcagactattatctaccctatggaggttctcaaaactaggctcactttgcggcgaacagggcagtacaagggactgctggactgtgccagacgcatactagagcgggagggcccaagagccttctatcgagggtacctgccaaacgtgctcggaattatcccatatgcaggaatagatctcgctgtgtacgagaccctaaagaactggtggctacaacagtatagccatgattcagcagatcctggaatcctcgtcttgctggcctgcgggacaatttcttctacctgcggccagatcgctagctaccctcttgccctggttcgcactcggatgcaggctcaaggctggagcactgtggcccgatttcagatcaccgcgacctccgcttttcaggtgcaggcgattcttttgccccagcccccagaatag

SEQ ID NO: 320881 - protein, 123 aa, Artificial Sequence
  derived and/or modified sequence
MEVLKTRLTLRRTGQYKGLLDCARRILEREGPRAFYRGYLPNVLGIIPYAGIDLAVYETLKNWWLQQYSHDSADPGILVLLACGTISSTCGQIASYPLALVRTRMQAQAGGHAMSSLMERTMW

SEQ ID NO: 320882 - DNA, 372 bp, Artificial Sequence
  derived and/or modified sequence
atggaggtgctgaagaccagactgaccctgagaagaaccggccagtacaagggcctgctggactgcgccagaagaatcctggagagagagggccccagagccttctacagaggctacctgcccaacgtgctgggcatcatcccctacgccggcatcgacctggccgtgtacgagaccctgaagaactggtggctgcagcagtacagccacgacagcgccgaccccggcatcctggtgctgctggcctgcggcaccatcagcagcacctgcggccagatcgccagctaccccctggccctggtgagaaccagaatgcaggcccaggccggcggccacgccatgagcagcctgatggagagaaccatgtggtag

SEQ ID NO: 320883 - DNA, 372 bp, Artificial Sequence
  derived and/or modified sequence
atggaggtgctgaagactcggctgacactcaggcggacaggacaatacaaagggctcctcgattgtgcaagacgcatcttagagcgcgagggacctcgagcattctaccgggggtacttgccgaacgtgttagggattatcccttacgccggaatagacctggccgtgtatgaaacactaaagaactggtggctccaacagtatagtcatgactcagctgatccaggtattctcgtactgctcgcttgcggtaccatttcaagtacatgcgggcagatcgcaagctacccgctggcccttgtcaggaccagaatgcaggcccaagcaggtggtcatgctatgtcatcccttatggaacggaccatgtggtag

SEQ ID NO: 320884 - DNA, 372 bp, Artificial Sequence
  derived and/or modified sequence
atggaggtgctgaagacccggctgaccctgcggaggacaggccagtacaagggcctgctggactgtgcccggcgcatcctggagcgggagggcccccgggccttctaccggggctacctgcccaacgtgctgggcatcatcccctatgccggcatcgacctggccgtgtatgagaccctgaagaactggtggctgcagcagtacagccatgacagcgctgaccccggcatcctggtgctgctggcctgtggcaccatcagcagcacctgtggccagatcgccagctaccccctggccctggtgaggaccaggatgcaggcccaggccggcggccacgccatgagcagcctgatggagaggaccatgtggtag

SEQ ID NO: 320885 - DNA, 372 bp, Artificial Sequence
  derived and/or modified sequence
atggaggtgctgaagacccggctgaccctgcggcggaccggccagtacaagggccttctcgactgtgcccggaggatcttagaacgagagggtcccagagccttctatcggggatacctccccaacgttctggggatcattccatacgccggcatagacctggcagtctacgaaaccctgaagaactggtggttacaacagtactctcacgactccgccgaccctgggatcctggtcctgttggcttgtgggacaattagctctacatgcggacaaatagcgagttaccctcttgccctggtacggactagaatgcaagcccaggccggggggcacgccatgtcctctctgatggagaggactatgtggtag

SEQ ID NO: 320886 - DNA, 372 bp, Artificial Sequence
  derived and/or modified sequence
atggaggtgttaaaaacacgcctgacattgaggcggaccggtcagtacaaaggactcctcgattgtgcccgtcgaatcctggaaagagaagggcctagggctttttaccggggatacctcccaaatgtgctgggaattattccatacgcgggaatcgacctggccgtttacgagacgcttaagaactggtggttgcagcagtacagccatgactcagctgatcctggcatattggtcttgttggcttgcggaacaatttcctcaacctgtggacaaattgcttcatatcccttggccctggtcaggactaggatgcaggctcaggctggtggacacgccatgagcagcctgatggagcgcactatgtggtag

SEQ ID NO: 320887 - DNA, 1376 bp, Artificial Sequence
  derived and/or modified sequence
gcggccgcgggagctgaccctgcggggtcccggggggggagggggagccgcgaagcccccactgaggccgccgctgccgggcctcccctcccccccgggcgggcgccatgcgggggagcccgggcgacgcggagcggcggcagcgctggggtcgcctgttcgaggagctggacagtaacaaggatggccgcgtggacgtgcacgagttgcgccaggggctggccaggctgggcgggggcaacccagaccccggcgcccaacagggtatctcctctgagggtgatgctgacccagatggcgggctcgacctggaggaattttcccgctatctgcaggagcgggaacagcgtctgctgctcatgtttcacagtcttgaccggaaccaggatggtcacattgatgtctctgagatccaacagagtttccgagctctgggcatttccatctcgctggagcaggctgagaaaattttgcacagcatggaccgagacggcacaatgaccattgactggcaagaatggcgcgaccacttcctgttgcattcgctggaaaatgtggaggacgtgctgtatttctggaagcattccacggtcctggacattggcgagtgcctgacagtgccggacgagttctcaaagcaagagaagctgacgggcatgtggtggaaacagctggtggccggcgcagtggcaggtgccgtgtcacggacaggcacggcccctctggaccgcctcaaggtcttcatgcaggtccatgcctcaaagaccaaccggctgaacatccttggggggcttcgaagcatggtccttgagggaggcatccgctccctgtggcgcggcaatggtattaatgtactcaagattgcccccgagtcagctatcaagttcatggcctatgaacagatcaagagggccatcctggggcagcaggagacactgcatgtgcaggagcgcttcgtggctggctccctggctggtgccacagcccaaaccatcatttaccctatggaggtgctgaagacgcggctgaccttgcgccggacgggccagtataaggggctgctggactgcgccaggcgtatcctggagagggaggggccccgtgccttctaccgcggctacctccccaacgtgctgggcatcatcccctatgcgggcatcgacctggccgtctacgagactctgaagaactggtggcttcagcagtacagccacgactcggcagacccaggcatcctcgtgctcctggcctgcggtaccatatccagcacctgcggccagatagccagttacccgctggccctggtccggacccgcatgcaggcacaagccggtggtcatgccatgagcagccttatggagaggaccatgtggtaa

SEQ ID NO: 320888 - protein, 229 aa, Artificial Sequence
  derived and/or modified sequence
MWWKQLVAGAVAGAVSRTGTAPLDRLKVFMQVHASKTNRLNILGGLRSMVLEGGIRSLWRGNGINVLKIAPESAIKFMAYEQIKRAILGQQETLHVQERFVAGSLAGATAQTIIYPMETLKNWWLQQYSHDSADPGILVLLACGTISSTCGQIASYPLALVRTRMQAQASIEGGPQLSMLGLLRHILSQEGMRGLYRGIAPNFMKVIPAVSISYVVYENMKQALGVTSR

SEQ ID NO: 320889 - DNA, 690 bp, Artificial Sequence
  derived and/or modified sequence
atgtggtggaagcagctggtggccggcgccgtggccggcgccgtgagcagaaccggcaccgcccccctggacagactgaaggtgttcatgcaggtgcacgccagcaagaccaacagactgaacatcctgggcggcctgagaagcatggtgctggagggcggcatcagaagcctgtggagaggcaacggcatcaacgtgctgaagatcgcccccgagagcgccatcaagttcatggcctacgagcagatcaagagagccatcctgggccagcaggagaccctgcacgtgcaggagagattcgtggccggcagcctggccggcgccaccgcccagaccatcatctaccccatggagaccctgaagaactggtggctgcagcagtacagccacgacagcgccgaccccggcatcctggtgctgctggcctgcggcaccatcagcagcacctgcggccagatcgccagctaccccctggccctggtgagaaccagaatgcaggcccaggccagcatcgagggcggcccccagctgagcatgctgggcctgctgagacacatcctgagccaggagggcatgagaggcctgtacagaggcatcgcccccaacttcatgaaggtgatccccgccgtgagcatcagctacgtggtgtacgagaacatgaagcaggccctgggcgtgaccagcagatag

SEQ ID NO: 320890 - DNA, 690 bp, Artificial Sequence
  derived and/or modified sequence
atgtggtggaaacagctcgtggctggagccgttgcaggcgccgtcagcagaactggcactgcaccactggatcgcctcaaagtttttatgcaggtacacgcttctaaaactaaccggctcaacattttgggcggattaaggtccatggtgctggaagggggcatccgctctctctggaggggaaacgggataaatgtactaaagattgcccccgagtctgcgatcaaatttatggcctacgaacagattaagcgcgccatactaggtcagcaggagacgctacatgttcaagagcgattcgtggcagggtccctggctggggctaccgcacaaaccatcatctacccaatggagactctgaaaaactggtggctgcagcagtatagtcacgatagcgccgaccccgggatcctggtcctacttgcatgtggcactatcagctccacctgtggccagatcgcatcctaccccctggcgctggtacgaacccgcatgcaggctcaggcaagtattgaaggcggaccccagctgagcatgctaggcttgttgagacacatcctatcgcaggagggcatgagaggactgtatcgaggaattgcccccaacttcatgaaagtgattccagcagtctcaatcagctacgttgtatacgaaaacatgaaacaggccctgggagtgaccagccggtag

SEQ ID NO: 320891 - DNA, 690 bp, Artificial Sequence
  derived and/or modified sequence
atgtggtggaagcagctggtggccggggctgtggccggggctgtgtccaggactggaacagcccccctggaccggctgaaggtgttcatgcaggtgcacgccagcaagaccaaccggctgaacatcctgggcggcctgcgctccatggtgctggagggcggcatccgcagcctgtggagaggaaatggcatcaacgtgctgaagatcgcccctgagagcgccatcaagttcatggcctatgagcagatcaagagggccatcctgggccagcaggagaccctgcacgtgcaggagagatttgtggccggcagcctggccggggccacagcccagaccatcatctaccccatggagaccctgaagaactggtggctgcagcagtacagccatgacagcgctgaccccggcatcctggtgctgctggcctgtggcaccatcagcagcacctgtggccagatcgccagctaccccctggccctggtgaggaccaggatgcaggcccaggccagcattgaaggaggcccccagctgtccatgctgggcctgctgcggcacatcctgagccaggagggcatgaggggcctgtaccggggcatcgcccccaacttcatgaaggtgatcccagctgtgtccatctcctatgtggtgtatgagaacatgaagcaggccctgggcgtgaccagcaggtag

SEQ ID NO: 320892 - DNA, 690 bp, Artificial Sequence
  derived and/or modified sequence
atgtggtggaagcagctggtggccggcgccgtggccggcgccgtgagtagaacgggtacggctccgctcgatagattaaaggtgtttatgcaggttcacgcttcgaagaccaatcgtcttaacatccttggagggctccgttcaatggtattggaaggagggattagatcactgtggcgtgggaatggcattaacgtgctgaaaatcgcccccgaatcggctatcaaattcatggcctatgagcaaatcaagcgcgctatccttggccagcaggagactctccatgtgcaagagcggttcgtcgcaggtagtctagctggcgctaccgctcagaccattatctacccaatggagactttgaagaactggtggttgcagcagtattcacatgattctgccgatccagggattttggtgttgctggcttgtgggaccattagttctacatgtggccagattgcttcctatccactggctctggtgcgcactcggatgcaggcccaggcatcaatcgagggtggtccgcagttatcaatgctcggactgctacgccacatccttagccaagaagggatgagggggctttaccgcggcatcgctcctaactttatgaaagtgataccagccgtgtcaattagttatgtggtgtatgagaatatgaagcaggcgttaggggtgacatcccggtag

SEQ ID NO: 320893 - DNA, 690 bp, Artificial Sequence
  derived and/or modified sequence
atgtggtggaaacagctcgtggccggagcggtggcgggtgctgtgtccagaactggaacagccccattggaccgtctgaaagtattcatgcaggtgcatgcctcgaaaacaaatagattaaatatcctgggaggcctgcgttctatggtccttgagggcggtataaggtccctctggagggggaatggcattaatgtgctaaagattgcaccagaaagtgctatcaaatttatggcctacgagcagatcaagcgagccatcctgggccagcaagaaactctgcatgtgcaagagcggttcgtggctgggagcctcgccggagctacagcccagaccataatatacccaatggagacacttaaaaattggtggctgcaacagtatagtcatgattctgccgaccccggaattctcgtgctgcttgcctgtgggactatctcaagtacctgcggtcagatcgccagctatcccctcgccctggtcagaacacggatgcaggcacaggcctcaatcgaaggcggaccacaattgtccatgttgggcctactccgacacattctgtctcaggaaggtatgcgcggactgtaccgaggaatcgcccctaacttcatgaaagtaataccggctgtttctatttcgtacgtggtgtacgagaatatgaagcaggcccttggagtgacaagccgatag

SEQ ID NO: 320894 - DNA, 1210 bp, Artificial Sequence
  derived and/or modified sequence
gcaagagaagctgacgggcatgtggtggaaacagctggtggccggcgcagtggcaggtgccgtgtcacggacaggcacggcccctctggaccgcctcaaggtcttcatgcaggtccatgcctcaaagaccaaccggctgaacatccttggggggcttcgaagcatggtccttgagggaggcatccgctccctgtggcgcggcaatggtattaatgtactcaagattgcccccgagtcagctatcaagttcatggcctatgaacagatcaagagggccatcctggggcagcaggagacactgcatgtgcaggagcgcttcgtggctggctccctggctggtgccacagcccaaaccatcatttaccctatggagactctgaagaactggtggcttcagcagtacagccacgactcggcagacccaggcatcctcgtgctcctggcctgcggtaccatatccagcacctgcggccagatagccagttacccgctggccctggtccggacccgcatgcaggcacaagcctccatcgagggtggcccccagctgtccatgctgggtctgctacgtcacatcctgtcccaggagggcatgcggggcctctaccgggggatcgcccccaacttcatgaaggttattccagctgtgagcatctcctatgtggtctacgagaacatgaagcaggccttgggggtcacgtccaggtgagggacccggagcccgtccccccaatccctcaccccccacacctcagccactggagactgatgatccaaccacaggatccctactctttggccacgagatcccagtacccagatcctggatcctagactcctatgccccaaccattgggtcatgggatcccagcatccagatcctggatcctagactcctatgccccaaccactgggtcatgcgatccccacccttcagccactagatcccagatccccctgtaaccataactgtggatcccttacttcagcaactcaagtctgctaccctaaccacaagattcaagattatccacaccccagcccttaatccccatcccccaaatcactggatcctgcagccccacatcctaaggtggatcccacgcttccctgtgccccctactggatcctggacctctacgtcttaaccactggatcccacacaaatcagtgaatggatcccaacaccccaaccacaggagcacggatt

SEQ ID NO: 320895 - DNA, 618 bp, Artificial Sequence
  derived and/or modified sequence
atgaacagctggccctggctgttcgacagcaacttctgcagcgccgtggagatcatcctggagcccgagaagaagatccccaacagcaccctgcacttctgcgaggagctggtgcccaacagcggcagcctgttcggcaagaacatctgctgcggcaagcagtgctgcatctgcgacctgaagagcctgctggagctggacagagacggcgagttccagcccgagagacccaagaacagctgccccgccctgctgaacgccatcagcagaagaaccagcatcttccccccccccaccagcctgctgctgcccgtgaccctggccagcagccagtgctgctgggccaccagcggcagcgccggcggcagaggcatcgcccccacccccggcggccagccctgcggcagcagcagaaagagcggcagcagctgcgcctggagatggagccccagcggcggcagcccctggccctgcagcagagccggcggcgcctggagaagactgggcaccagcctggacacccaccccgccggcagcagagcctgcagagccgtgcaccagctggccggcgagagccccacccccagacaggccagaagaccccccttccccacctag

SEQ ID NO: 320896 - DNA, 1769 bp, Artificial Sequence
  derived and/or modified sequence
ggggccgaggcccggccaggagcagagtccggctgcctggggcgggcggcgcgtgtctgcagctgctccgggtagcccgctaggcgcgccgtccccagccccgccgccggccctcggtgcgcccggccgcctgcacccccaggagcagctgctgtgaataaacacagaagtggagctgggggactgattagaagcctcattcagtgcacctgggccccagcaggcccagccaggcgtggaggaagaggcattgaggactttccttacctgtttttccagctcacccactgccagcagagaatgctgtccagtttcaacgagtggttttggcaggacaggttctggttaccacccaatgtcacgtggacagagctagaagaccgggatggccgtgtctacccccacccccaggacttgttggcagccctgcccctggcgctggtcctcctggccatgcgccttgcctttgagagattcattggcctgcccctgagccggtggctgggtgtgagggatcagaccaggaggcaagtgaagcccaacgccacgctggagaaacacttcctcacggaagggcacaggcccaaggagccccagctgtctctcctggccgcccagtgtggcctcacgctgcagcagacccagcgatggttccggagacgccggaaccaggatcgaccccagctgaccaagaagttctgtgaggccagctggaggtttctcttctacctgtcctccttcgtgggcggcctctcggtcctgtaccacgagtcatggctgtgggcaccagtaatgtgctgggacaggtacccaaaccagactctgaagccatccctgtactggtggtacctcttggagctgggtttctacctctcactgctaatcaggctgccctttgatgtcaagcgcaaggatttcaaggagcaggtgatacaccacttcgtggcggtcatcctgatgaccttctcctacagtgccaacctgctgcgcattggctctctggtgctgctgttacacgattcctctgactacctgctggaggcctgtaagatggtcaactacatgcagtatcagcaagtgtgcgacgctctcttcctcatcttctcctttgtcttcttctacacccgactggtcctctttcccacccagatcctctacaccacatactacgagtccatcagcaacaggggccccttcttcggctactacttcttcaacgggcttctgatgttgctgcagctgctgcacgtgttctggtcttgcctcattctgcgcatgctctatagcttcatgaagaagggccagatggagaaggacattcgtagtgatgtagaagaatcagactccagtgaggaggcggcggcggcccaggaacctctgcagctaaagaacggggcagctggagggcccaggccagcccccactgatggccctcggagccgggtggccgggcgtctgaccaacaggcacacaacagccacatagccgggcggggctggctgtaaggggttgcccccccgccagtgccttggatatttctggggtgactggactggcgcccctgggccacctttctggagacagggagggccccacccggggtgggtgggaaggctgatgatctgtctccagccccttccttctgcccacccacccttcttccctctgggcaactggacagatctgggagccagcagctggatgctgtggctggccagagacacctccaggctgtggcctgggggctggggggagccccaggctgaaaa

SEQ ID NO: 320897 - DNA, 1357 bp, Artificial Sequence
  derived and/or modified sequence
gccgaggcccggccaggagcagagtccggctgcctggggcgggcggcgcgtgtctgcagctgctccgggtagcccgctaggcgcgccgtccccagccccgccgccggccctcggtgcgcccggccgcctgcacccccagaatgctgtccagtttcaacgagtggttttggcaggacaggttctggttaccacccaatgtcacgtggacagagctagaagaccgggatggccgtgtctacccccacccccaggacttgttggcagccctgcccctggcgctggtcctcctggccatgcgccttgcctttgagagattcattggcctgcccctgagccggtggctgggtgtgagggatcagaccaggaggcaagtgaagcccaacgccacgctggagaaacacttcctcacggaagggcacaggcccaaggagccccagctgtctctcctggccgcccagtgtggcctcacgctgcagcagacccagcgatggttccggagacgccggaaccaggatcgaccccagctgaccaagaagttctgtgaggccagctggaggtttctcttctacctgtcctccttcgtgggcggcctctcggtcctgtaccacgagtcatggctgtgggcaccagtaatgtgctgggacaggtacccaaaccagactctgaagccatccctgtactggtggtacctcttggagctgggtttctacctctcactgctaatcaggctgccctttgatgtcaagcgcaaggatttcaaggagcaggtgatacaccacttcgtggcggtcatcctgatgaccttctcctacagtgccaacctgctgcgcattggctctctggtgctgctgttacacgattcctctgactacctgctggaggcctgtaagatggtcaactacatgcagtatcagcaagtgtgcgacgctctcttcctcatcttctcctttgtcttcttctacacccgactggtcctctttcccacccagatcctctacaccacatactacgagtccatcagcaacaggggccccttcttcggctactacttcttcaacgggcttctgatgttgctgcagctgctgcacgtgttctggtcttgcctcattctgcgcatgctctatagcttcatgaagaagggccagatggagaaggacattcgtagtgatgtagaagaatcagactccagtgaggaggcggcggcggcccaggaacctctgcagctaaagaacggggcagctggagggcccaggccagcccccactgatggccctcggagccgggtggccgggcgtctgaccaacaggcacacaacagccacatagccgggcggggctggctgtaaggggttgccccc

SEQ ID NO: 320898 - DNA, 568 bp, Artificial Sequence
  derived and/or modified sequence
actgtccccctcggggcttcccatcatggccgtctccccgagctatccgcgctcccccacgagggccggggcgcaacgggtgcccgaggacgcggctgtgaaacgggctggagcgagtaggggcgatcctggcctcgtgacgcgggggaatccggatgtgtgagccgggggagcgccccgtttccccgacgtgccagggctggggacgcagctggggccctggcctcggagtccgcagcccggccgcgtagacggcttctgagaaccgcttaaacacgtcattccaagcccgagctaacccatcaggcggccggggagcagctgctgtgaataaacacagaagtggagctgggggactgattagaagcctcattcagtgcacctgggccccagcaggcccagccaggcgtggaggaagaggcattgaggactttccttacctgtttttccagctcacccactgccagcagagaatgctgtccagtttcaacgagtggttttggcaggacaggttctggttaccacccaatgtcacgtggacagagctagaagaccgggatggccgtgt

SEQ ID NO: 320899 - DNA, 531 bp, Artificial Sequence
  derived and/or modified sequence
attatctttcttttccaggtgtgcaaacaagctcttggagggaaggagaggagaaaataaacaggagcagctgctgtgaataaacacagaagtggagctgggggactgattagaagcctcattcagtgcacctgggccccagcaggcccagccaggcgtggaggaagaggcattgaggactttccttacctgtttttccagctcacccactgccagcagagacctcccagctaactggaacctgtgtccacagaatgctgtccagtttcaacgagtggttttggcaggacaggttctggttaccacccaatgtcacgtggacagagctagaagaccgggatggccgtgtctacccccacccccaggacttgttggcagccctgcccctggcgctggtcctcctggccatgcgccttgcctttgagagattcattggcctgcccctgagccggtggctgggtgtgagggatcagaccaggaggcaagtgaagcccaacgccacgctggagaaacacttcctcacggaagggc

SEQ ID NO: 320900 - DNA, 768 bp, Artificial Sequence
  derived and/or modified sequence
cccactcaagccttttttcccctgctgggggccgaggcccggccaggagcagagtccggctgcctggggcgggcggcgcgtgtctgcagctgctccgggtagcccgctaggcgcgccgtccccagccccgccgccggccctcggtgcgcccggccgcctgcacccccaggagcagctgctgtgaataaacacagaagtggagctgggggactgattagaagcctcattcagtgcacctgggccccagcaggcccagccaggcgtggaggaagaggcattgaggactttccttacctgtttttccagctcacccactgccagcagagacctcccagctaactggaacctgtgtccacagaatgctgtccagtttcaacgagtggttttggcaggacaggttctggttaccacccaatgtcacgtggacagagctagaagaccgggatggccgtgtctacccccacccccaggacttgttggcagccctgcccctggcgctggtcctcctggccatgcgccttgcctttgagagattcattggcctgcccctgagccggtggctgggtgtgagggatcagaccaggaggcaagtgaagcccaacgccacgctggagaaacacttcctcacggaagggcacaggcccaaggagccccagctgtctctcctggccgcccagtgtggcctcacgctgcagcagacccagcgatggttccggagacgccggaaccaggatcgaccccagctgaccaagaagttctgtgaggcca

SEQ ID NO: 320901 - DNA, 342 bp, Artificial Sequence
  derived and/or modified sequence
atgctgagcagcttcaacgagtggttctggcaggacagattctggctgccccccaacgtgacctggaccgagctggaggacagagacggcagagtgtacccccacccccaggacctgctggccgccctgcccctggccctggtgctgctggccatgagactggccttcgagagattcatcggcctgcccctgagcagatggctgggcgtgagagaccagaccagaagacaggtgaagcccaacgccaccctggagaagcacttcctgaccgagggccacagacccaaggagccccagctgagcctgctggccgcccagtgcggcctgaccctgcagcagtag

SEQ ID NO: 320902 - DNA, 579 bp, Artificial Sequence
  derived and/or modified sequence
atgctgagcagcttcaacgagtggttctggcaggacagattctggctgccccccaacgtgacctggaccgagctggaggacagagacggcagagtgtacccccacccccaggacctgctggccgccctgcccctggccctggtgctgctggccatgagactggccttcgagagattcatcggcctgcccctgagcagatggctgggcgtgagagaccagaccagaagacaggtgaagcccaacgccaccctggagaagcacttcctgaccgagggccacagacccaaggagccccagctgagcctgctggccgcccagtgcggcctgaccctgcagcagacccagagatggttcagaagaagaagaaaccaggacagaccccagctgaccaagaagttctgcgaggccagctggagattcctgttctacctgagcagcttcgtgggcggcctgagcgtgctgtaccacgagagctggctgtgggcccccgtgatgtgctgggacagataccccaaccagaccctgaagcccagcctgtactggtggtacctgctggagctgggcttctacctgagctag

SEQ ID NO: 320903 - DNA, 99 bp, Artificial Sequence
  derived and/or modified sequence
atgctgagcagcttcaacgagtggttctggcaggacagattctggctgccccccaacgtgacctggaccgagctggaggacagagacggcagagtgtag

SEQ ID NO: 320904 - DNA, 279 bp, Artificial Sequence
  derived and/or modified sequence
atgctgagcagcttcaacgagtggttctggcaggacagattctggctgccccccaacgtgacctggaccgagctggaggacagagacggcagagtgtacccccacccccaggacctgctggccgccctgcccctggccctggtgctgctggccatgagactggccttcgagagattcatcggcctgcccctgagcagatggctgggcgtgagagaccagaccagaagacaggtgaagcccaacgccaccctggagaagcacttcctgaccgagggctag

SEQ ID NO: 320905 - DNA, 342 bp, Artificial Sequence
  derived and/or modified sequence
atgctgtctagtttcaacgaatggttttggcaagacaggttctggctaccccccaacgtaacatggaccgagttagaagaccgcgatggacgcgtttatccacacccacaggatctgttagcggccctcccgctggcacttgtgctgctggcaatgcgactggcatttgaacgctttatcggcctccctctgtccagatggcttggggtcagagatcagacccgccgccaggtaaaacctaacgcgacattggagaagcacttcctgacagaaggccataggccgaaagaaccccagcttagcctgctagccgcccaatgtggcctgacactgcaacagtag

SEQ ID NO: 320906 - DNA, 579 bp, Artificial Sequence
  derived and/or modified sequence
atgctgtcgagttttaacgagtggttttggcaggatagattttggctgccgcccaacgtgacatggaccgagctggaggatcgagacggcagagtgtatccccaccctcaggatcttctcgccgcccttcctttagcgctggtgctcctggccatgcgcctcgccttcgaaaggttcatcggtctccctcttagtcgatggttaggcgtgcgggaccaaactcgaaggcaagtgaagcccaatgctaccttagagaagcattttttgacggagggacaccggcccaaagagccacaacttagcctgttggcagcacaatgcgggctcacccttcagcagacacagcggtggttcagacggcggcggaaccaggatcgccctcaactaactaaaaaattttgtgaggcaagctggcggttcctcttttatctctcctcatttgtgggtggactgagcgtgctctaccacgagagctggctgtgggcacctgtgatgtgttgggatagatacccaaaccagactctaaaaccctctttgtattggtggtatcttctggaactcggtttctatctatcttag

SEQ ID NO: 320907 - DNA, 99 bp, Artificial Sequence
  derived and/or modified sequence
atgctcagtagcttcaacgaatggttctggcaggaccggttctggctgccccccaacgtgacatggaccgagctcgaagatcgggatggcagggtctag

SEQ ID NO: 320908 - DNA, 279 bp, Artificial Sequence
  derived and/or modified sequence
atgctctcatcctttaacgagtggttttggcaggatagattttggcttccccctaacgttacgtggaccgagctggaagatagagatggacgagtatatcctcatccccaggacctgctggccgctctgccactagcgctagttctcctggcaatgcgcctcgcctttgaacgcttcatcgggctccccctgagtaggtggctcggagtgcgtgaccagactcgacgccaagtcaagccaaacgctacgctggaaaaacacttcttgaccgagggttag

SEQ ID NO: 320909 - DNA, 342 bp, Artificial Sequence
  derived and/or modified sequence
atgctgagcagcttcaatgagtggttctggcaggaccgcttctggctgcccccaaatgtgacctggacagagctggaggacagagatggccgggtgtacccccacccccaggacctgctggccgccctgcccctggccctggtgctgctggccatgaggctggcctttgagcgcttcatcggcctgcccctgagccgctggctgggcgtgcgggaccagacccggcggcaggtgaagcccaatgccaccctggagaagcacttcctgacagagggccaccggcccaaggagccccagctgagcctgctggccgcccagtgtggcctgaccctgcagcagtag

SEQ ID NO: 320910 - DNA, 579 bp, Artificial Sequence
  derived and/or modified sequence
atgctgagcagcttcaatgagtggttctggcaggaccgcttctggctgcccccaaatgtgacctggacagagctggaggacagagatggccgggtgtacccccacccccaggacctgctggccgccctgcccctggccctggtgctgctggccatgaggctggcctttgagcgcttcatcggcctgcccctgagccgctggctgggcgtgcgggaccagacccggcggcaggtgaagcccaatgccaccctggagaagcacttcctgacagagggccaccggcccaaggagccccagctgagcctgctggccgcccagtgtggcctgaccctgcagcagacccagcgctggttcagaagaagaagaaaccaggaccggccccagctgaccaagaagttctgtgaggcctcctggaggttcctgttctacctgagcagctttgtgggcggcctgtctgtgctgtaccacgagagctggctgtgggcccctgtgatgtgctgggaccgctaccccaaccagaccctgaagcccagcctgtactggtggtacctgctggagctgggcttctacctgtcctag

SEQ ID NO: 320911 - DNA, 99 bp, Artificial Sequence
  derived and/or modified sequence
atgctgagcagcttcaatgagtggttctggcaggaccgcttctggctgcccccaaatgtgacctggacagagctggaggacagagatggccgggtgtag

SEQ ID NO: 320912 - DNA, 279 bp, Artificial Sequence
  derived and/or modified sequence
atgctgagcagcttcaatgagtggttctggcaggaccgcttctggctgcccccaaatgtgacctggacagagctggaggacagagatggccgggtgtacccccacccccaggacctgctggccgccctgcccctggccctggtgctgctggccatgaggctggcctttgagcgcttcatcggcctgcccctgagccgctggctgggcgtgcgggaccagacccggcggcaggtgaagcccaatgccaccctggagaagcacttcctgacagagggctag

SEQ ID NO: 320913 - DNA, 342 bp, Artificial Sequence
  derived and/or modified sequence
atgctgagcagcttcaacgagtggttctggcaggaccggttctggctaccgcctaatgtgacctggaccgaactcgaggacagagatggtcgagtctaccctcatccacaggatctcttggcagccctgcctctggctctggtgctcttagccatgcgcctggccttcgaacgatttattggtctgccgttgtctcgatggttaggggtccgcgaccaaactaggcgacaggtcaagcccaatgcaactctggaaaaacattttctaaccgagggccatcgcccaaaagagcctcaactgagcttgctcgctgcccagtgcggtttaacattacagcagtag

SEQ ID NO: 320914 - DNA, 579 bp, Artificial Sequence
  derived and/or modified sequence
atgctgagcagcttcaacgagtggttctggcaggaccggttctggctccctccaaatgtcacttggaccgaactcgaagaccgtgacggcagggtctacccccacccacaagatctgcttgccgctctccctttggccctcgtgttattggcaatgaggctggcttttgagcgttttattggtctgccgctgagcagatggttgggcgtgagggaccagacacgacgccaagtgaagccaaacgccactctggaaaagcactttctcaccgagggacataggcccaaggagcctcagctaagcctgctggccgcccagtgcggtctcaccttacaacagactcaacgctggttcagaagacgccggaaccaagacaggccacagctcactaaaaaattctgtgaggcttcttggcggtttctcttttatctgtcgtctttcgtcggggggctctccgtcttataccatgaaagttggctgtgggctcctgttatgtgctgggaccgctacccaaatcagacactcaagccctctctgtactggtggtatctgctggagctgggcttctacctatcctag

SEQ ID NO: 320915 - DNA, 99 bp, Artificial Sequence
  derived and/or modified sequence
atgctgagcagcttcaacgagtggttctggcaggaccggttctggcttccccctaacgtgacatggactgagctggaagatcgtgacgggagggtgtag

SEQ ID NO: 320916 - DNA, 279 bp, Artificial Sequence
  derived and/or modified sequence
atgctgagcagcttcaacgagtggttctggcaggaccggttctggcttccaccaaacgtcacttggacagagcttgaagatagggatggacgggtatatccacacccacaagatttgctcgccgcactgccattagcactggttctcttagccatgcgtctggcttttgagaggtttatcggcctgcccctttccagatggctgggcgtaagagaccagacacgcagacaggtgaaacccaacgccacactcgagaaacatttcctcaccgagggatag

SEQ ID NO: 320917 - DNA, 342 bp, Artificial Sequence
  derived and/or modified sequence
atgttgtcatccttcaacgagtggttctggcaggacagattttggctaccgccaaacgtgacatggacagaactggaggatcgggacggcagagtgtatccacatccgcaggatctgctggccgctctcccattggctttagtgcttctggccatgagattagcttttgagagattcattggattacccctctctcgctggcttggagtcagagaccagacacggagacaagtgaaacctaacgcgactttggagaagcactttctgacagaggggcacaggcccaaggaacctcagctgtcgctgcttgccgcacagtgtgggttaacccttcagcagtag

SEQ ID NO: 320918 - DNA, 579 bp, Artificial Sequence
  derived and/or modified sequence
atgttgtccagcttcaatgaatggttctggcaagacagattttggctgccaccaaatgtgacttggacagaattagaggaccgagacggaagagtctatccgcatcctcaggacctgctggccgctcttccccttgcattggtgctactggccatgagactagcattcgagcgattcatcggactgcctttaagcagatggctaggagtgcgggaccagactcggaggcaggtgaaacctaatgcgaccttggagaagcatttccttactgaggggcatcggccaaaagaaccccaactaagcctactggctgcgcaatgcggactgaccctgcaacaaacacagaggtggttccgaagaagacgcaatcaggaccggcctcagctgacaaagaagttctgcgaagcttcttggcgatttctgttttacttaagcagctttgtgggtgggctgtcggtcctttaccacgaatcctggttgtgggccccagtcatgtgctgggataggtacccaaaccagaccctgaaacctagcctgtattggtggtacttgttggagctggggttctacctgtcctag

SEQ ID NO: 320919 - DNA, 99 bp, Artificial Sequence
  derived and/or modified sequence
atgctaagttcctttaacgagtggttctggcaggaccgtttctggttgccccctaacgtgacctggacagaactggaggacagggacgggcgagtatag

SEQ ID NO: 320920 - DNA, 279 bp, Artificial Sequence
  derived and/or modified sequence
atgcttagctcatttaacgagtggttttggcaagataggttctggctacctccaaacgtgacgtggaccgagctcgaggatagagacggcagagtttacccacatcctcaggaccttcttgcagccttacccctcgccctggttctgctagctatgcggcttgcgtttgaacgtttcatcgggctcccactgtcacggtggcttggtgtacgggaccaaacccggagacaggtgaagccgaacgccaccctcgaaaagcatttcctaacagagggatag

SEQ ID NO: 320921 - DNA, 713 bp, Artificial Sequence
  derived and/or modified sequence
ccacggccccgccccgggctccccccactcaagccttttttcccctgctgggggccgaggcccggccaggagcagagtccggctgcctggggcgggcggcgcgtgtctgcagctgctccgggtagcccgctaggcgcgccgtccccagccccgccgccggccctcggtgcgcccggccgcctgcacccccagcctcaaatgggtctgccttccaggagcagctgctgtgaataaacacagaagtggagctgggggactgattagaagcctcattcagtgcacctgggccccagcaggcccagccaggcgtggaggaagaggcattgaggactttccttacctgtttttccagctcacccactgccagcagagaatgctgtccagtttcaacgagtggttttggcaggacaggttctggttaccacccaatgtcacgtggacagagctagaagaccgggatggccgtgtctacccccacccccaggacttgttggcagccctgcccctggcgctggtcctcctggccatgcgccttgcctttgagagattcattggcctgcccctgagccggtggctgggtgtgagggatcagaccaggaggcaagtgaagcccaacgccacgctggagaaacacttcctcacggaagggcacaggcccaaggagccccagctgtctctcctggccgcccagtgtggcctcacgctgcagcaga

SEQ ID NO: 320922 - DNA, 758 bp, Artificial Sequence
  derived and/or modified sequence
gtgacctgggagcagcagaaatctggaaactgacagcatggacgtgctggccgcagcttccaggatctgctccgtcacccaggctggagtgcagtggtgtgatcacagctcactgcagcctcaaactcctgggctcaaccagtcctctcacctcagcctcctgagtagccgggattacagaatgctgtccagtttcaacgagtggttttggcaggacaggttctggttaccacccaatgtcacgtggacagagctagaagaccgggatggccgtgtctacccccacccccaggacttgttggcagccctgcccctggcgctggtcctcctggccatgcgccttgcctttgagagattcattggcctgcccctgagccggtggctgggtgtgagggatcagaccaggaggcaagtgaagcccaacgccacgctggagaaacacttcctcacggaagggcacaggcccaaggagccccagctgtctctcctggccgcccagtgtggcctcacgctgcagcagacccagcgatggttccggagacgccggaaccaggatcgaccccagctgaccaagaagttctgtgaggccagctggaggtttctcttctacctgtcctccttcgtgggcggcctctcggtcctgtaccacgagtcatggctgtgggcaccagtaatgtgctgggacaggtacccaaaccagactctgaagccatccctgtactggtggtacctcttggagctgggtttctacctctcac

SEQ ID NO: 320923 - DNA, 411 bp, Artificial Sequence
  derived and/or modified sequence
atgctgagcagcttcaacgagtggttctggcaggacagattctggctgccccccaacgtgacctggaccgagctggaggacagagacggcagagtgtacccccacccccaggacctgctggccgccctgcccctggccctggtgctgctggccatgagactggccttcgagagattcatcggcctgcccctgagcagatggctgggcgtgagagaccagaccagaagacaggtgaagcccaacgccaccctggagaagcacttcctgaccgagggccacagacccaaggagccccagctgagcctgctggccgcccagtgcggcctgaccctgcagcagacccagagatggttcagaagaagaagaaaccaggacagaccccagctgaccaagaagttctgcgaggcctag

SEQ ID NO: 320924 - DNA, 411 bp, Artificial Sequence
  derived and/or modified sequence
atgctttctagcttcaatgagtggttttggcaggatcgcttctggctcccaccgaatgtcacgtggaccgagctggaagatagagatggcagagtttaccctcacccacaggacttactagcagctctaccactggcacttgttctgctggccatgagactcgcattcgaacgctttattgggctgccgctgagcaggtggctgggagtgagagaccagacccgccgacaagttaagccgaacgcgacccttgagaaacattttctcaccgaaggtcaccgaccaaaagagccccaattgtccctgctcgccgcccagtgtggcctcaccctccagcagacacagagatggttcagaagacggaggaatcaggatagacctcagctgaccaagaagttttgcgaggcctag

SEQ ID NO: 320925 - DNA, 411 bp, Artificial Sequence
  derived and/or modified sequence
atgctgagcagcttcaatgagtggttctggcaggaccgcttctggctgcccccaaatgtgacctggacagagctggaggacagagatggccgggtgtacccccacccccaggacctgctggccgccctgcccctggccctggtgctgctggccatgaggctggcctttgagcgcttcatcggcctgcccctgagccgctggctgggcgtgcgggaccagacccggcggcaggtgaagcccaatgccaccctggagaagcacttcctgacagagggccaccggcccaaggagccccagctgagcctgctggccgcccagtgtggcctgaccctgcagcagacccagcgctggttcagaagaagaagaaaccaggaccggccccagctgaccaagaagttctgtgaggcctag

SEQ ID NO: 320926 - DNA, 411 bp, Artificial Sequence
  derived and/or modified sequence
atgctgagcagcttcaacgagtggttctggcaggaccggttctggttgcctcccaatgtcacctggaccgaacttgaggaccgagacggcagagtatacccacatccacaggacctcttggccgccctgcccctcgccctggtgttactcgctatgagattggcgtttgagcgcttcattggcctccctctgtctcggtggctgggggttcgcgatcagacccggcgccaggttaagcccaatgccactctcgaaaaacacttcctgaccgagggacaccggcccaaagagccccagctctctcttctggcagctcagtgtgggctcacactgcagcagacccaaagatggttccgacggcgccgaaaccaggaccgcccacagctcacaaaaaagttctgtgaggcttag

SEQ ID NO: 320927 - DNA, 411 bp, Artificial Sequence
  derived and/or modified sequence
atgctgtcatcatttaatgagtggttttggcaagatcgcttttggctacccccaaacgtgacttggactgagctcgaagacagagatgggagagtctacccccatccacaggacctgctggccgctctgccgctcgccttagtgctgctcgctatgcgcctcgctttcgaacgttttatcggcctgcccctgagtagatggctgggcgtgcgcgatcagacacgcaggcaggtgaaacctaatgccaccctggaaaaacactttctgacagagggacatcgacccaaggaaccccagctgtctctgttggctgcccagtgcggcttaaccttgcagcaaactcagagatggtttcgtcgacgcagaaatcaggatcgcccacaacttactaagaaattttgcgaagcgtag

SEQ ID NO: 320928 - DNA, 480 bp, Artificial Sequence
  derived and/or modified sequence
atgggcgagagaaagggcgtgaacaagtactacccccccgacttcaaccccgagaagcacggcagcctgaacagataccacaacagccaccccctgagagagagagccagaaagctgagccagggcatcctgatcatcagattcgagatgccctacaacatctggtgcgacggctgcaagaaccacatcggcatgggcgtgagatacaacgccgagaagaagaaggtgggcaactactacaccacccccatctacagattcagaatgaagtgccacctgtgcgtgaactacatcgagatgcagaccgaccccgccaactgcgactacgtgatcgtgagcggcgcccagagaaaggaggagagatgggacatggccgacaacgagcaggtgctgaccaccggcgagagacaccccctgacctgcctgggcgccctggccctgagcctgagatggggcccccagagccccgccgagctgtag

SEQ ID NO: 320929 - DNA, 995 bp, Artificial Sequence
  derived and/or modified sequence
atgcgcctcggagctggcttcaaccagcgaaggctgaacccgcttccagggtcctcgccgagctgggagttaggatccgagggggctaagagggataagaaaacttctctgggtgcccacgtggtactgagcgcccttgggagggctctggagaagaccatcgccttccaggggaaggaaactgaggtccagaaaagttatgactcgccccaaggggattgcctggcaggacgtgaaggggaagaggcccaccctggagtaaccctcactggagaatccagagacacgccgctttttggatgcctcctatgcctggcgggagtcttgtctgagctggcaccaccacacggcccacgacatcttcgcagggaagcctgtggaccctctgccaggctccacaagaggtcaggacagtgcagtgtgttcacaaggccagtttctgatcgtccgccccgaggctgaggaccagtaggcagctcccaagatgggtgaaaggaaaggggtcaacaagtactatcctccagacttcaaccctgagaagcatggctctctcaaccgataccacaacagccacccgcttcgggagcgggctcggaagctgtcacagggcatcctcatcatccgattcgaaatgccatataacatctggtgcgatggctgcaagaaccacatcggcatgggtgttcgttacaatgcagaaaagaagaaggtgggcaattactacacaaccccgatctacaggttccggatgaaatgccacctctgtgtcaactacatcgagatgcagacggaccccgccaactgcgactacgtgatcgtgagtggcgcccagcgcaaggaggagcgctgggacatggcggacaatgagcaggtgctgaccacaggtgagcgccacccacttacctgcctgggggccctggccctgagtctgcgctggggcccccaaagcccagccgagctctgatcgttgcagagcatgagaagaagcagaagct

SEQ ID NO: 320930 - DNA, 480 bp, Artificial Sequence
  derived and/or modified sequence
atgggcgaacggaagggggtgaacaagtactatccccccgattttaaccctgaaaagcatggaagtttgaaccggtaccacaactctcatcccctgagagagcgtgcccgcaagttgagccaaggtattctaataattcgtttcgagatgccatacaacatctggtgcgacggctgcaagaaccatatagggatgggagttcggtataatgcggagaaaaaaaaggtcgggaattattacaccacccccatttaccgctttaggatgaagtgccatctgtgcgtgaactacattgaaatgcagactgatcccgcaaattgtgattatgttatcgtgtccggggctcaaagaaaggaggaaaggtgggacatggcagataatgaacaggtgctgactacgggggaaaggcacccgctcacttgcctgggtgctctggcactgtccttacgctgggggccacagtccccagctgaattgtag

SEQ ID NO: 320931 - DNA, 480 bp, Artificial Sequence
  derived and/or modified sequence
atgggagagaggaaaggagtgaacaagtactaccccccagacttcaaccctgagaagcacggcagcctgaaccgctaccacaacagccaccccctgcgggagcgggccaggaagctgagccagggcatcctgatcatccgctttgagatgccctacaacatctggtgtgatggctgcaagaaccacatcggcatgggcgtgcgctacaatgctgagaagaagaaggtgggcaactactacaccacccccatctaccgcttcaggatgaagtgccacctgtgtgtgaactacatcgagatgcagacagatcctgccaactgtgactatgtgattgtgtctggggcccagaggaaggaggagcgctgggacatggctgacaatgagcaggtgctgaccactggagagcggcaccccctgacctgcctgggcgccctggccctgagcctgcgctggggcccccagagccctgctgagctgtag

SEQ ID NO: 320932 - DNA, 480 bp, Artificial Sequence
  derived and/or modified sequence
atgggcgagcggaagggcgtgaacaagtactacccccccgacttcaatccagagaaacacggttctctgaatcgctatcataactctcatcccctccgggagcgcgcacgtaagctcagtcaggggattctgatcatacggtttgagatgccctataatatctggtgtgacggatgcaaaaaccatatcgggatgggtgtgaggtacaacgccgaaaaaaagaaagtgggcaattactacacaacgcccatatatcggttccggatgaagtgccatctctgcgtgaactacattgagatgcagacagatccagctaattgcgactatgttatcgtgtcaggcgcccagaggaaggaggaacggtgggatatggccgacaacgagcaggtgcttactactggagaacgccacccacttacctgtctaggggctttggccctgtccttgcgatggggaccccagagtcctgccgaactgtag

SEQ ID NO: 320933 - DNA, 480 bp, Artificial Sequence
  derived and/or modified sequence
atgggagaacgcaagggcgttaacaagtattatccaccagactttaacccagaaaaacatgggtccctgaatcggtaccacaattcacatccacttagagagagagccaggaaattatcccaaggtatattgatcatacgctttgaaatgccctacaatatttggtgcgacgggtgtaagaatcatattggaatgggtgttcgctataacgctgagaaaaaaaaggtgggcaactattacacgacgcctatctaccgattccgcatgaagtgtcatctctgtgtcaattacattgagatgcaaactgatcctgccaactgtgactacgtcatagtgtctggcgcacagcgcaaagaggaacgctgggacatggctgataatgagcaggtgctgaccaccggggagcgccatcctcttacatgcctcggcgctctagccctctcattgcgttggggcccacaatccccagccgagctatag

SEQ ID NO: 320934 - DNA, 132 bp, Artificial Sequence
  derived and/or modified sequence
atgctgggcgccagagcctggctgggtagggtgctgcttctgcctcgggctggcgcgggcttagctgccagccgcaggtctgcatgttcccctactagcaggcttaacagcctccgctcactgattccttag

SEQ ID NO: 320935 - protein, 847 aa, Artificial Sequence
  derived and/or modified sequence
QDDGGLSRAPGCGAVCPGHHEHCQVAKLFQDSSLGSTVNILVTRLILLTEDQPTLEITHHAGKSLDSFCKWQKSIVNHSGHGNAIPENGVANHDTAVLITRYDICIYKNKPCGTLGLAPVGGMCERERSCSVNEDIGLATAFTIAHEIGHTFGMNHDGVGNSCGARGQDPAKLMAAHITMKTNPFVWSSCSRDYITSFLDSGLGLCLNNRPPRQDFVYPTVAPGQAYDADEQCRFQHGVKSRQCKYGEVCSELWCLSKSNRCITNSIPAAEGTLCQTHTIDKGWCYKRVCVPFGSRPEGVDGAWGPWTPWGDCSRTCGGGVSSSSRHCDSPRPTIGGKYCLGERRRHRSCNTDDCPPGSQDFREVQCSEFDSIPFRGKFYKWKTYRGGGVKACSLTCLAEGFNFYTERAAAVVDGTPCRPDTVDICVSGECKHVGCDRVLGSDLREDKCRVCGGDGSACETIEGVFSPASPGAGYEDVVWIPKGSVHIFIQDLNLSLSHLALKGDQESLLLEGLPGTPQPHRLPLAGTTFQLRQGPDQVQSLEALGPINASLIVMVLARTELPALRYRFNAPIARDSLPPYSWHYAPWTKCSAQCAGGSQVQAVECRNQLDSSAVAPHYCSAHSKLPKRQRACNTEPCPPDWVVGNWSLCSRSCDAGVRSRSVVCQRRVSAAEEKALDDSACPQPRPPVLEACHGPTCPPEWAALDWSEVSRPLPSRPLGCPGGVSTETPLRGLQVSCPLLTSHWGSTLSTKRPFQLQCTPSCGPGLRHRVVLCKSADHRATLPPAHCSPAAKPPATMRCNLRRCPPARWVAGEWGECSAQCGVGQRQRSVRCTSHTGQASHECTEA

SEQ ID NO: 320936 - DNA, 2544 bp, Artificial Sequence
  derived and/or modified sequence
caagacgacggcggcctatctcgagccccgggctgtggagctgtgtgtcccgggcatcacgagcactgtcaagtagcaaagctgtttcaagacagctcactgggctccacggtaaacattctagtgacccgactgattttactaaccgaagaccagcctactttagagattactcatcacgctggcaagtctctggactcattttgtaagtggcaaaaatccatcgtcaatcacagtgggcacggcaacgctatccccgagaatggggtggcaaaccacgacacggccgtgctcataactaggtacgacatttgtatatacaagaataaaccttgcggtactctgggcctcgctcctgttgggggaatgtgtgaacgggagcgctcttgtagcgttaacgaggacattgggctggccactgcgttcaccatcgcacatgagatcggccacactttcggtatgaaccacgatggggtgggcaactcttgtggcgcccgcggccaggacccagcgaaattgatggccgcccatatcacaatgaaaacaaatccatttgtgtggtctagctgctcaagagattacatcacctcattcctggattcaggcttgggcctgtgtcttaacaatcggccaccaaggcaggactttgtctatcccacagtagctcctggccaagcttatgacgcagacgagcagtgccggtttcagcatggtgtaaaatccaggcagtgtaagtacggggaggtctgcagtgagctctggtgcctgtccaaatcgaacaggtgcattacaaacagtatacccgccgcggaggggaccttgtgtcagacccacacaattgataagggatggtgttataaaagagtctgcgtgcccttcggcagcagaccagagggagtggacggagcctgggggccctggaccccttggggggactgttccagaacttgcggcgggggggtttctagttctagtcgtcactgcgatagcccccgccctaccattgggggtaaatactgcctgggggaaaggcggcgccacagatcctgtaatacagacgattgccctcccggcagccaagatttccgggaggtgcagtgtagcgagttcgactcaatccccttccgcggaaagttctacaagtggaagacctaccgaggaggtggcgtgaaagcttgtagtctgacatgcctggcggaggggtttaatttctacactgaacgggccgcagcagtcgtggacggaaccccctgcaggccggataccgtggatatttgtgtgagtggcgagtgcaaacacgtgggatgcgatagggtgctcgggagcgatctgagagaagataagtgccgagtctgcgggggcgacggaagtgcatgtgaaacaatagaaggagtctttagccctgctagcccaggtgctggttacgaagatgtggtgtggatccccaaagggtcagtccacatcttcatacaggacctgaacttgtctctttcacacctcgcactgaaaggtgaccaggagtcgctgcttctggaggggctacccggtacaccccagccacatcgattgcctctggcgggcacaacatttcagctgcggcaagggcccgaccaggtgcagagcctcgaagccctgggtcccatcaacgcgagcctgatagtgatggtcctggctagaacagaattgcccgctctcaggtaccgcttcaatgctcccattgcccgggatagtctgcctccctacagctggcactatgcaccttggactaagtgctctgcccagtgcgccggggggagccaggtgcaggcagtggaatgcagaaaccaactcgactcgtctgccgtggccccgcactattgctcggcacactcgaagctgcccaagcgtcaacgagcttgcaacacagaaccctgtccgcctgactgggttgtgggcaactggtcactctgttcgcggtcgtgcgatgccggggtgaggagtaggagcgtggtgtgtcagcgccgcgtctccgcagcggaagagaaagccctcgatgacagcgcctgcccccagcccaggcccccggtgttggaagcatgccacgggccaacttgcccacccgagtgggcagctcttgattggagcgaggtgtctcggccactgccctccaggcccctcggatgcccaggcggcgtttcaaccgaaacacctctgaggggactgcaggtctcttgcccgttactgacctctcattggggatctacgctgagtacgaagaggccgttccagcttcagtgtacgccaagttgcggccctgggttgaggcaccgtgtggtcctctgtaaaagcgccgatcaccgcgctaccctgccgccagctcactgttcccccgccgctaagccccccgctacaatgcggtgtaacctgcgaaggtgtccccccgctagatgggtagccggcgagtggggcgaatgcagtgcccagtgtggagtgggacagagacagcgcagtgttagatgtacatcccacactgggcaggcatcccatgagtgtaccgaggcctag

SEQ ID NO: 320937 - DNA, 2544 bp, Artificial Sequence
  derived and/or modified sequence
caggatgatggcggcctgagccgggcccctggctgtggggctgtgtgccccggccaccacgagcactgccaggtggccaagctgttccaggacagcagcctgggcagcacagtgaacatcctggtgaccaggctcatcctgctgacagaggaccagcccaccctggagatcacccaccacgccggcaagagcctggacagcttctgcaagtggcagaagagcatcgtgaaccacagcggccatggaaatgccatcccagaaaatggagtggccaaccacgacacagctgtgctgatcaccaggtatgacatctgcatctacaagaacaagccctgtggcaccctgggcctggcccctgtgggcggcatgtgtgagcgggagaggagctgcagcgtgaatgaagacatcggcctggccacagccttcaccatcgcccacgagatcggccacaccttcggcatgaaccatgatggagtgggcaacagctgtggggcccggggccaggaccctgccaagctgatggccgcccacatcaccatgaagaccaacccctttgtgtggagcagctgcagccgggactacatcaccagcttcctggacagcggcctgggcctgtgcctgaacaacagaccaccccggcaggactttgtgtaccccaccgtggcccctggccaggcctatgatgctgatgagcagtgccgcttccagcacggcgtgaagagccggcagtgcaagtacggggaggtgtgcagcgagctgtggtgcctgagcaagagcaaccgctgcatcaccaacagcatcccagctgctgagggcaccctgtgccagacccacaccatcgacaagggctggtgctacaagagggtgtgtgtgcccttcggcagcaggcctgagggcgtggatggagcctggggcccctggaccccctggggagactgcagcaggacctgtggcggcggcgtgagcagcagcagccgccactgtgacagcccccggcccaccatcggcggcaagtactgcctgggggagaggagaagacacaggagctgcaacacagatgactgccccccaggcagccaggacttccgggaggtgcagtgcagcgagtttgacagcatccccttccggggcaagttctacaagtggaagacctacagaggaggaggagtgaaggcctgcagcctgacctgcctggccgagggcttcaacttctacacagaaagagctgctgctgtggtggatggcaccccctgcaggccagacacagtggacatctgtgtgtctggagagtgcaagcacgtgggctgtgacagagtgctgggcagtgacctgcgggaggacaagtgccgggtgtgtggaggagatggcagcgcctgtgagaccatcgagggcgtcttcagccctgccagccctggagctggctatgaagatgtggtgtggatccccaagggctctgtgcacatcttcatccaggacctgaacctgagcctgagccacctggccctgaagggggaccaggagagcctgctgctggagggcctgcccggcaccccccagccccaccggctgcccctggccggcaccaccttccagctgcggcagggccctgaccaggtgcagagcctggaggccctgggccccatcaatgccagcctgattgtgatggtgctggccaggacagagctgcctgccctgcgctaccgcttcaatgcccccatcgcccgggacagcctgcccccctacagctggcactacgccccctggaccaagtgcagcgcccagtgtgccggcggcagccaggtgcaggccgtggagtgcaggaaccagctggacagcagcgctgtggccccccactactgcagcgcccacagcaagctgcccaagaggcagagggcctgcaacacagagccctgccccccagactgggtggtgggcaactggagcctgtgcagccgcagctgtgatgctggggtgcgcagccgctctgtggtgtgccagaggagagtgtctgctgctgaggagaaggccctggatgacagcgcctgcccccagcccaggcctcctgtgctggaggcctgccacggccccacctgccccccagagtgggccgccctggactggagcgaggtgtcccggcccctgcccagccggcccctgggctgccctgggggcgtgtccacagagacccccctgcggggcctgcaggtgtcctgccccctgctgaccagccactggggcagcaccctgagcaccaagaggcccttccagctgcagtgcacccccagctgtggccctggcctgcggcaccgggtggtgctgtgcaagtctgctgaccaccgggccaccctgcccccagcccactgcagccctgctgccaagcccccagccaccatgcgctgcaacctgcggcgctgccccccagcccgctgggtggccggggagtggggagaatgttctgcccagtgtggggtgggccagaggcagaggtctgtgcgctgcaccagccacacaggccaggccagccatgaatgtacagaggcctag

SEQ ID NO: 320938 - DNA, 2544 bp, Artificial Sequence
  derived and/or modified sequence
caggacgacggcggcctgagccgggcccccggctgcggcgccgtgtgccctggtcatcacgagcactgtcaggttgctaaactgtttcaggatagcagccttgggtccaccgttaatatcctggtgacccggctgatattgctgaccgaggatcaaccaaccttggagatcacccatcacgcagggaaaagcctagattccttttgcaaatggcagaagtctattgttaaccatagtgggcatgggaacgcaataccagagaatggtgtggccaaccatgacacggctgtgctcattaccaggtatgacatctgcatatataagaacaaaccgtgtggaactctggggctcgcccccgtggggggaatgtgtgaacgggaacgctcatgctccgtcaacgaggatatagggctggccacggctttcaccatagcgcatgagattggccacacattcggcatgaaccatgatggcgtgggcaacagctgtggggcgcggggacaagatcccgctaagttgatggcggctcacataacgatgaaaaccaacccttttgtatggagttcctgtagcagagactatatcacatccttcttagacagtggccttgggctgtgcctgaacaatagaccccctaggcaggattttgtttaccctacagtagcaccagggcaggcatacgacgccgacgaacaatgccggtttcaacacggcgtgaaaagccggcaatgtaaatatggagaggtctgtagcgagctttggtgcttaagcaagagcaaccgttgcatcactaattcgatcccagcagccgaaggtacactgtgccagacacacactattgacaagggatggtgctacaagagggtatgtgttcctttcggaagccgccctgagggagttgacggcgcatgggggccctggactccttggggtgactgctccaggacttgcgggggcggagtgtcgagtagctcccgccactgcgactccccccgaccaacaatcgggggaaagtattgtctaggcgagcggagaaggcaccgttcctgtaatacggacgactgtccaccaggctcccaggacttccgcgaagtacagtgctccgagtttgattcgattcccttcaggggaaaattctacaaatggaaaacttaccgaggggggggagtgaaggcatgtagccttacttgtcttgccgagggctttaatttttataccgaacgggccgccgccgtggtcgacggcaccccctgtaggcccgatacggtggatatctgtgtctcgggagaatgtaagcatgtaggctgtgaccgagtattggggtctgacctccgtgaggacaaatgccgggtgtgcgggggggatggatctgcgtgtgagaccattgaaggagtgtttagcccggcgtcccccggcgctggatacgaagatgttgtgtggattcctaaaggatccgtgcatatttttatccaagatctgaacttgtctcttagtcacctggctttaaaaggggaccaggagtctctgctgctggagggcctgcccgggactccccagccccaccggctcccccttgcggggacgacttttcagctgcgccaggggccggaccaggtccaatcccttgaggcactcggccccattaacgcctcacttatcgtgatggtactggcccgcactgagcttcctgccctgcggtatcgtttcaacgctccgattgcgcgcgactcccttcccccttactcttggcattacgctccctggactaagtgctcagctcagtgtgctggcggctcacaggtccaggccgtggagtgccgcaatcagctagattcatccgcagtggctcctcactattgctctgcgcacagcaagcttccaaagagacagcgggcctgcaataccgagccatgcccgcctgattgggttgtaggcaattggtctctttgtagtcgctcttgcgatgctggtgtccgctcccgcagtgtggtctgtcagaggcgcgtgtccgccgccgaggaaaaggcattggacgacagcgcttgcccacagcccaggccccctgtgctggaggcctgtcatggcccgacctgtcctcctgagtgggctgccctggactggagcgaggtgagcagacccctcccatcacgtcccctgggctgtcccggcggtgtgtctaccgagactccactgcggggccttcaggtgtcttgtcccctcttgacatctcactgggggtccactctttccacaaaaaggccttttcagctacagtgcactccatcctgcggacccgggctgcggcatagagttgttttatgtaagtctgctgaccaccgtgcaactttgccaccggctcattgcagccccgccgctaagcctccagctaccatgaggtgtaacctgcggagatgcccgcctgccaggtgggtggccggagagtggggtgagtgcagtgcccagtgtggggtgggccaacgccagcggtcggtccgctgcacctcccacactggccaggccagtcacgaatgcaccgaggcttag

SEQ ID NO: 320939 - DNA, 2544 bp, Artificial Sequence
  derived and/or modified sequence
caagacgatggcggtctatctcgggcacccggatgcggagctgtctgtcccggacaccacgagcattgtcaggtggcgaagctattccaggacagctctttagggagcactgtgaatatactcgtgacacggttgattttactcacggaagatcagcctactctcgagatcactcaccatgcgggaaaatccctggattctttttgtaagtggcagaaaagcatcgtgaatcattccggtcatgggaacgcaattcccgagaacggggtggccaaccacgacactgccgtgctgattacacgatatgacatttgtatttacaaaaataagccttgcgggacattgggcctcgcccctgtaggcggaatgtgcgagcgagagcgatcatgctctgtgaacgaggacattggattggcaacagcctttactattgcccatgagatcggccatacattcggcatgaaccatgacggagtgggtaactcgtgtggcgcaaggggtcaggatcccgctaaactgatggcagcccacattactatgaagaccaacccctttgtctggtctagctgttccagagactacataacctctttcctcgatagcggactcggcctgtgtctgaacaacaggccacctcgccaggactttgtgtatcccaccgtggctcccggtcaggcctatgacgccgacgagcagtgccgtttccagcatggcgttaagtccaggcagtgcaaatatggagaagtgtgcagcgagctgtggtgcctcagcaaaagtaacaggtgtattacgaacagtattcctgctgcggagggcactttatgccaaacacacaccattgataagggatggtgctataagagggtctgcgtcccttttgggtccaggccagaaggagtggatggcgcatgggggccatggacaccgtggggtgattgcagtaggacatgcggcggaggcgtgtcatcaagtagccgccactgcgatagcccacgccctaccattgggggtaagtactgtctgggagagcggaggcgccacaggtcttgcaatactgatgactgcccacctggctcacaggatttcagggaagtccagtgttccgagttcgattccataccttttcgcggtaagttttataaatggaaaacatatcgcggaggcggtgtgaaggcctgttcactcacgtgcctggcagaaggatttaatttctacaccgaaagagccgcagcagtggtggatggcacgccttgccggccagacactgtagacatttgcgtaagcggtgagtgcaagcatgtgggttgtgatagagtcctgggttccgatttgcgagaggataagtgtagggtgtgtgggggtgacggtagcgcctgcgagaccattgaaggtgtattctcccccgcttcaccgggagctggttacgaggatgtcgtgtggatcccaaaaggctcggttcacatcttcatccaggacttaaatctgtccctgtcccacctcgccctcaagggtgatcaggagtctttactgctggaggggctccccggtaccccccagccacatcgactgcccctggccggtacaactttccagttgcgccagggcccagatcaggtgcagtcgttggaggctttgggccctatcaacgcttctctcattgtaatggtgctggctaggactgaactgccagccctacgctaccggtttaatgccccaatcgctagggatagcctgcccccttacagctggcattacgcgccttggactaaatgcagcgctcaatgcgcaggtgggtcacaagtgcaggctgtagagtgtaggaaccagctcgattcgagtgccgttgcaccacattactgttccgctcactcaaaattaccgaagagacaaagagcttgtaataccgaaccatgcccgcctgattgggtggttggcaattggtcactatgctctaggagctgcgatgctggtgtccgctccagaagcgttgtgtgccagagacgtgtgtctgcagcagaggagaaggcattggacgacagcgcctgcccccagccaaggccaccagtgcttgaagcctgccacggccctacatgcccgcctgaatgggctgctctggactggtccgaggtgtcacgacccctgccttctaggcccttaggatgccctggaggggttagtacagaaacaccattacgcggtctgcaagtgagctgtccacttctgaccagtcactgggggagtaccctctcaacaaagcgaccattccagctgcagtgcactccgtcttgcggccctggacttagacatagagtggtcctgtgcaagtcagcagatcaccgtgctaccctgcctcctgcccattgtagccccgcagccaagcctccagcaaccatgcgttgtaaccttagaaggtgccctccagctagatgggtcgcgggagagtggggggaatgttccgcacagtgcggagttggccagcgtcagaggtccgtgcgttgcacttctcacaccggccaggccagtcatgaatgtacagaggcctag

SEQ ID NO: 320940 - DNA, 2544 bp, Artificial Sequence
  derived and/or modified sequence
caggacgacggcggcctgagcagagcccccggctgcggcgccgtgtgccccggccaccacgagcactgccaggtggccaagctgttccaggacagcagcctgggcagcaccgtgaacatcctggtgaccagactgatcctgctgaccgaggaccagcccaccctggagatcacccaccacgccggcaagagcctggacagcttctgcaagtggcagaagagcatcgtgaaccacagcggccacggcaacgccatccccgagaacggcgtggccaaccacgacaccgccgtgctgatcaccagatacgacatctgcatctacaagaacaagccctgcggcaccctgggcctggcccccgtgggcggcatgtgcgagagagagagaagctgcagcgtgaacgaggacatcggcctggccaccgccttcaccatcgcccacgagatcggccacaccttcggcatgaaccacgacggcgtgggcaacagctgcggcgccagaggccaggaccccgccaagctgatggccgcccacatcaccatgaagaccaaccccttcgtgtggagcagctgcagcagagactacatcaccagcttcctggacagcggcctgggcctgtgcctgaacaacagaccccccagacaggacttcgtgtaccccaccgtggcccccggccaggcctacgacgccgacgagcagtgcagattccagcacggcgtgaagagcagacagtgcaagtacggcgaggtgtgcagcgagctgtggtgcctgagcaagagcaacagatgcatcaccaacagcatccccgccgccgagggcaccctgtgccagacccacaccatcgacaagggctggtgctacaagagagtgtgcgtgcccttcggcagcagacccgagggcgtggacggcgcctggggcccctggaccccctggggcgactgcagcagaacctgcggcggcggcgtgagcagcagcagcagacactgcgacagccccagacccaccatcggcggcaagtactgcctgggcgagagaagaagacacagaagctgcaacaccgacgactgcccccccggcagccaggacttcagagaggtgcagtgcagcgagttcgacagcatccccttcagaggcaagttctacaagtggaagacctacagaggcggcggcgtgaaggcctgcagcctgacctgcctggccgagggcttcaacttctacaccgagagagccgccgccgtggtggacggcaccccctgcagacccgacaccgtggacatctgcgtgagcggcgagtgcaagcacgtgggctgcgacagagtgctgggcagcgacctgagagaggacaagtgcagagtgtgcggcggcgacggcagcgcctgcgagaccatcgagggcgtgttcagccccgccagccccggcgccggctacgaggacgtggtgtggatccccaagggcagcgtgcacatcttcatccaggacctgaacctgagcctgagccacctggccctgaagggcgaccaggagagcctgctgctggagggcctgcccggcaccccccagccccacagactgcccctggccggcaccaccttccagctgagacagggccccgaccaggtgcagagcctggaggccctgggccccatcaacgccagcctgatcgtgatggtgctggccagaaccgagctgcccgccctgagatacagattcaacgcccccatcgccagagacagcctgcccccctacagctggcactacgccccctggaccaagtgcagcgcccagtgcgccggcggcagccaggtgcaggccgtggagtgcagaaaccagctggacagcagcgccgtggccccccactactgcagcgcccacagcaagctgcccaagagacagagagcctgcaacaccgagccctgcccccccgactgggtggtgggcaactggagcctgtgcagcagaagctgcgacgccggcgtgagaagcagaagcgtggtgtgccagagaagagtgagcgccgccgaggagaaggccctggacgacagcgcctgcccccagcccagaccccccgtgctggaggcctgccacggccccacctgcccccccgagtgggccgccctggactggagcgaggtgagcagacccctgcccagcagacccctgggctgccccggcggcgtgagcaccgagacccccctgagaggcctgcaggtgagctgccccctgctgaccagccactggggcagcaccctgagcaccaagagacccttccagctgcagtgcacccccagctgcggccccggcctgagacacagagtggtgctgtgcaagagcgccgaccacagagccaccctgccccccgcccactgcagccccgccgccaagccccccgccaccatgagatgcaacctgagaagatgcccccccgccagatgggtggccggcgagtggggcgagtgcagcgcccagtgcggcgtgggccagagacagagaagcgtgagatgcaccagccacaccggccaggccagccacgagtgcaccgaggcctag

SEQ ID NO: 320941 - DNA, 4346 bp, Artificial Sequence
  derived and/or modified sequence
gacccctccctgcccaggctccaaagaagaagaaaccaaggcccagagagggaggcccaggtgcagggagcaggcgagggaaggatccgtacaggggcccaacactactccaccaaccgaagcccccaaaaggagcccggtgatgctgcgaaggctgtgaacaggggaggcggcactgtgggggctgccggcagccggggctggggagagacatgtggacacgtggcctctatggctcccgcctgccagatcctccgctgggccctcgccctggggctgggcctcatgttcgaggtcacgcacgccttccggtctcaagatgagttcctgtccagtctggagagctatgagatcgccttccccacccgcgtggaccacaacggggcactgctggccttctcgccacctcctccccggaggcagcgccgcggcacgggggccacagccgagtcccgcctcttctacaaagtggcctcgcccagcacccacttcctgctgaacctgacccgcagctcccgtctactggcagggcacgtctccgtggagtactggacacgggagggcctggcctggcagagggcggcccggccccactgcctctacgctggtcacctgcagggccaggccagcacctcccatgtggccatcagcacctgtggaggcctgcacggcctgatcgtggcagacgaggaagagtacctgattgagcccctgcacggtgggcccaagggttctcggagcccggaggaaagtggaccacatgtggtgtacaagcgttcctctctgcgtcacccccacctggacacagcctgtggagtgagagatgagaaaccgtggaaagggcggccatggtggctgcggaccttgaagccaccgcctgccaggcccctggggaatgaaacagagcgtggccagccaggcctgaagcgatcggtcagccgagagcgctacgtggagaccctggtggtggctgacaagatgatggtggcctatcacgggcgccgggatgtggagcagtatgtcctggccatcatgaacattgtcaggttgccaaacttttccaggactcgagtctgggaagcaccgttaacatcctcgtaactcgcctcatcctgctcacggaggaccagcccactctggagatcacccaccatgccgggaagtccctggacagcttctgtaagtggcagaaatccatcgtgaaccacagcggccatggcaatgccattccagagaacggtgtggctaaccatgacacagcagtgctcatcacacgctatgacatctgcatctacaagaacaaaccctgcggcacactaggcctggccccggtgggcggaatgtgtgagcgcgagagaagctgcagcgtcaatgaggacattggcctggccacagcgttcaccattgcccacgagatcgggcacacattcggcatgaaccatgacggcgtgggaaacagctgtggggcccgtggtcaggacccagccaagctcatggctgcccacattaccatgaagaccaacccattcgtgtggtcatcctgcagccgtgactacatcaccagctttctagactcgggcctggggctctgcctgaacaaccggccccccagacaggactttgtgtacccgacagtggcaccgggccaagcctacgatgcagatgagcaatgccgctttcagcatggagtcaaatcgcgtcagtgtaaatacggggaggtctgcagcgagctgtggtgtctgagcaagagcaaccggtgcatcaccaacagcatcccggccgccgagggcacgctgtgccagacgcacaccatcgacaaggggtggtgctacaaacgggtctgtgtcccctttgggtcgcgcccagagggtgtggacggagcctgggggccgtggactccatggggcgactgcagccggacctgtggcggcggcgtgtcctcttctagccgtcactgcgacagccccaggccaaccatcgggggcaagtactgtctgggtgagagaaggcggcaccgctcctgcaacacggatgactgtccccctggctcccaggacttcagagaagtgcagtgttctgaatttgacagcatccctttccgtgggaaattctacaagtggaaaacgtaccggggagggggcgtgaaggcctgctcgctcacgtgcctagcggaaggcttcaacttctacacggagagggcggcagccgtggtggacgggacaccctgccgtccagacacggtggacatttgcgtcagtggcgaatgcaagcacgtgggctgcgaccgagtcctgggctccgacctgcgggaggacaagtgccgagtgtgtggcggtgacggcagtgcctgcgagaccatcgagggcgtcttcagcccagcctcacctggggccgggtacgaggatgtcgtctggattcccaaaggctccgtccacatcttcatccaggatctgaacctctctctcagtcacttggccctgaagggagaccaggagtccctgctgctggaggggctgcctgggaccccccagccccaccgtctgcctctagctgggaccacctttcaactgcgacaggggccagaccaggtccagagcctcgaagccctgggaccgattaatgcatctctcatcgtcatggtgctggcccggaccgagctgcctgccctccgctaccgcttcaatgcccccatcgcccgtgactcgctgcccccctactcctggcactatgcgccctggaccaagtgctcggcccagtgtgcaggcggtagccaggtgcaggcggtggagtgccgcaaccagctggacagctccgcggtcgccccccactactgcagtgcccacagcaagctgcccaaaaggcagcgcgcctgcaacacggagccttgccctccagactgggttgtagggaactggtcgctctgcagccgcagctgcgatgcaggcgtgcgcagccgctcggtcgtgtgccagcgccgcgtctctgccgcggaggagaaggcgctggacgacagcgcatgcccgcagccgcgcccacctgtactggaggcctgccacggccccacttgccctccggagtgggcggccctcgactggtctgaggtcagccgcccccttccttcgcgcccactgggatgcccaggtggggtgtccacggagacgcctctgcgcggtctccaggttagctgtcccctcctcacttcgcactggggcagcaccctgagcacgaaacgccccttccaactgcagtgcacccccagctgcgggccgggcctccgccaccgcgtggtcctttgcaagagcgcagaccaccgcgccacgctgcccccggcgcactgctcacccgccgccaagccaccggccaccatgcgctgcaacttgcgccgctgccccccggcccgctgggtggctggcgagtggggtgagtgctctgcacagtgcggcgtcgggcagcggcagcgctcggtgcgctgcaccagccacacgggccaggcgtcgcacgagtgcacggaggccctgcggccgcccaccacgcagcagtgtgaggccaagtgcgacagcccaacccccggggacggccctgaagagtgcaaggatgtgaacaaggtcgcctactgccccctggtgctcaaatttcagttctgcagccgagcctacttccgccagatgtgctgcaaaacctgccatggccactagggggcgcgcggcacccggagccacagctggcggggtctccgccgccagccctgcagcgggccggccagagggggccccgggggggcgggaactgggagggaagggtgagacggagccggaagttatttattgggaacccctgcagggccctggctggggggatggagaggggctggctatccccccagagcccctcttcagcatccgccccttccagttcacatagtgagaccccccctccagggtgggtctggggaggggacagctgttcaccccagcaccctttgaacccacccttagggagtccccaacactccccccctcctttgatcggaatatgtactgtgaagagtaggggtggggaggtggtctgccggtgccctgccccccagcactgccctacccctccactccgagctgggggggaatctgtgtctgctatgggaggggggggggtagcaccacctccctgacaccctcccctgacctgactagggggaggatccaccccaacctctgccctgcccgccccaggggcaccccgacatccaggccaccccctcatggtgctacagaccctgccctggggcccacacactcctgccaggaagccctacatcaataaagttctgtcttgtgtagatttctacg

SEQ ID NO: 320942 - protein, 60 aa, Artificial Sequence
  derived and/or modified sequence
MVANPSVICSHFAQDLWPEQNIKDSFQKVILRRYEKRGHGNLQLIKRCESTPSEKEKKKK

SEQ ID NO: 320943 - DNA, 843 bp, Artificial Sequence
  derived and/or modified sequence
caatttagagatgtggccatagaattctctctggaggagtggcattgcctggacactgcacagcggaatctatataggaatgtgatgttagagaactacagtaacctggtcttccttggtattgttgtctctaagccagacctgatcgcccatctggagcaaggaaaaaaacctttgactatgaagagacatgagatggtagccaacccctcagggccaggtgtggttgtggtgctcatgtgtaatcccaggattttgggaggtcaagccaagaggatccctggagcccaaaagtttgagaaccagcctgggcaacatatggagacccctctctatgaaaaaatttaataatagccaggcatggtggtgtgcagctgtggtcccagctacttgggagattgaagggagtcaaaattgtgccactacactccagcttgggtgacagagtgagaccctatctcaaaaaaaagcctgttcatttcagttatatgttctcattttgcccaagatctttggccagagcataacataaaagattctttccaaaaagtgatactgagaagatatgaaaaacgtggacatggaaatttacagttaataaaaaggtgtgaaagggtagatgagtgtaaggtgcacacaggaggttataatggacttaaccagagtagtacaactacccagagcaaagtatttcaatgtgataaatatgggaaagactttcataaattttcaaattcaaatagacataatataagacatactgaaaaaaaacctttcaaatgcatagaatgtggcaaagcttttaaccagttctcaacccttataacacataagaaaattcat

SEQ ID NO: 320944 - DNA, 183 bp, Artificial Sequence
  derived and/or modified sequence
atggtggccaaccccagcgtgatctgcagccacttcgcccaggacctgtggcccgagcagaacatcaaggacagcttccagaaggtgatcctgagaagatacgagaagagaggccacggcaacctgcagctgatcaagagatgcgagagcacccccagcgagaaggagaagaagaagaagtag

SEQ ID NO: 320945 - DNA, 183 bp, Artificial Sequence
  derived and/or modified sequence
atggttgccaatcctagtgtgatctgttcccatttcgcccaggacctgtggcccgaacagaacataaaggatagcttccagaaggttatcctgcggcggtacgaaaaaagagggcacggaaatctccagctgatcaagcggtgtgaatctacgccctctgaaaaggaaaaaaagaaaaaatag

SEQ ID NO: 320946 - DNA, 183 bp, Artificial Sequence
  derived and/or modified sequence
atggtggccaaccccagcgtcatctgcagccactttgcccaggacctgtggccagagcagaacatcaaggacagcttccagaaggtgatcctgcggcgctatgagaagaggggccacggcaacctgcagctgatcaagagatgtgagagcaccccatctgagaaggagaagaagaagaagtag

SEQ ID NO: 320947 - DNA, 183 bp, Artificial Sequence
  derived and/or modified sequence
atggtggccaaccccagcgtgatctgcagccacttcgcccaggacttatggcccgagcagaatatcaaagattcctttcagaaagtgatcctacgacgctacgaaaaacggggccatgggaatctccagctgattaaaagatgcgaatcaaccccctcggaaaaagagaaaaagaagaaatag

SEQ ID NO: 320948 - DNA, 183 bp, Artificial Sequence
  derived and/or modified sequence
atggttgccaatccttcagtgatctgtagtcatttcgctcaggatctatggccagagcaaaacatcaaggacagttttcaaaaggtgattctccgcagatacgagaagcgagggcacggaaatcttcagctcatcaaacgttgcgaatctacaccctctgaaaaagaaaagaagaaaaagtag

SEQ ID NO: 320949 - protein, 302 aa, Artificial Sequence
  derived and/or modified sequence
MVTEQEVDAIGQTLVDPKQPLQARFRALFTLRGLGGPGAIAWISQAFDDDSALLKHELAYCLGQMQDARAIPMLVDVLQDTRQEPMVRHEAGEALGAIGDPEVLEILKQYSSDPVIEVAETCQLAVRRLEWLQQHGGEPAAGPYLSVDPAPPAEERDVGRLREALLDESRPLFERYRAMFALRNAGGEEAALALAEGLHCGSALFRHEVGYVLGQLQHEAAVPQLAAALARCTENPMVRHECAEALGAIARPACLAALQAHADDPERVVRESCEVALDMYEHETGRAFQYADGLEQLRGAPS

SEQ ID NO: 320950 - DNA, 909 bp, Artificial Sequence
  derived and/or modified sequence
atggtgacggaacaggaggtggacgctataggacagacccttgttgaccctaaacagcctttacaggcaagattcagagctcttttcacgctgagaggcctcggcggtcccggcgccatcgcttggatctcccaggcttttgatgacgattcagcattgttaaaacacgaacttgcatactgcctggggcagatgcaggacgctcgcgcaatcccaatgctggttgatgttttgcaggacactcggcaggagccaatggtgcggcatgaggctggtgaggctctgggcgccatcggggaccctgaagtcttagaaatcttgaagcaatacagtagtgaccctgtgatcgaagttgcagagacctgtcagctcgccgttagaagactggagtggctgcagcagcatggaggcgagcccgcagcaggcccatacctgtctgttgaccccgctccaccagcagaagagagagatgtcgggcgcctaagagaggccttactggatgagagtcgccctctgtttgaacggtatcgcgcaatgtttgcactccgaaacgctggaggggaagaagctgctcttgcccttgcagaaggactgcattgtggctccgctttattcagacatgaggtgggatacgttctgggtcagctccagcacgaggccgccgtcccacagctggccgccgcactggcccgttgtaccgagaatcctatggtgcggcatgagtgtgctgaggccctcggtgccatcgcccgtcccgcctgcctcgccgcactgcaggcccatgccgacgacccagaacgcgtggttcgggaaagctgtgaagtggctcttgacatgtacgagcacgagaccggcagggcattccagtacgccgatggtctggagcagctacgcggcgccccaagctag

SEQ ID NO: 320951 - DNA, 909 bp, Artificial Sequence
  derived and/or modified sequence
atggtgaccgagcaggaggtggatgctattggccagaccctggtcgatcctaaacaacccctacaagcccgctttcgggcgcttttcaccctgcggggactaggaggcccgggcgccatcgcctggataagtcaggcgttcgatgatgactcagcactcctgaaacatgagttagcatactgcctaggtcagatgcaggatgcgagagccattccgatgttggttgacgtactgcaggacacccgccaggaaccgatggtgagacacgaagcgggtgaggctctcggagctatcggagatcctgaagtgctggagattctgaaacagtattcttctgacccggtcattgaagtggccgagacctgccagctggctgtgagaaggcttgagtggctgcagcagcatggtggagaaccagccgcaggtccatacctgtcagtggaccccgccccccctgcagaggagcgagacgttgggagactgcgggaagctttgttggacgagagccggcctctctttgagcgttaccgagccatgttcgcccttcgtaacgcagggggagaggaagctgcccttgcccttgcggaggggctgcactgcgggagcgctctttttcgacatgaggtcggatatgttctggggcagttacagcatgaagcagcagtgccccagctggccgcagccctcgcacggtgcacagagaacccaatggtcagacacgaatgcgccgaggccctcggggctatagcaagaccagcttgtctggccgccttacaagcgcatgcggatgaccccgagcgcgtggtgcgtgaaagttgtgaagtggccctcgatatgtatgagcacgagaccggccgggcgtttcagtacgcagatgggctagagcagttgaggggcgcccccagttag

SEQ ID NO: 320952 - DNA, 909 bp, Artificial Sequence
  derived and/or modified sequence
atggtgacagagcaggaggtggatgccatcggccagaccctggtggaccccaagcagcccctgcaggcccgcttccgggccctcttcaccctgcggggcctgggcggccctggggccatcgcctggatcagccaggcctttgatgatgattctgccctgctgaagcatgagctggcctactgcctgggccagatgcaggatgcccgggccatccccatgctggtggatgtgctgcaggacacccggcaggagcccatggtgagacatgaagctggggaggccctgggcgccatcggggaccctgaggtgctggagatcctgaagcagtacagcagtgaccccgtcatcgaggtggccgagacctgccagctggccgtgcggcggctggagtggctgcagcagcacggcggggagcctgctgctggcccctacctgtctgtggaccctgcccctcctgctgaggagagagatgtgggccgcctgcgggaggccctgctggatgagagccggcccctgtttgagcgctaccgggccatgtttgccctgagaaatgccggcggggaggaggccgccctggccctggccgagggcctgcactgcggcagcgccctcttcagacatgaggtgggctacgtgctgggccagctgcagcacgaggccgctgtgccccagctggccgccgccctggcccgctgcacagagaaccccatggtgagacatgaatgtgccgaggccctgggcgccatcgcccggcctgcctgcctggccgccctgcaggcccacgcagatgatcctgagcgggtggtgcgggagagctgtgaggtggccctggacatgtatgagcacgagaccggccgggccttccagtatgcagatggcctggagcagctgcggggggcccccagctag

SEQ ID NO: 320953 - DNA, 909 bp, Artificial Sequence
  derived and/or modified sequence
atggtgaccgagcaggaggtggacgccatcggccagaccctggtggacccaaagcagcccttgcaagctcgcttcagagccctgttcacactcaggggccttgggggccctggtgccatcgcgtggatctctcaagcttttgacgacgactctgccttactcaaacatgaactggcctattgtcttggacagatgcaggatgcaagagccatccctatgctggtggatgtgttacaggatacccgacaagagcccatggtcagacatgaagcgggggaggccctaggcgcaatcggagatcctgaagtgttagaaattctcaaacagtacagcagcgatccagtcatagaggtagcagaaacatgtcaactggccgtgaggaggctcgaatggctacaacagcacggcggtgaaccagccgcaggaccatatctcagcgtggatcccgccccccccgccgaggagagggacgtgggccgattgcgcgaagcactcctcgacgagagccggccgctcttcgagcgctaccgcgcaatgtttgcccttagaaatgctggaggcgaagaggcagcactggcgctggccgagggactacactgtgggagtgctttgttcagacacgaggtcggctacgtgttaggccaattgcagcacgaagctgcggtcccgcagctggctgccgctctggcacgatgcacagaaaaccccatggtgagacacgaatgtgccgaggctctgggagctattgcacggcctgcctgtctcgctgctctgcaagcacacgccgacgaccctgaacgcgtagtgagagagtcttgcgaagtagctctggatatgtacgagcacgagacaggacgcgcgtttcagtacgccgacgggttggagcagcttaggggcgctccctcttag

SEQ ID NO: 320954 - DNA, 909 bp, Artificial Sequence
  derived and/or modified sequence
atggtgaccgagcaggaggtggacgccatcggccagaccctggtggatcccaagcagccactacaggctaggtttcgggcactgttcactctgagaggattaggtggccctggcgctatcgcatggatcagccaggccttcgacgatgactcagccctgcttaagcacgagctcgcctattgtctaggccaaatgcaggatgcacgggctatacctatgctggtagatgtacttcaggacacacgccaggaaccaatggtcaggcatgaagcaggcgaggcccttggcgccattggcgatcccgaggttctagagattttgaagcagtattcatcagatcccgtcatcgaagtggccgagacctgccagctggccgtcagacgattggaatggcttcagcaacacggcggcgaaccagccgctggtccgtacctgtcagtcgatccagcccccccagcggaagagagagacgttggccgtctgcgtgaagcgctcctggacgaaagccggcctctgttcgagaggtatcgtgccatgtttgctctgcgaaacgccggtggcgaggaagccgccctggccctggctgagggattacactgtggcagcgctttatttcggcatgaggttggctacgtgttaggccagttgcaacacgaggccgccgtcccacagcttgctgccgcgctggcccgctgcaccgagaatcctatggtgagacacgagtgtgctgaggcactcggcgccattgcacgcccggcttgtttggctgccctccaagctcacgccgatgatccagaacgggtcgtaagagaatcttgcgaggttgctcttgatatgtatgagcatgaaactggacgggcttttcaatatgccgacggattggagcaactgcggggggctcccagctag

SEQ ID NO: 320955 - DNA, 909 bp, Artificial Sequence
  derived and/or modified sequence
atggtgaccgaacaggaggtcgacgccatcgggcaaactctggtggacccgaagcaaccattgcaggcacggttccgagccttgttcacattgagagggctgggcggaccaggcgctattgcgtggatttcccaggcgttcgacgacgacagcgctttgctcaaacacgaattggcctattgccttggtcagatgcaggacgcaagggccattcccatgcttgtggatgtgttgcaggatacaaggcaggagcccatggtcaggcacgaggctggagaggccctgggggcaattggagacccagaggttctcgagatcctgaaacagtactcctccgatccagtgatagaggttgcagagacctgccaactcgccgtcaggaggctcgaatggctgcagcaacatgggggagaaccggctgccggaccttatctctccgtcgaccctgcacccccagccgaagagcgcgatgtcggtcgccttagagaggcgttgcttgatgagtctcggcctctgtttgaacggtatcgcgctatgttcgctctgcgaaacgccggaggtgaggaagccgcattagcactcgccgaaggattgcactgcgggagcgcattgttccgtcacgaggttggctacgtgctggggcagctacagcacgaagctgccgtaccccagctggcggctgccctggcacgatgcacagagaatcctatggttcgacacgagtgcgcagaagccctcggcgcaatcgcacgtcctgcctgtctcgcggctttacaggctcatgctgacgatcccgagcgggtagtcagagagagctgcgaagtcgccctcgatatgtatgaacatgaaacagggagggcatttcagtacgcagatgggttagaacagttacgcggtgccccatcttag

SEQ ID NO: 320956 - DNA, 909 bp, Artificial Sequence
  derived and/or modified sequence
atggtcacagagcaggaggtggacgccataggacaaacattggtggatcctaagcagcccctgcaagctaggtttagggccctgttcacacttcgagggcttggtggacccggagccatcgcctggatatctcaagcctttgacgacgactctgctcttctcaagcacgagctggcctattgtctgggtcagatgcaggacgccagggcgatccctatgcttgtggatgttctgcaagatacgagacaggagccaatggtacgccatgaagccggagaagcactcggcgctataggggatccagaggtgctggagatcctgaaacagtactcgtccgaccccgtgattgaggtcgctgagacttgccagctggctgtccggagactggagtggttgcagcagcacggcggagaacccgctgctggcccatacctgagcgttgacccggcaccacctgccgaggagcgggacgtggggcgactgagagaagcccttctggatgaaagccgccctctgtttgaacgatacagggcaatgttcgccctccggaacgccggtggtgaggaagctgcacttgctctggcagaaggactacattgtggaagcgctctgtttcgccatgaggtgggatatgtcctggggcaacttcagcacgaggccgcagtgcctcagttggcagctgctctggcccgttgcaccgagaaccctatggtgcgccatgagtgcgccgaagcacttggagctatcgccagacctgcctgcttggcagctctgcaggcacacgccgatgaccccgaaagagtggtgcgcgaatcatgtgaggtggccctggacatgtacgaacatgaaacaggtcgcgcttttcagtatgctgacgggcttgagcaacttaggggcgctccaagctag

SEQ ID NO: 320957 - DNA, 1742 bp, Artificial Sequence
  derived and/or modified sequence
ggtggtggcagaggcgcctgcggttactggccgggccgacgggtcctgagtctccagagctcggtgaggcgtcccggaggcggcgatcacggttcttacatccccgcgtccccaggtttagcctgagcagggttgtggaaggccgggacccattgacagcacgatggtgacggagcaggaggtggatgccatcgggcagacgctggtggaccccaagcagcccctgcaggcccgcttccgggcgctgttcacgctgcgtgggctcggcggcccaggcgccattgcatggatcagccaggccttcgatgacgattccgccctgctcaagcacgagctggcctactgcctgggccagatgcaggatgcccgcgccatccccatgctggtggacgtgctgcaagacacccgtcaggagcccatggtgcgccatgaggcaggggaggccctgggggccatcggggacccggaagttctggagatcctgaagcagtattcctcggaccccgtcatcgaggtggccgagacctgccagctggccgtgcgcaggctggagtggctgcagcagcacggcggggagccggcggcgggaccctacctctccgtggaccctgccccgccggctgaggagcgtgacgtggggcgcctgcgggaggcgctgctggatgagtcccggccgctcttcgagcgataccgcgccatgttcgccctgcgcaacgcgggaggcgaggaggccgccctggcgctggccgagggtctgcactgtgggagcgccctcttccgccacgaggtcggctacgtcctgggacagctgcagcacgaggcggcggtgccccagctggcggccgccctggcccgatgcaccgagaaccccatggtgcggcacgagtgcgcggaggccctgggcgccattgcccggcccgcctgcctggccgcgctgcaggctcacgcggacgacccagagcgcgtggtgcgtgagagctgcgaggtggctctggacatgtatgagcacgagaccgggcgggccttccagtacgcggacggcctggagcagctgcgcggggccccctcctagggccccaccctcacccggagctcccggaggactcttgagggccgctcctcccccgcagagctttggcgtctaaaccgggtgtgtgtaaatcggtgtcatcgcttgtgtcttgctgggcgcatggttgctgtccccctcctccgtctgggaccgaggagctgccgttgtgctgtgactccctgagtcccctgactgctcctcggggcctggcgcagggctgtagcgtggaagtttccaggcttggggtgggactctgcgggaggctctgggatgcccggctcaggacaggggaggattgcgagggaagccaggggaggatcgcgagggaagccaggggaggatcgcgagggaagccaggggaggatcgcgagggaagccaggggaggatcgcgagggaagccaagggaggatcgcgaggggagccaggggaggatcgcgagggaagccaggggcagagctggggctctgggaagaggctgacgttatggtggcttcagcttcactaggaatgggacacagggtctgggggcctctgactcccccaccccgaggcctgggtagggacagggtggtggtccctgagtgggtcaggtagggcacaggggccagggagggacaagcagacctcagagcgctgcccagatggaatattaaattatttttgccaagc

SEQ ID NO: 320958 - DNA, 2031 bp, Artificial Sequence
  derived and/or modified sequence
agccagcccaggcagggcgctgaatcggcacaaaccagtctcacttcttgtaccgcagtggggaggttggagagaattttttcccatgaaagggcatacgttgcccgtccccttccccgaagaacgcactaggaatactgttcctgcgtttgcatgagctgtggcaccagcaccgactcagccttccgggcctccctcatgcacggagcctctcactaggtctcacccgcggctgcgttggtgccgtccggcacggtcacgtgggcgagaaaatggcggcccccagaccgcactgcgggcgtcgcggcaggtgaagcggtggtggcagaggcgcctgcggttactggccgggccgacgggtcctgagtctccagagctcggttcttacatccccgcgtccccaggtttagcctgagcagggttgtggaaggccgggacccattgacagcacgatggtgacggagcaggaggtggatgccatcgggcagacgctggtggaccccaagcagcccctgcaggcccgcttccgggcgctgttcacgctgcgtgggctcggcggcccaggcgccattgcatggatcagccaggccttcgatgacgattccgccctgctcaagcacgagctggcctactgcctgggccagatgcaggatgcccgcgccatccccatgctggtggacgtgctgcaagacacccgtcaggagcccatggtgcgccatgaggcaggggaggccctgggggccatcggggacccggaagttctggagatcctgaagcagtattcctcggaccccgtcatcgaggtggccgagacctgccagctggccgtgcgcaggctggagtggctgcagcagcacggcggggagccggcggcgggaccctacctctccgtggaccctgccccgccggctgaggagcgtgacgtggggcgcctgcgggaggcgctgctggatgagtcccggccgctcttcgagcgataccgcgccatgttcgccctgcgcaacgcgggaggcgaggaggccgccctggcgctggccgagggtctgcactgtgggagcgccctcttccgccacgaggtcggctacgtcctgggacagctgcagcacgaggcggcggtgccccagctggcggccgccctggcccgatgcaccgagaaccccatggtgcggcacgagtgcgcggaggccctgggcgccattgcccggcccgcctgcctggccgcgctgcaggctcacgcggacgacccagagcgcgtggtgcgtgagagctgcgaggtggctctggacatgtatgagcacgagaccgggcgggccttccagtacgcggacggcctggagcagctgcgcggggccccctcctagggccccaccctcacccggagctcccggaggactcttgagggccgctcctcccccgcagagctttggcgtctaaaccgggtgtgtgtaaatcggtgtcatcgcttgtgtcttgctgggcgcatggttgctgtccccctcctccgtctgggaccgaggagctgccgttgtgctgtgactccctgagtcccctgactgctcctcggggcctggcgcagggctgtagcgtggaagtttccaggcttggggtgggactctgcgggaggctctgggatgcccggctcaggacaggggaggattgcgagggaagccaggggaggatcgcgagggaagccaggggaggatcgcgagggaagccaggggaggatcgcgagggaagccaggggaggatcgcgagggaagccaagggaggatcgcgaggggagccaggggaggatcgcgagggaagccaggggcagagctggggctctgggaagaggctgacgttatggtggcttcagcttcactaggaatgggacacagggtctgggggcctctgactcccccaccccgaggcctgggtagggacagggtggtggtccctgagtgggtcaggtagggcacaggggccagggagggacaagcagacctcagagcgctgcccagatggaatattaaattatttttgccaagc

SEQ ID NO: 320959 - DNA, 909 bp, Artificial Sequence
  derived and/or modified sequence
atggtgaccgagcaggaggtggacgccatcggccagaccctggtggaccccaagcagcccctgcaggccagattcagagccctgttcaccctgagaggcctgggcggccccggcgccatcgcctggatcagccaggccttcgacgacgacagcgccctgctgaagcacgagctggcctactgcctgggccagatgcaggacgccagagccatccccatgctggtggacgtgctgcaggacaccagacaggagcccatggtgagacacgaggccggcgaggccctgggcgccatcggcgaccccgaggtgctggagatcctgaagcagtacagcagcgaccccgtgatcgaggtggccgagacctgccagctggccgtgagaagactggagtggctgcagcagcacggcggcgagcccgccgccggcccctacctgagcgtggaccccgccccccccgccgaggagagagacgtgggcagactgagagaggccctgctggacgagagcagacccctgttcgagagatacagagccatgttcgccctgagaaacgccggcggcgaggaggccgccctggccctggccgagggcctgcactgcggcagcgccctgttcagacacgaggtgggctacgtgctgggccagctgcagcacgaggccgccgtgccccagctggccgccgccctggccagatgcaccgagaaccccatggtgagacacgagtgcgccgaggccctgggcgccatcgccagacccgcctgcctggccgccctgcaggcccacgccgacgaccccgagagagtggtgagagagagctgcgaggtggccctggacatgtacgagcacgagaccggcagagccttccagtacgccgacggcctggagcagctgagaggcgcccccagctag

SEQ ID NO: 320960 - protein, 470 aa, Artificial Sequence
  derived and/or modified sequence
MGKPWLRALQLLLLLGASWARAGAPRCTYTFVLPPQKFTGAVCWSGPASTRATPEAANASELAALRMRVGRHEELLRELQRLAAADGAVAGEVRALRKESRGLSARLGQLRAQLQHEAGPGAGPGADLGAEPAAALALLGERVLNASAEAQRAAARFHQLDVKFRELAQLVTQQSSLIARLERLCPGGAGGQQQVLPPPPLVPVVPVRLVGSTSDTSRMLDPAPEPQRDQTQRQQEPMASPMPAGHPAVPTKPVGPWQDCAEARQAGHEQSGVYELRVGRHVVSVWCEQQLEGGGWTVIQRRQDGSVNFFTTWQHYKAGFGRPDGEYWLGLEPVYQLTSRGDHELLVLLEDWGGRGARAHYDGFSLEPESDHYRLRLGQYHGDAGDSLSWHNDKPFSTVDRDRDSYSGNCALYQRGGWWYHACAHSNLNGVWHHGGHYRSRYQDGVYWAEFRGGAYSLRKAAMLIRPLKL

SEQ ID NO: 320961 - DNA, 1857 bp, Artificial Sequence
  derived and/or modified sequence
gcatcccagctccactcccaggctctgggggctggggagtggttaccaagcctcctctctccttctgtcccactgccctctccccgtctctagctcagaggccccactggaccctcggctcttccttggacttcttgtgtgttctgtgagcttcgctggattcagggtcttgggcatcagaggtccgccgcgatggggaagccctggctgcgtgcgctacagctgctgctcctgctgggcgcgtcgtgggcgcgggcgggcgccccgcgctgcacctacaccttcgtgctgcccccgcagaagttcacgggcgctgtgtgctggagcggccccgcatccacgcgggcgacgcccgaggccgccaacgccagcgagctggcggcgctgcgcatgcgcgtcggccgccacgaggagctgttacgcgagctgcagaggctggcggcggccgacggcgccgtggccggcgaggtgcgcgcgctgcgcaaggagagccgcggcctgagcgcgcgcctgggccagttgcgcgcgcagctgcagcacgaggcggggcccggggcgggcccgggggcggatctgggggcggagcctgccgcggcgctggcgctgctcggggagcgcgtgctcaacgcgtccgccgaggctcagcgcgcagccgcccggttccaccagctggacgtcaagttccgcgagctggcgcagctcgtcacccagcagagcagtctcatcgcccgcctggagcgcctgtgcccgggaggcgcgggcgggcagcagcaggtcctgccgccacccccactggtgcctgtggttccggtccgtcttgtgggtagcaccagtgacaccagtaggatgctggacccagccccagagccccagagagaccagacccagagacagcaggagcccatggcttctcccatgcctgcaggtcaccctgcggtccccaccaagcctgtgggcccgtggcaggattgtgcagaggcccgccaggcaggccatgaacagagtggagtgtatgaactgcgagtgggccgtcacgtagtgtcagtatggtgtgagcagcaactggagggtggaggctggactgtgatccagcggaggcaagatggttcagtcaacttcttcactacctggcagcactataaggcgggctttgggcggccagacggagaatactggctgggccttgaacccgtgtatcagctgaccagccgtggggaccatgagctgctggttctcctggaggactgggggggccgtggagcacgtgcccactatgatggcttctccctggaacccgagagcgaccactaccgcctgcggcttggccagtaccatggtgatgctggagactctctttcctggcacaatgacaagcccttcagcaccgtggatagggaccgagactcctattctggtaactgtgccctgtaccagcggggaggctggtggtaccatgcctgtgcccactccaacctcaacggtgtgtggcaccacggcggccactaccgaagccgctaccaggatggtgtctactgggctgagtttcgtggtggggcatattctctcaggaaggccgccatgctcattcggcccctgaagctgtgactctgtgttcctctgtcccctaggccctagaggacattggtcagcaggagcccaagttgttctggccacaccttctttgtggctcagtgccaatgtgtcccacagaacttcccactgtggatctgtgaccctgggcgctgaaaatgggacccaggaatcccccccgtcaatatcttggcctcagatggctccccaaggtcattcatatctcggtttgagctcatatcttataataacacaaagtagccacag

SEQ ID NO: 320962 - protein, 732 aa, Artificial Sequence
  derived and/or modified sequence
MMADAKYVLCRWEKRLWPAKVLARTATSTKNKRRKEYFLAVQILSLEEKIKVKSTEVEILEKSQIEAIASSLASQNEVPAAPLEELAYRRSLRVALDVLSEGSIWSQESSAGTGRADRSLRGKPMEHVSSPCDSNSSSLPRGDVLGSSRPHRRRPCVQQSLSSSFTCEKDPECKVDHKKGLRKSENPRGPLVLPAGGGAQDESGSRIHHKNWTLASKRGGNSAQKASLCLNGSSLSEDDTERDMGSKGGSWAAPSLPSGVREDDPCANAEGHDPGLPLGSLTAPPAPEPSACSEPGECPAKKRPRLDGSQRPPAVQLEPMAAGAAPSPGPGPGPRESVTPRSTARLGPPPSHASADATRCLPCPDSQKLEKECQSSEESMGSNSMRSILEEDEEDEEPPRVLLYHEPRSFEVGMLVWHKHKKYPFWPAVVKSVRQRDKKASVLYIEGHMNPKMKGFTVSLKSLKHFDCKEKQTLLNQAREDFNQDIGWCVSLITDYRVRLGCGSFAGSFLEYYAADISYPVRKSIQQDVLGTKLPQLSKGSPEEPVVGCPLGQRQPCRKMLPDRSRAARDRANQKLVEYIVKAKGAESHLRAILKSRKPSRWLQTFLSSSQYVTCVETYLEDEGQLDLVVKYLQGVYQEVGAKVLQRTNGDRIRFILDVLLPECWEMRVRALDPVRRRSRLLDPCAEMELLRSCQHQGVRTPSLLRAHRCFPASVGHHLCDLCGGRGGLQDG

SEQ ID NO: 320963 - DNA, 2199 bp, Artificial Sequence
  derived and/or modified sequence
atgatggctgatgccaagtacgtcttgtgcaggtgggagaagcgtttgtggccagctaaggtactggcgcgaaccgccaccagcactaagaacaaacgccgcaaagagtactttctggccgtgcagattttaagtctggaggagaagatcaaggttaagtccaccgaagttgagatcctggagaagtctcagatcgaggctatcgccagttcactcgcttctcagaatgaagtccctgcggcccctttggaggagctggcatataggcgttccctgcgagtggcccttgacgtgctatctgaggggtctatctggagccaggaatcctcggccggaacggggcgcgccgaccgtagccttagggggaaaccaatggaacatgtttcctctccttgcgacagcaactcaagcagcctaccaaggggggacgtgctggggagttcccgtcctcacagacggcggccatgtgtccagcagtcactgtctagctccttcacatgtgagaaggacccagagtgtaaagttgatcacaagaaaggccttagaaagtcagagaatccaaggggccctcttgtcctgcctgctgggggtggcgctcaggatgaatctggttcacggatacatcataaaaactggactctcgcttcaaagcgcggcggtaactcagcgcagaaggcctccctctgcttaaatggttccagtctgtccgaggacgacaccgaaagagacatgggcagtaaggggggttcctgggctgccccgtcccttccctctggagttcgcgaagacgacccgtgcgctaacgccgaggggcacgatcctggactccccctcggttctctcactgcccctcccgcccccgagccgagtgcttgcagcgagccaggggagtgcccggccaaaaagaggccccggctggacggtagccagcggccaccagctgtccaattagagcccatggcagccggcgctgctcccagcccgggtcccggtcctgggccccgggaatcagtgaccccacggagcaccgcccgcctgggcccacctccaagtcacgccagtgctgacgctacacgatgtctgccttgccctgacagtcagaaactggagaaggagtgccagagttctgaggagtccatgggctctaacagcatgcgaagcatactggaagaagatgaagaggatgaagagcctccacgggtcctgctttaccatgagcctagaagttttgaggtaggcatgcttgtgtggcataaacacaaaaaataccctttctggcctgcagttgtgaaatctgtccgccaacgtgacaagaaggcaagcgtgttgtatattgaggggcacatgaaccccaaaatgaaaggattcacagttagcctgaaatcactaaaacactttgattgtaaagagaagcaaacgctgcttaaccaagcgcgggaggacttcaaccaggacataggttggtgcgtttcactgattaccgattacagggtgcgcttgggttgtgggtctttcgccgggtcatttctggagtattacgctgccgatatttcatacccagtccgcaaatccattcagcaggacgtcctgggaacgaaacttcctcagctgtctaaagggtctcctgaggagcctgttgtgggatgccctctgggacagcgacagccctgtaggaagatgctgccggataggagcagagcagctcgagaccgcgccaaccagaaactggtggaatacattgtaaaagcaaagggggcagaaagtcatcttagggctattttgaagtcacgcaagccttctagatggctacagacatttctctcgtcaagccagtacgtcacgtgcgtggaaacatacctggaggacgagggccagctcgacctggttgtcaagtacttgcagggtgtataccaggaagttggagccaaggtgttgcagcgaaccaatggcgacaggattagattcatcctggacgtcttgctgcccgagtgttgggagatgagagtccgagcactcgaccccgtacgccggcgcagcagactcctggatccctgcgcagagatggaattacttcggagctgtcagcaccaaggagtcagaacccccagtctgctcagggcacatcggtgttttccagcatctgtgggacatcacctctgcgacttatgcggcggtagggggggactccaggatggatag

SEQ ID NO: 320964 - DNA, 2837 bp, Artificial Sequence
  derived and/or modified sequence
cattgccacttgccacatgagtgtaaatgatggcggatgccaagtatgtcctctgccgatgggaaaagcgattatggcctgcgaaggttttggcccgaaccgcgacttcaacaaaaaataagagaagaaaggaatattttctagctgtgcaaatcctctctctagaggaaaaaattaaggtgaaaagcactgaagttgagatcctagagaagtctcaaattgaagccattgcttcctcgttagcctcacagaatgaggttcctgcggcacccctggaagaactggcctacagacggtcgcttcgcgtggctctggacgttctgagcgagggctcgatttggagtcaagaaagctctgcagggacaggtagagctgaccggtctctgcgagggaagcccatggagcatgtctcctcgccctgtgattcgaactcctcatctcttccccgcggagacgtgttgggcagttccagacctcacaggaggaggccatgtgtgcaacaaagcctgtcaagttcgttcacttgtgaaaaggaccccgagtgcaaagtggaccacaagaaggggctcaggaaaagtgaaaacccaagaggcccgttggtcctcccagctggaggtggtgcccaagatgagagtgggtccagaatccaccacaaaaattggactcttgcaagtaagaggggaggaaactcagcgcagaaggctagcttgtgcctgaatggatcttccctttcagaggacgacacggagagagacatggggagcaaaggaggcagctgggcagccccgtccttgccctccggggtcagggaggacgatccctgtgccaacgctgagggacacgaccccggtctgccgttgggcagcctcactgcgcccccagcccctgagccctcggcctgctcagagcctggagaatgccctgcgaaaaagaggccgcgcctggatggcagccaaaggccgcctgccgtgcagctggagcccatggcagcaggggccgcaccatcccccgggccggggccagggcccagagagtctgtgaccccgcgcagcaccgccaggctgggcccgcctccctcccacgcctctgcggatgcaaccagatgtcttccttgcccggattcccagaagctggagaaagagtgccagtcttccgaagagtccatggggtctaattccatgcgttctatcctggaggaagacgaggaagacgaggagccaccaagagtccttttataccacgaaccacgttcgtttgaagtaggaatgctagtctggcataaacataaaaaataccccttctggccagcagtggtcaaaagcgtcaggcagagagataagaaagcaagtgtgctatacatcgaaggacacatgaacccgaaaatgaaaggtttcacagtgtctcttaaaagtttaaagcactttgattgtaaagagaaacagacgcttctgaatcaagccagggaggacttcaaccaggacatcggctggtgtgtctccctcatcaccgactacagggtccggttaggctgcgggtcttttgctggctctttcctggaatattacgcggctgatataagctatcctgtccgaaaatccatccagcaggacgtcttggggaccaagcttcctcaactgagcaaggggagccccgaggagcccgtggtggggtgccccctggggcagaggcagccctgccggaaaatgctccccgaccgctcgcgggccgcccgggaccgggccaaccagaagctggtggagtacattgtgaaggccaagggcgcggagagccacctgcgggccatcctaaagagcaggaagccatctcgctggctgcagaccttcctgagctccagccagtacgtgacctgtgtggagacctacctggaggatgaggggcagctggacctggtggtgaagtacctgcagggcgtctaccaggaggtgggggccaaggtgctccagcgcaccaacggcgaccggatccggttcattctggacgtgcttctgcccgagtgctgggaaatgcgagtgcgtgcgcttgaccctgtgcggagacggagccgcttacttgacccctgtgcagagatggagctgcttagaagctgtcagcaccagggggtgcgaactccctccctactgcgggcgcacagatgcttcccagcctcggtgggccatcatctgtgcgatctctgcggtggacgaggtggactacaagacggctgaggagaagtacatcaaggggccttcgctgagctaccgggaaaaagaaatatttgacaaccagctccttgaagagcggaaccggcgccgtcggtgagggagcagccggctgtgctgtcagcggggcctggcggtggaagcgcctccagtgtgcatgagcgtgtctgaagatggggggctcagggggcacgtttgcgtttggacctgtctgtgcgttctcctgcgtggcagtcctgatttccatgcttctggagaatccatttcgttaacactgaaagccagttctcttttcctggcagtttttttcattttatttttggcattttttacaagataccgttcgggaaaggcttttgaaaggacggaagcgtattcactgtgcgccagtactcctggctgtgctgtggtttctcccgacgtgcacatcgatctcgtatgtgtggcatctgatattaaacgggaggttttaagaagcgtctgccgtgatcatggagcttcggaagcgggaatggttcttccgggtttgctgttttgtctgtttcccccttgtgtggtttccgcctgcgacagttccagaatttgctctcccactcagtgtgctctgcagctgtgagg

SEQ ID NO: 320965 - DNA, 2199 bp, Artificial Sequence
  derived and/or modified sequence
atgatggctgatgccaagtatgtgctgtgccgctgggagaagaggctgtggccagccaaggtgctggccaggacagccaccagcaccaagaacaagaggaggaaggagtacttcctggccgtgcagatcctgagcctggaggagaagatcaaggtgaagagcacagaggtggagatcctggagaagagccagatcgaggccatcgccagcagcctggccagccagaatgaggtgcctgctgcccccctggaggagctggcctacagaagaagcctgcgggtggccctggatgtgctgtctgagggcagcatctggagccaggagagcagcgctggcaccggccgggctgacaggagcctgcggggcaagcccatggagcacgtgagcagcccctgtgacagcaacagcagcagcctgcccagaggagatgtgctgggcagcagccggccccacagaagaagaccctgtgtgcagcagagcctgagcagcagcttcacctgtgagaaggaccctgagtgcaaggtggaccacaagaagggcctgaggaagtctgagaacccccggggccccctggtgctgcctgctgggggcggggcccaggatgaaagtggcagccgcatccaccacaagaactggaccctggccagcaagagaggaggcaacagcgcccagaaggccagcctgtgcctgaatggcagcagcctgtctgaagatgacacagagcgggacatgggcagcaaaggaggctcctgggccgcccccagcctgcccagcggcgtgcgggaggatgacccctgtgccaatgctgagggccatgaccccggcctgcccctgggcagcctgacagcccccccagcccctgagcccagcgcctgcagcgagcctggagaatgtcctgccaagaagaggccccggctggatggcagccagaggcccccagctgtgcagctggagcccatggccgccggggccgcccccagccctggccctggccctggcccccgggagagcgtgacccccaggagcacagcccggctgggccccccacccagccacgccagcgcagatgccacccgctgcctgccctgcccagacagccagaagctggagaaggagtgccagagcagcgaggagagcatgggcagcaacagcatgaggagcatcctggaggaggatgaggaggatgaggagcccccccgggtgctgctgtaccacgagcccaggagctttgaggtgggcatgctggtgtggcacaagcacaagaagtaccccttctggccagctgtggtgaagtctgtgcggcagagggacaagaaggcctctgtgctgtacatcgagggccacatgaaccccaagatgaagggcttcaccgtgtccctgaagagcctgaagcactttgactgcaaggagaagcagaccctgctgaaccaggcccgggaggacttcaaccaggacatcggctggtgtgtgtccctcatcacagactacagagtgcggctgggctgcggcagctttgctggcagcttcctggagtactatgctgctgacatctcctaccctgtgaggaagagcatccagcaggatgtgctgggcaccaagctgccccagctgagcaagggcagccctgaggagcctgtggtgggctgccccctgggccagaggcagccctgcaggaagatgctgcctgacaggagcagagctgcccgggaccgggccaaccagaagctggtggagtacatcgtgaaggccaagggagctgagagccacctgcgggccatcctgaagagcaggaagcccagccgctggctgcagaccttcctgagcagcagccagtatgtgacctgtgtggagacctacctggaggatgagggccagctggacctggtggtgaagtacctgcagggcgtgtaccaggaggtgggcgccaaggtgctgcagaggaccaatggagaccgcatccgcttcatcctggatgtgctgctgcctgagtgctgggagatgagggtgcgggccctggaccctgtgagaagaagaagccggctgctggacccctgtgccgagatggagctgctgcggagctgccagcaccagggcgtgaggacccccagcctgctgcgggcccaccgctgcttccctgcctctgtgggccaccacctgtgtgacctgtgtggcggccggggcggcctgcaggatggatag

SEQ ID NO: 320966 - DNA, 2199 bp, Artificial Sequence
  derived and/or modified sequence
atgatggccgacgccaagtacgtgctgtgccggtgggagaagcggctgtggccggccaaagtactggccagaaccgccaccagtactaaaaataaacgcagaaaagagtatttcttggccgtgcagattctcagcctggaagagaagatcaaagttaagtccacggaagtggagatcctcgagaagtctcagatcgaagccatcgccagtagcttggcctcccagaacgaggtgcccgcggcccctttggaagagcttgcctatcgccggtctctgcgcgtcgcactggacgtcctgagcgaaggatctatatggagccaggagtctagtgccggcaccggtagggcagatagatctcttagggggaagccgatggagcatgtgtcaagtccatgcgattctaattcctcttcgctgccgcgcggcgacgttctcggttcctcaagacctcaccgccgacgtccatgtgttcagcagagccttagctcctccttcacctgcgagaaggatcctgaatgtaaggttgaccacaaaaaaggcctcagaaagagtgaaaaccctcgcgggcccttagtgctccctgctggggggggggcccaggacgaatcgggatctcgcattcaccataaaaattggaccctagcatccaagagggggggaaatagtgcccagaaagcaagcctgtgtttgaatggctcttcactgtcagaagatgatacagagcgggacatgggtagcaaaggagggtcttgggcagcaccctctctgccgtccggggttcgcgaagacgatccttgtgcaaatgcagaaggtcatgatccgggcctgcctttgggcagtttaactgctccacctgcgcctgaaccaagcgcttgctccgagcctggggagtgccctgccaaaaaacgacctaggctggacggaagtcagagaccacctgccgtgcagctggagcctatggctgccggcgctgccccaagtcctggtcccggccccggccccagggagtcagttacaccaaggtctaccgcccgcttaggcccaccacccagtcatgctagtgccgacgctacccgctgcttgccgtgcccagactctcagaagctggagaaggagtgtcagagtagtgaagagagcatgggaagtaactccatgagaagcattctggaggaggacgaggaggatgaggaaccccctagggtcttgctctaccatgagcccagatctttcgaagtgggcatgctggtgtggcacaagcacaagaaatacccgttctggccagccgtagttaagagcgtaagacagagagataagaaagcttcagtgctgtatattgagggacacatgaatcctaagatgaaagggtttacggtgtccctgaaaagcctgaaacattttgattgcaaggagaagcagacactgttgaaccaggctagagaagatttcaatcaggatatcggctggtgtgtaagtcttatcacagattaccgcgttcggctgggatgtgggagcttcgccgggtcgttcctggagtattatgcggctgacataagctacccggtgcggaaatcgatccaacaggatgttctcggaactaaactgccccagctgtccaagggttctcccgaagagccggtggttggctgcccactagggcaaaggcagccctgccggaagatgctgccagaccgtagccgggctgctcgggatagggcgaatcagaaactggtcgagtacatcgtgaaggccaagggagcagagagtcacttacgcgctattctgaagtcaagaaaaccctctaggtggttacaaacatttcttagcagctcccagtacgtgacttgtgttgaaacgtacttggaagatgaaggccagctcgatctggtcgttaagtacctccagggcgtttaccaggaggtaggcgccaaggtcctccaacgcaccaacggagatagaattaggttcatcctagatgttctgttacccgaatgctgggagatgcgcgttcgtgccctcgatcccgtccgaagacgatccaggctgctggatccatgcgccgagatggagctgctgaggtcctgccagcatcagggcgtacgaacaccaagtctattgcgagcacaccgatgctttcccgcctccgtgggacatcacctttgtgacctgtgtgggggtaggggcgggctgcaagacggctag

SEQ ID NO: 320967 - DNA, 2199 bp, Artificial Sequence
  derived and/or modified sequence
atgatggcagacgccaagtatgtgttgtgtagatgggaaaagagactgtggccagccaaagtgctggctcggaccgccacatcgacaaagaataagaggcgcaaagagtatttccttgccgtccagattctctctctggaagagaaaattaaagtgaaaagcacagaagtcgaaatattagaaaagtcccagatcgaggcaatagcctcctcactcgcctcccaaaacgaggtgcccgcagccccactcgaagagcttgcctacagaaggtctctccgtgtagcattggacgtcctttctgaaggatccatatggtctcaggaaagttcagcaggcacgggcagagccgacaggtcactgcggggtaagcctatggagcacgtttccagcccttgtgattccaattcaagcagcttacctcgaggggacgttcttggaagcagtagaccacaccgtcggagaccctgtgtgcagcaatcactgtcctcctccttcacttgtgaaaaagacccagaatgcaaggtggaccataagaagggcctgagaaaaagcgaaaaccccaggggccctttggtgctgccagccggtggcggagcccaggacgagtccggaagtaggattcatcacaagaattggacactggctagcaagcggggaggtaactcagcacagaaggcatctctgtgcctgaacggatctagtctgtccgaggatgacaccgagagagatatgggctccaaaggtgggtcttgggctgcccctagcttgcctagcggagtgcgtgaggacgacccctgcgctaacgcagaggggcacgatccaggcttgcccctggggtcactgaccgctcctccagccccagagccctctgcttgttctgaacctggggaatgtcctgcgaagaaacggccacggctggacggctcacaacggccacctgctgtgcaactcgaaccaatggcagcaggtgctgccccaagccccggaccgggtccaggaccacgcgagagtgtcacccctagatctactgccaggttgggccctccaccttctcatgctagcgccgatgccacccggtgcctgccttgtccagactctcagaagctggaaaaagagtgtcagtccagtgaggaatcaatggggagtaactccatgaggtctatcctggaggaggacgaagaggatgaggagcccccacgcgttctgctgtatcatgaaccccgttcattcgaagtcggaatgctcgtctggcacaagcacaaaaaatatcccttttggccagccgtcgtgaagagtgtgcggcagagagacaagaaagccagcgtcctatacattgagggacacatgaaccctaagatgaagggattcaccgtatcccttaaaagtctgaagcatttcgactgtaaggagaagcagaccttactgaaccaggctagggaggactttaaccaggacattgggtggtgtgtatctctgattactgattatcgcgtccgactgggctgtgggtcttttgccggttccttcctggagtattacgccgcagacatcagctaccctgtgcgtaagtccatccaacaggacgtccttggcactaagctgccccaattatcaaagggatccccagaggaaccagtggttggctgccctttgggacagagacagccctgccggaagatgctcccggatcgctctcgggctgctcgtgacagagctaaccagaaactcgtggaatatattgtgaaggcaaagggcgcagagagtcatctgcgcgctattctcaaatctcgtaaaccctcacgatggctgcaaaccttcttgagtagttcgcagtatgttacttgtgtggagacttacctggaagacgagggtcagctggacctggtggtgaagtacctgcagggggtctaccaggaagtgggcgcaaaagtcttgcaacggaccaacggcgatcgcataaggtttatactcgacgtgctcctgcccgagtgctgggagatgagagtgcgggctctggatcccgtcaggcgcaggtccaggcttcttgatccatgcgcagagatggagttgctacgaagttgccagcatcagggtgtgcgcactccgtcccttctgcgcgctcatcgatgtttcccggctagcgtgggccatcacctgtgtgatctatgcgggggaaggggcggactgcaggacggttag

SEQ ID NO: 320968 - DNA, 2199 bp, Artificial Sequence
  derived and/or modified sequence
atgatggccgacgccaagtacgtgctgtgcagatgggagaagagactgtggcccgccaaggtgctggccagaaccgccaccagcaccaagaacaagagaagaaaggagtacttcctggccgtgcagatcctgagcctggaggagaagatcaaggtgaagagcaccgaggtggagatcctggagaagagccagatcgaggccatcgccagcagcctggccagccagaacgaggtgcccgccgcccccctggaggagctggcctacagaagaagcctgagagtggccctggacgtgctgagcgagggcagcatctggagccaggagagcagcgccggcaccggcagagccgacagaagcctgagaggcaagcccatggagcacgtgagcagcccctgcgacagcaacagcagcagcctgcccagaggcgacgtgctgggcagcagcagaccccacagaagaagaccctgcgtgcagcagagcctgagcagcagcttcacctgcgagaaggaccccgagtgcaaggtggaccacaagaagggcctgagaaagagcgagaaccccagaggccccctggtgctgcccgccggcggcggcgcccaggacgagagcggcagcagaatccaccacaagaactggaccctggccagcaagagaggcggcaacagcgcccagaaggccagcctgtgcctgaacggcagcagcctgagcgaggacgacaccgagagagacatgggcagcaagggcggcagctgggccgcccccagcctgcccagcggcgtgagagaggacgacccctgcgccaacgccgagggccacgaccccggcctgcccctgggcagcctgaccgccccccccgcccccgagcccagcgcctgcagcgagcccggcgagtgccccgccaagaagagacccagactggacggcagccagagaccccccgccgtgcagctggagcccatggccgccggcgccgcccccagccccggccccggccccggccccagagagagcgtgacccccagaagcaccgccagactgggccccccccccagccacgccagcgccgacgccaccagatgcctgccctgccccgacagccagaagctggagaaggagtgccagagcagcgaggagagcatgggcagcaacagcatgagaagcatcctggaggaggacgaggaggacgaggagccccccagagtgctgctgtaccacgagcccagaagcttcgaggtgggcatgctggtgtggcacaagcacaagaagtaccccttctggcccgccgtggtgaagagcgtgagacagagagacaagaaggccagcgtgctgtacatcgagggccacatgaaccccaagatgaagggcttcaccgtgagcctgaagagcctgaagcacttcgactgcaaggagaagcagaccctgctgaaccaggccagagaggacttcaaccaggacatcggctggtgcgtgagcctgatcaccgactacagagtgagactgggctgcggcagcttcgccggcagcttcctggagtactacgccgccgacatcagctaccccgtgagaaagagcatccagcaggacgtgctgggcaccaagctgccccagctgagcaagggcagccccgaggagcccgtggtgggctgccccctgggccagagacagccctgcagaaagatgctgcccgacagaagcagagccgccagagacagagccaaccagaagctggtggagtacatcgtgaaggccaagggcgccgagagccacctgagagccatcctgaagagcagaaagcccagcagatggctgcagaccttcctgagcagcagccagtacgtgacctgcgtggagacctacctggaggacgagggccagctggacctggtggtgaagtacctgcagggcgtgtaccaggaggtgggcgccaaggtgctgcagagaaccaacggcgacagaatcagattcatcctggacgtgctgctgcccgagtgctgggagatgagagtgagagccctggaccccgtgagaagaagaagcagactgctggacccctgcgccgagatggagctgctgagaagctgccagcaccagggcgtgagaacccccagcctgctgagagcccacagatgcttccccgccagcgtgggccaccacctgtgcgacctgtgcggcggcagaggcggcctgcaggacggctag

SEQ ID NO: 320969 - DNA, 225 bp, Artificial Sequence
  derived and/or modified sequence
ggcggcggagggggtggccatatcggcgttcggcccggctcaacattatgccaaataattgcaacttgccacatgtcggttaacgatggcggatgctacgtgctgtgtaggtgggagaaaagattatggcccgcgaaagtgctagcgcggaccgccacaagtacaaagaacaagagacggaaagaatacttcctcgccgtgcagatactgagtctcgaggaatag

SEQ ID NO: 320970 - DNA, 1314 bp, Artificial Sequence
  derived and/or modified sequence
ggcggtggcggaggcggacacattggcgtgagacctgggagtacgttgtgccaaatcattgccacttgccacatgagtgtaaatgatggcggatgctatgtcctctgccgatgggaaaagcgattatggcctgcgaaggttttggcccgaaccgcgacttcaacaaaaaataagagaagaaaggaatattttctagctgtgcaaatcctctctctagaggaaaaaattaaggtgaaaagcactgaagttgagatcctagagaagtctcaaattgaagccattgcttcctcgttagcctcacagaatgaggttcctgcggcacccctggaagaactggcctacagacggtcgcttcgcgtggctctggacgttctgagcgagggctcgatttggagtcaagaaagctctgcagggacaggtagagctgaccggtctctgcgagggaagcccatggagcatgtctcctcgccctgtgattcgaactcctcatctcttccccgcggagacgtgttgggcagttccagacctcacaggaggaggccatgtgtgcaacaaagcctgtcaagttcgttcacttgtgaaaaggaccccgagtgcaaagtggaccacaagaaggggctcaggaaaagtgaaaacccaagaggcccgttggtcctcccagctggaggtggtgcccaagatgagagtgggtccagaatccaccacaaaaattggactcttgcaagtaagaggggaggaaactcagcgcagaaggctagcttgtgcctgaatggatcttccctttcagaggacgacacggagagagacatggggagcaaaggaggcagctgggcagccccgtccttgccctccggggtcagggaggacgatccctgtgccaacgctgagggacacgaccccggtctgccgttgggcagcctcactgcgcccccagcccctgagccctcggcctgctcagagcctggagaatgccctgcgaaaaagaggccgcgcctggatggcagccaaaggccgcctgccgtgcagctggagcccatggcagcaggggccgcaccatcccccgggccggggccagggcccagagagtctgtgaccccgcgcagcaccgccaggctgggcccgcctccctcccacgcctctgcggatgcaaccagatgtcttccttgcccggattcccagaagctggagaaagagtgccagtcttccgaagagtccatggggtctaattccatgcgttctatcctggaggaagacgaggaagacgaggagccaccaagagtccttttataccacgaaccacgttcgtttgaagta

SEQ ID NO: 320971 - DNA, 225 bp, Artificial Sequence
  derived and/or modified sequence
gggggcggcggcggcggccacatcggcgtgcggcccggcagcaccctgtgccagatcatcgccacctgccacatgtctgtgaatgatggcggctgctacgtgctgtgccgctgggagaagaggctgtggccagccaaggtgctggccaggacagccaccagcaccaagaacaagaggaggaaggagtacttcctggccgtgcagatcctgagcctggaggagtag

SEQ ID NO: 320972 - DNA, 225 bp, Artificial Sequence
  derived and/or modified sequence
ggcggcggcggcggcggccacatcggcgtgcggcccggcagcaccctatgtcagatcattgccacatgtcatatgtccgtgaacgacggcggatgctacgtgctgtgtcgctgggaaaaacgcctgtggcccgcgaaggtgttggctcgcacagctacatccacaaaaaacaaacggaggaaggaatactttttagcagtgcagatcctttcattggaagaatag

SEQ ID NO: 320973 - DNA, 225 bp, Artificial Sequence
  derived and/or modified sequence
gggggagggggaggcggtcatatcggagtacgccctggatccaccctgtgtcaaatcattgccacatgccacatgagcgtgaacgatggcggttgttatgtcctctgtcgatgggagaaaagactctggccggcaaaagtgttagcacgaacagcaaccagtactaagaataagagaagaaaggagtactttttggcagtgcagatactgtctttagaggagtag

SEQ ID NO: 320974 - DNA, 225 bp, Artificial Sequence
  derived and/or modified sequence
ggcggcggcggcggcggccacatcggcgtgagacccggcagcaccctgtgccagatcatcgccacctgccacatgagcgtgaacgacggcggctgctacgtgctgtgcagatgggagaagagactgtggcccgccaaggtgctggccagaaccgccaccagcaccaagaacaagagaagaaaggagtacttcctggccgtgcagatcctgagcctggaggagtag

SEQ ID NO: 320975 - protein, 642 aa, Artificial Sequence
  derived and/or modified sequence
MVSASQNEVPAAPLEELAYRRSLRVALDVLSEGSIWSQESSAGTGRADRSLRGKPMEHVSSPCDSNSSSLPRGDVLGSSRPHRRRPCVQQSLSSSFTCEKDPECKVDHKKGLRKSENPRGPLVLPAGGGAQDESGSRIHHKNWTLASKRGGNSAQKASLCLNGSSLSEDDTERDMGSKGGSWAAPSLPSGVREDDPCANAEGHDPGLPLGSLTAPPAPEPSACSEPGECPAKKRPRLDGSQRPPAVQLEPMAAGAAPSPGPGPGPRESVTPRSTARLGPPPSHASADATRCLPCPDSQKLEKECQSSEESMGSNSMRSILEEDEEDEEPPRVLLYHEPRSFEVGMLVWHKHKKYPFWPAVVKSVRQRDKKASVLYIEGHMNPKMKGFTVSLKSLKHFDCKEKQTLLNQAREDFNQDIGWCVSLITDYRVRLGCGSFAGSFLEYYAADISYPVRKSIQQDVLGTKLPQLSKGSPEEPVVGCPLGQRQPCRKMLPDRSRAARDRANQKLVEYIVKAKGAESHLRAILKSRKPSRWLQTFLSSSQYVTCVETYLEDEGQLDLVVKYLQGVYQEVGAKVLQRTNGDRIRFILDVLLPEAIICAISAVDEVDYKTAEEKYIKGPSLSYREKEIFDNQLLEERNRRRR

SEQ ID NO: 320976 - protein, 166 aa, Artificial Sequence
  derived and/or modified sequence
VLAASQNEVPAHPWKNWPTDGRVALDVLSEGSIWSQESSAGTGRADRSLRGKPMEHVSSPCDSNSSSLPRGDVLGSSRPHRRRPCVQQSLSSSFTCEKDPECKVDHKKGLRKSENPRGPLVLPAGGGAQDESGSRIHHKNWTLASKRGGNSAQKASLCLNGSSLSE

SEQ ID NO: 320977 - DNA, 1929 bp, Artificial Sequence
  derived and/or modified sequence
atggtcagtgcatcgcagaacgaggtacctgctgctcctttggaagaactcgcataccgaaggagcctgcgagtcgcacttgacgtgttgtctgagggttccatttggtcacaggaatcctccgccggcactggccgagctgaccggagcctaagaggcaagccaatggagcacgtgtcttcaccatgtgattcaaattcctcctccctcccccggggcgatgtcctggggagctctcggccacatagaaggcgcccatgtgtgcagcagtcactgagctcgagttttacatgcgagaaggatcctgagtgtaaggtcgaccacaagaaggggctgcggaagtctgagaatccgcgcggacctctggtcctccccgctgggggaggcgcccaagatgagtccggctccagaattcaccacaagaattggactctcgccagtaagaggggagggaactccgcccagaaagcttccctgtgtctcaacggaagtagtctgagtgaggacgacactgagcgcgatatgggctcaaaggggggatcatgggccgcccctagcctgccctctggcgtgagagaggatgacccctgtgctaatgccgaaggccatgatcccggcctacctttaggaagtctgacagcccccccagccccagagccatctgcatgtagtgagcccggcgagtgccctgcgaagaagagaccccggctggatggctcccagcgaccgcctgccgtacagctagagccaatggccgccggcgctgccccaagcccgggtcccggccctggcccccgtgagtcagtgactccccgcagtactgcccggttgggacccccgcccagtcacgcgtccgcggacgcgactagatgcctgccctgccctgactctcagaaactggaaaaggagtgccaatcatccgaggaaagcatgggatctaattctatgaggtctattcttgaggaagacgaggaggatgaggaacctccacgcgttctgctttatcatgagccccgatctttcgaggttggcatgctggtctggcacaagcataagaagtatcctttctggcctgcagtcgtgaaaagtgtccgccagcgggacaaaaaagcaagcgtgctgtatatcgaaggacatatgaatccgaagatgaaaggcttcactgtgtcgctgaaaagcctcaagcacttcgactgcaaagagaagcagaccctccttaatcaggcccgagaggattttaatcaggatattggttggtgcgttagtctgataaccgactacagagtgagactcggctgtgggtcatttgcaggatcctttctggaatactacgccgcagatattagttaccccgtgcgaaaatctatacagcaggacgtcctggggacaaaacttccacaactctctaaaggcagccctgaggagcctgtggtgggctgcccactggggcaaaggcaaccttgtaggaagatgctcccagaccggagccgcgccgccagggatcgcgccaaccagaagctggtggagtacatagtcaaggctaagggggccgagtctcatttgagggcgatcctaaaatcacgcaagccaagtcgatggttgcagacgtttttgagtagctcacagtatgtaacttgtgttgagacgtacttggaggatgaaggccaactggacctggtagtgaaatatctgcagggagtataccaggaagtgggagctaaagtgctccaacgcactaacggcgaccgaatccgtttcatcctcgatgtgttgctgcccgaagccatcatttgcgccatctcagccgtagatgaggtggattacaaaaccgccgaagagaaatacatcaagggcccttctctatcctaccgggagaaggagatctttgataaccagctgttggaggaacgaaaccgccggaggagatag

SEQ ID NO: 320978 - DNA, 501 bp, Artificial Sequence
  derived and/or modified sequence
gttttagccgctagccagaatgaggtgcctgcacacccgtggaaaaactggcccacagacggcagagttgccttagatgtgttatccgaaggctccatttggtcccaggagtcttccgccgggaccggtagagcagaccggtctctccgcgggaaacccatggagcatgtctcgtccccttgtgactcaaacagctcctccctgccgaggggagatgtgctgggcagcagcagacctcatagacgcaggccctgtgtacagcagtcactcagcagttccttcacctgtgaaaaggaccccgaatgcaaagtcgatcacaaaaagggcctccggaaaagtgaaaaccccaggggtcctctggtcctgccagcgggcgggggcgcccaggatgaatcagggagccgcatccatcataagaattggacgcttgccagtaagagaggaggtaactcagctcagaaggcctcactctgcttaaatggctcatctctgtccgagtag

SEQ ID NO: 320979 - DNA, 4170 bp, Artificial Sequence
  derived and/or modified sequence
gacacattggcgtgagacctgggagtacgttgtgccaaatcattgccacttgccacatgagtgtaaatgatggcggatgccaagtatgtcctctgccgatgggaaaagcgattatggcctgcgaaggttttggcccgaaccgcgacttcaacaaaaaataagagaagaaaggaatattttctagctgtgcaaatcctctctctagaggaaaaaattaaggtgaaaagcactgaagttgagatcctagagaagtctcaaattgaagccattgcttcctcgttagggaacgcgaatcccctgagctgaaggagaaggaaaaatggatccgctttcttaaacctttccagaatttgcccctagaaccactcctattcttgacgcccagaatggtcagtgcctcacagaatgaggttcctgcggcacccctggaagaactggcctacagacggtcgcttcgcgtggctctggacgttctgagcgagggctcgatttggagtcaagaaagctctgcagggacaggtagagctgaccggtctctgcgagggaagcccatggagcatgtctcctcgccctgtgattcgaactcctcatctcttccccgcggagacgtgttgggcagttccagacctcacaggaggaggccatgtgtgcaacaaagcctgtcaagttcgttcacttgtgaaaaggaccccgagtgcaaagtggaccacaagaaggggctcaggaaaagtgaaaacccaagaggcccgttggtcctcccagctggaggtggtgcccaagatgagagtgggtccagaatccaccacaaaaattggactcttgcaagtaagaggggaggaaactcagcgcagaaggctagcttgtgcctgaatggatcttccctttcagaggacgacacggagagagacatggggagcaaaggaggcagctgggcagccccgtccttgccctccggggtcagggaggacgatccctgtgccaacgctgagggacacgaccccggtctgccgttgggcagcctcactgcgcccccagcccctgagccctcggcctgctcagagcctggagaatgccctgcgaaaaagaggccgcgcctggatggcagccaaaggccgcctgccgtgcagctggagcccatggcagcaggggccgcaccatcccccgggccggggccagggcccagagagtctgtgaccccgcgcagcaccgccaggctgggcccgcctccctcccacgcctctgcggatgcaaccagatgtcttccttgcccggattcccagaagctggagaaagagtgccagtcttccgaagagtccatggggtctaattccatgcgttctatcctggaggaagacgaggaagacgaggagccaccaagagtccttttataccacgaaccacgttcgtttgaagtaggaatgctagtctggcataaacataaaaaataccccttctggccagcagtggtcaaaagcgtcaggcagagagataagaaagcaagtgtgctatacatcgaaggacacatgaacccgaaaatgaaaggtttcacagtgtctcttaaaagtttaaagcactttgattgtaaagagaaacagacgcttctgaatcaagccagggaggacttcaaccaggacatcggctggtgtgtctccctcatcaccgactacagggtccggttaggctgcgggtcttttgctggctctttcctggaatattacgcggctgatataagctatcctgtccgaaaatccatccagcaggacgtcttggggaccaagcttcctcaactgagcaaggggagccccgaggagcccgtggtggggtgccccctggggcagaggcagccctgccggaaaatgctccccgaccgctcgcgggccgcccgggaccgggccaaccagaagctggtggagtacattgtgaaggccaagggcgcggagagccacctgcgggccatcctaaagagcaggaagccatctcgctggctgcagaccttcctgagctccagccagtacgtgacctgtgtggagacctacctggaggatgaggggcagctggacctggtggtgaagtacctgcagggcgtctaccaggaggtgggggccaaggtgctccagcgcaccaacggcgaccggatccggttcattctggacgtgcttctgcccgaggccatcatctgtgcgatctctgcggtggacgaggtggactacaagacggctgaggagaagtacatcaaggggccttcgctgagctaccgggaaaaagaaatatttgacaaccagctccttgaagagcggaaccggcgccgtcggtgagggagcagccggctgtgctgtcagcggggcctggcggtggaagcgcctccagtgtgcatgagcgtgtctgaagatggggggctcagggggcacgtttgcgtttggacctgtctgtgcgttctcctgcgtggcagtcctgatttccatgcttctggagaatccatttcgttaacactgaaagccagttctcttttcctggcagtttttttcattttatttttggcattttttacaagataccgttcgggaaaggcttttgaaaggacggaagcgtattcactgtgcgccagtactcctggctgtgctgtggtttctcccgacgtgcacatcgatctcgtatgtgtggcatctgatattaaacgggaggttttaagaagcgtctgccgtgatcatggagcttcggaagcgggaatggttcttccgggtttgctgttttgtctgtttcccccttgtgtggtttccgcctgcgacagttccagaatttgctctcccactcagtgtgctctgcagctgtgaggaaacagccttcgttagaggcgggagcagagacgagccgctgctctgtgtcgtgtttgctgtggccgcagggagaggagcaggacacgcacctttccaggggcctctgtgtcccgcactgtgtgtgagtggaccgcagcgcgcagccacatgccctggctgccatgggccagaccgcctccacctcccccgcccgcctggcctgtcctgagtgcatttccctgcactgtgtcgtcactgcacagccagtcaccgcggtctcagtcatcggcgcggatggctatgctggggtcccagggtggccgcagcagtcagggtcactgtgggagccctggggtggagtgacaaaccgcattgtcctgtgcccgccatggcagaagcgcagcctttgtatggaggcccaaccgcgctcccgtctggagaagcggcttccggggtgtggctgccgggtcggctctggtccacagcacggtgccggggctgcaggttgttgagggctgtgactccgtggggctcagccaggctccagcagggtcagacgtgctgttaagagcaaagccacagacgatgacttgtccattctcagtggatgctccaggctgtgcctacacagcagtgctggtgacatgtccagggttccagggcccggtggcctgggagctgctttctccccactggctgggctgcatctggccctggctggaggccttgctttgaggggctgtgaccctcttcccccaggccctccccagccgacgacagccaccggagaggagatcggaacacgattgtctcagatgcagggcgctgtgcgggacgaagccgcaaggactctcgtatcgggcccttgggactcgggaggtgccagaggcggcggctgctctggacctcggtgttcactgacctttgtttcacttgcctctgctcgactccgagagcaggaaacccggccgtggcctggcagctccgcctcccatgcccgcacgctggggtctgtcttgtctggagcagtggggcacaccccggaggaggcgggggtcagggctgtcggccttggccccctgctggtcgctgtttcggggactcggggcggccagtaccaccgcctgaggcggggctcagcagcgttgcatgtacgggcctcgtactgcctcatggaaaatcctccggagccgccctccattgtgggttcctgagagtaggacacattgccatggttttgtgggaatcacgcgcccctgatggaacttttctgctgttgtgaagtacttttatccatttgcttctctgctgaccttgccaagttgttcgaggtggaattaaacacctcccagacctc

SEQ ID NO: 320980 - DNA, 498 bp, Artificial Sequence
  derived and/or modified sequence
gtccttgcagcctcacagaatgaggttcctgcgcacccctggaagaactggcctacagacggtcgcgtggctctggacgttctgagcgagggctcgatttggagtcaagaaagctctgcagggacaggtagagctgaccggtctctgcgagggaagcccatggagcatgtctcctcgccctgtgattcgaactcctcatctcttccccgcggagacgtgttgggcagttccagacctcacaggaggaggccatgtgtgcaacaaagcctgtcaagttcgttcacttgtgaaaaggaccccgagtgcaaagtggaccacaagaaggggctcaggaaaagtgaaaacccaagaggcccgttggtcctcccagctggaggtggtgcccaagatgagagtgggtccagaatccaccacaaaaattggactcttgcaagtaagaggggaggaaactcagcgcagaaggctagcttgtgcctgaatggatcttccctttcagag

SEQ ID NO: 320981 - DNA, 1929 bp, Artificial Sequence
  derived and/or modified sequence
atggtgtctgccagccagaatgaggtgcctgctgcccccctggaggagctggcctaccgccgcagcctgcgggtggccctggatgtgctgtctgagggcagcatctggagccaggagagcagcgctggcaccggccgggctgacaggagcctgcggggcaagcccatggagcacgtgagcagcccctgtgacagcaacagcagcagcctgcccagaggagatgtgctgggcagcagccggccccacagaagaagaccctgtgtgcagcagagcctgagcagcagcttcacctgtgagaaggaccctgagtgcaaggtggaccacaagaagggcctgaggaagtctgagaacccccggggccccctggtgctgcctgctgggggcggggcccaggatgagagcggcagccgcatccaccacaagaactggaccctggccagcaagaggggcggcaacagcgcccagaaggccagcctgtgcctgaatggcagcagcctgtctgaagatgacacagagcgggacatgggcagcaagggcggctcctgggccgcccccagcctgcccagcggcgtgagagaagatgacccctgtgccaatgctgagggccatgaccccggcctgcccctgggcagcctgacagcccccccagcccctgagcccagcgcctgcagcgagcccggggagtgcccagccaagaagaggccccggctggatggcagccagaggcctcctgctgtgcagctggagcccatggctgctggagctgcccccagccctggccctggccctggcccccgggagagcgtgacccccaggagcacagcccggctgggccccccacccagccacgccagcgcagatgccacccgctgcctgccctgcccagacagccagaagctggagaaggagtgccagagcagcgaggagagcatgggcagcaacagcatgaggagcatcctggaggaggatgaagaagatgaggagcccccccgggtgctgctgtaccacgagcccaggagctttgaggtgggcatgctggtgtggcacaagcacaagaagtaccccttctggccagctgtggtgaagtctgtgcggcagagggacaagaaggcctctgtgctgtacatcgagggccacatgaaccccaagatgaagggcttcaccgtgtccctgaagagcctgaagcactttgactgcaaggagaagcagaccctgctgaaccaggcccgggaggacttcaaccaggacatcggctggtgtgtgtccctcatcacagactacagagtgcggctgggctgcggcagctttgctggcagcttcctggagtactatgctgctgacatctcctaccctgtgaggaagagcatccagcaggatgtgctgggcaccaagctgccccagctgagcaagggcagccctgaggagcctgtggtgggctgccccctgggccagaggcagccctgcaggaagatgctgcctgacaggagccgggccgcccgggaccgggccaaccagaagctggtggagtacatcgtgaaggccaagggagctgagagccacctgcgggccatcctgaagagcaggaagcccagccgctggctgcagaccttcctgagcagcagccagtatgtgacctgtgtggagacctacctggaggatgagggccagctggacctggtggtgaagtacctgcagggcgtgtaccaggaggtgggcgccaaggtgctgcagaggaccaacggggaccgcatccgcttcatcctggatgtgctgctgcctgaggccatcatctgtgccatctctgctgtggatgaggtggactacaagacagctgaggagaagtacatcaagggccccagcctgagctaccgggagaaggagatctttgacaaccagctgctggaggagaggaacagaagaagaagatag

SEQ ID NO: 320982 - DNA, 501 bp, Artificial Sequence
  derived and/or modified sequence
gtgctggccgccagccagaatgaggtgcctgcccacccctggaagaactggcccacagatggccgggtggccctggatgtgctgtctgagggcagcatctggagccaggagagcagcgctggcaccggccgggctgacaggagcctgcggggcaagcccatggagcacgtgagcagcccctgtgacagcaacagcagcagcctgcccagaggagatgtgctgggcagcagccggccccacagaagaagaccctgtgtgcagcagagcctgagcagcagcttcacctgtgagaaggaccctgagtgcaaggtggaccacaagaagggcctgaggaagtctgagaacccccggggccccctggtgctgcctgctgggggcggggcccaggatgagagcggcagccgcatccaccacaagaactggaccctggccagcaagaggggcggcaacagcgcccagaaggccagcctgtgcctgaatggcagcagcctgtctgagtag

SEQ ID NO: 320983 - DNA, 1929 bp, Artificial Sequence
  derived and/or modified sequence
atggtgagcgccagccagaacgaggtgcccgccgcccccctggaggaactggcttaccgccgctccttacgcgtggctctggacgtcctgagcgagggctctatttggtcccaagaaagcagcgcaggaactgggagagccgacaggtctctgcgtggtaaacccatggaacatgtgagcagcccgtgtgactctaattccagcagcctcccacgcggtgacgttctggggagctcccggcctcacagacgtcgcccgtgtgtccagcagagcttaagcagctcattcacgtgcgaaaaggaccccgaatgtaaagttgatcacaagaagggcttacgaaaaagtgaaaacccacggggtccactggtgctccctgccggcgggggagctcaggatgagagcggtagccgcatacatcataaaaactggacgttggctagcaagcgcggcggcaacagtgcacaaaaagcatccctgtgcctaaatgggtcaagcctgtccgaggacgataccgagcgcgatatgggttcaaagggagggtcctgggctgcgcctagtctgcctagcggagtcagggaggacgacccatgcgccaacgccgaaggacacgaccccggtttgcctctcggctccctcacggccccacctgctcccgaaccctcagcatgcagcgaaccaggcgagtgccccgctaaaaaacggcctcgactggacggcagtcagcggccaccagccgtacaactagagccaatggctgccggggctgccccgtctcccggcccagggccgggacccagggagagcgtcacacctagatccacggcccgcctgggccctcctccgtctcatgcttcagctgacgcgacccgctgtctcccgtgcccggactcacaaaagttggagaaagaatgccagtcgtccgaggagtccatgggatctaactcgatgcgaagcattctggaggaggacgaggaagatgaggagccaccacgcgtcctgctttaccatgagccgagatcgtttgaagtgggaatgctggtctggcacaaacataagaagtatcctttctggcctgccgtggtcaaatccgtgagacagcgtgataagaaagcttccgtgttgtacattgaaggccatatgaatccaaaaatgaagggcttcacggtgagcctaaagtcactcaagcactttgattgcaaggaaaagcagacactcctaaatcaagcacgggaggattttaatcaggatatagggtggtgcgtttccctcattaccgactatagagtgaggctcgggtgcggaagtttcgccggtagttttctggaatactatgccgctgacatcagttaccccgtgagaaagagtattcagcaggacgtgctgggaacgaagctgccacaactgtccaagggcagtcctgaagaaccggttgtgggctgcccactgggacagcggcagccctgtcgcaaaatgcttccagatcggtctcgggccgctcgtgaccgggccaaccagaagttggtggaatacatcgtgaaagccaagggcgcagagagtcacctcagagccattctaaaaagtagaaaaccgagccgctggttgcaaacttttttaagttctagccaatacgtgacgtgtgtggagacatacctggaagacgaaggtcaactggatctcgtcgtgaaatatctgcaaggagtgtaccaggaagtcggcgccaaggtactgcaaaggaccaacggtgaccggatccgcttcattctcgacgtgctgctgcccgaggctatcatttgcgcaatctcggcagtggatgaagtggattataagactgctgaagagaaatatataaagggaccttcactctcgtaccgggagaaggagatatttgacaatcaactgctagaggagagaaaccggagaagaaggtag

SEQ ID NO: 320984 - DNA, 501 bp, Artificial Sequence
  derived and/or modified sequence
gtgctggccgccagccagaacgaggtgcccgcccacccctggaagaactggcccacagatggacgggtggccctggatgtgctgagtgagggatccatttggtcacaggaaagttccgctggcaccggtcgggctgataggtccttgagagggaagccaatggaacacgtttcctctccatgcgatagcaattcatcaagcctcccgagaggcgatgtgctcggctccagcaggccgcataggcgccggccttgtgttcagcagtcactatccagctctttcacgtgtgaaaaggaccctgaatgtaaagtcgatcacaaaaagggcctccgtaagagcgagaatccccggggtccgcttgtactccctgccggcggtggcgcccaagatgagagcgggtcgcgtatccaccacaaaaactggactctggccagcaaacgcggaggcaactccgctcagaaggcatcgttgtgtctaaacgggagttcactgtctgagtag

SEQ ID NO: 320985 - DNA, 1929 bp, Artificial Sequence
  derived and/or modified sequence
atggtttccgccagccagaatgaggtgcccgctgccccactcgaagagctggcataccgacgctccctccgggtggccctcgacgtactgtctgaaggcagcatatggtcgcaggagtcaagcgccggtactgggagagcagatcggtccttgcggggaaaaccgatggaacatgtctcttctccctgtgactcgaatagtagctctctgccaagaggggacgtgttaggatcatcacggcctcacaggaggcgaccctgtgtgcagcagagcctgtcatcttcatttacgtgtgaaaaagacccggagtgcaaagtcgatcacaagaaaggccttaggaagtcggaaaaccctagagggcctcttgtgcttccggcaggaggcggagcccaagacgagtccggtagccgaattcaccacaagaactggactctagcttctaagaggggagggaatagcgcgcagaaagcgagcctctgcctgaacggcagctccctctccgaggacgatacagagcgagacatgggctccaagggcggttcctgggcagcaccatccctccctagcggggtgagggaagatgatccttgtgccaatgccgaggggcacgaccctggacttccactaggctccctaaccgctccccctgcccctgagccatcagcgtgttcagagcccggagaatgtccagccaagaagcggcctcgcctggatggcagtcagcgcccaccagccgtgcagcttgaacccatggccgcaggagccgcaccaagccctggaccaggcccagggcctagagagagcgtaactcctagaagtaccgcaagattaggtccacccccttcgcatgcatccgcggacgccactcgctgtttaccatgccccgacagccagaagctggagaaggagtgccagagttccgaagaaagcatgggtagcaatagcatgaggtccatacttgaggaggacgaggaagacgaagaaccaccgagggttctgctgtatcacgagcctaggtctttcgaggttggaatgctcgtctggcataaacataaaaagtaccctttctggccagcagtggtaaagtcagtgagacagcgggacaagaaagcctctgtgctctatatagagggccatatgaatccgaaaatgaaggggttcacggtcagtcttaagtctctgaagcacttcgattgcaaggagaagcagacccttctgaatcaagcccgagaagactttaatcaagatatcgggtggtgcgtctcgctgatcactgactaccgggtgcgcctcggctgcggatcttttgccggttcatttttggagtactatgccgcagacatcagctatcctgtccggaagagcatccagcaggacgttctgggcacgaagctgccccaactctccaaaggatcacccgaagagccagttgtcggatgcccgctcgggcagcggcagccttgcagaaagatgctgccagaccgcagccgcgcagccagagaccgggctaatcagaagctggtggaatatatcgttaaagccaaaggggcagaatctcatctgcgggcaattctcaaaagccggaagccatcacgatggctgcagacctttctgtcgtcatcccaatacgtcacatgtgtggagacttatcttgaggacgagggtcaattagatttggtggtgaagtacctacagggcgtgtaccaagaggtaggcgctaaagtgcttcaacgcactaacggagacagaatccgtttcattctcgacgtgcttctgcctgaagccatcatatgtgcaatctctgcggtggatgaagttgactacaagaccgctgaagagaagtacataaagggcccatcactcagctatagggagaaagagatattcgataaccaactgctggaggaacgtaataggcgcagacgctag

SEQ ID NO: 320986 - DNA, 501 bp, Artificial Sequence
  derived and/or modified sequence
gtcctggctgcgtctcagaatgaagtgccggctcacccctggaaaaattggcctaccgacggacgagtggctctcgacgtgctctccgagggatccatctggagccaggagtcctccgccggaactggacgggcagataggtctctgcgtggcaaacctatggagcacgtgagctcgccttgcgatagcaactcatccagccttcctaggggcgatgtcctcggaagctccagacctcatcggcgacgcccatgtgtccagcaatccctcagcagctctttcacctgcgaaaaggaccccgagtgtaaggtagatcataagaagggccttcgaaagagcgagaatcccagagggcctctggtgctgcctgctggcggaggcgctcaagacgagtcaggttcccgaattcaccacaagaattggaccctggcatccaaacgcggaggcaacagtgcccagaaagcttccctttgcctgaatggctcgtctctgtccgaatag

SEQ ID NO: 320987 - DNA, 1929 bp, Artificial Sequence
  derived and/or modified sequence
atggtgagcgccagccagaacgaggtgcccgccgcccccctggaggagctggcctacagaagaagcctgagagtggccctggacgtgctgagcgagggcagcatctggagccaggagagcagcgccggcaccggcagagccgacagaagcctgagaggcaagcccatggagcacgtgagcagcccctgcgacagcaacagcagcagcctgcccagaggcgacgtgctgggcagcagcagaccccacagaagaagaccctgcgtgcagcagagcctgagcagcagcttcacctgcgagaaggaccccgagtgcaaggtggaccacaagaagggcctgagaaagagcgagaaccccagaggccccctggtgctgcccgccggcggcggcgcccaggacgagagcggcagcagaatccaccacaagaactggaccctggccagcaagagaggcggcaacagcgcccagaaggccagcctgtgcctgaacggcagcagcctgagcgaggacgacaccgagagagacatgggcagcaagggcggcagctgggccgcccccagcctgcccagcggcgtgagagaggacgacccctgcgccaacgccgagggccacgaccccggcctgcccctgggcagcctgaccgccccccccgcccccgagcccagcgcctgcagcgagcccggcgagtgccccgccaagaagagacccagactggacggcagccagagaccccccgccgtgcagctggagcccatggccgccggcgccgcccccagccccggccccggccccggccccagagagagcgtgacccccagaagcaccgccagactgggccccccccccagccacgccagcgccgacgccaccagatgcctgccctgccccgacagccagaagctggagaaggagtgccagagcagcgaggagagcatgggcagcaacagcatgagaagcatcctggaggaggacgaggaggacgaggagccccccagagtgctgctgtaccacgagcccagaagcttcgaggtgggcatgctggtgtggcacaagcacaagaagtaccccttctggcccgccgtggtgaagagcgtgagacagagagacaagaaggccagcgtgctgtacatcgagggccacatgaaccccaagatgaagggcttcaccgtgagcctgaagagcctgaagcacttcgactgcaaggagaagcagaccctgctgaaccaggccagagaggacttcaaccaggacatcggctggtgcgtgagcctgatcaccgactacagagtgagactgggctgcggcagcttcgccggcagcttcctggagtactacgccgccgacatcagctaccccgtgagaaagagcatccagcaggacgtgctgggcaccaagctgccccagctgagcaagggcagccccgaggagcccgtggtgggctgccccctgggccagagacagccctgcagaaagatgctgcccgacagaagcagagccgccagagacagagccaaccagaagctggtggagtacatcgtgaaggccaagggcgccgagagccacctgagagccatcctgaagagcagaaagcccagcagatggctgcagaccttcctgagcagcagccagtacgtgacctgcgtggagacctacctggaggacgagggccagctggacctggtggtgaagtacctgcagggcgtgtaccaggaggtgggcgccaaggtgctgcagagaaccaacggcgacagaatcagattcatcctggacgtgctgctgcccgaggccatcatctgcgccatcagcgccgtggacgaggtggactacaagaccgccgaggagaagtacatcaagggccccagcctgagctacagagagaaggagatcttcgacaaccagctgctggaggagagaaacagaagaagaagatag

SEQ ID NO: 320988 - DNA, 501 bp, Artificial Sequence
  derived and/or modified sequence
gtgctggccgccagccagaacgaggtgcccgcccacccctggaagaactggcccaccgacggcagagtggccctggacgtgctgagcgagggcagcatctggagccaggagagcagcgccggcaccggcagagccgacagaagcctgagaggcaagcccatggagcacgtgagcagcccctgcgacagcaacagcagcagcctgcccagaggcgacgtgctgggcagcagcagaccccacagaagaagaccctgcgtgcagcagagcctgagcagcagcttcacctgcgagaaggaccccgagtgcaaggtggaccacaagaagggcctgagaaagagcgagaaccccagaggccccctggtgctgcccgccggcggcggcgcccaggacgagagcggcagcagaatccaccacaagaactggaccctggccagcaagagaggcggcaacagcgcccagaaggccagcctgtgcctgaacggcagcagcctgagcgagtag

SEQ ID NO: 320989 - protein, 262 aa, Artificial Sequence
  derived and/or modified sequence
HSYSEGLGHPRVSQALVTFHQQKPIEPRRELLTQPCRQKDPANVDYEDLFLYSNAVAEEAACPVSAPEEASPKPVLCHQSKERKPSAEMNRITTKEATSSCPPKSPLGETRQKLWRSLKMLPERGQRVRQQKSHLATVNLSSLLDVRRSTVISGPGTGKGSQDHSGDPTSGDRGYTDPCVATSLKSPSQPQAPKDRKVPTRKAERSVSCIEVTPGDRSWHQMVVRALSSQESKPEHQGLAEPENDQLPEEYQQPPPFAPGYC

SEQ ID NO: 320990 - DNA, 789 bp, Artificial Sequence
  derived and/or modified sequence
cacagctacagcgagggcctgggccaccccagagtgagccaggccctggtgaccttccaccagcagaagcccatcgagcccagaagagagctgctgacccagccctgcagacagaaggaccccgccaacgtggactacgaggacctgttcctgtacagcaacgccgtggccgaggaggccgcctgccccgtgagcgcccccgaggaggccagccccaagcccgtgctgtgccaccagagcaaggagagaaagcccagcgccgagatgaacagaatcaccaccaaggaggccaccagcagctgcccccccaagagccccctgggcgagaccagacagaagctgtggagaagcctgaagatgctgcccgagagaggccagagagtgagacagcagaagagccacctggccaccgtgaacctgagcagcctgctggacgtgagaagaagcaccgtgatcagcggccccggcaccggcaagggcagccaggaccacagcggcgaccccaccagcggcgacagaggctacaccgacccctgcgtggccaccagcctgaagagccccagccagccccaggcccccaaggacagaaaggtgcccaccagaaaggccgagagaagcgtgagctgcatcgaggtgacccccggcgacagaagctggcaccagatggtggtgagagccctgagcagccaggagagcaagcccgagcaccagggcctggccgagcccgagaacgaccagctgcccgaggagtaccagcagcccccccccttcgcccccggctactgctag

SEQ ID NO: 320991 - DNA, 789 bp, Artificial Sequence
  derived and/or modified sequence
cactcctatagtgagggcctgggccacccaagagtctcacaggccctggtgaccttccaccagcaaaaaccaattgagccaagacgcgagctgcttacccagccctgtagacaaaaagatcccgccaatgtggattacgaagacctctttctctacagcaacgctgtcgctgaggaggcagcatgtcctgtgagtgcaccagaggaggcttcgccgaaaccagtgctttgtcaccagagcaaggaacgtaagccatccgctgagatgaatcggatcactactaaggaagccacctctagctgtccaccgaagtcccctctgggagagacgcgtcagaaactctggaggtctctcaagatgttgcccgaacggggtcagcgggtgcggcagcagaaatcccatcttgctactgtgaatctgtcaagcctgctggacgtcaggaggagtacggtcataagcggccccggaaccggtaagggcagccaagaccactcaggggacccaacatccggcgacagaggctatacagacccttgcgttgccaccagcctcaagtcaccaagtcagccacaggcgccaaaggacaggaaagtgcctacacggaaagccgagagatccgtgagctgcattgaagtgacgcctggagaccgctcctggcatcaaatggtagtacgggcactgagctcccaggaaagtaagcccgaacatcaaggcttagctgaaccggagaacgatcagctcccagaagagtatcaacagccaccccctttcgcgccaggatactgttag

SEQ ID NO: 320992 - DNA, 789 bp, Artificial Sequence
  derived and/or modified sequence
cacagctacagcgagggcctgggccacccccgggtgtcccaggccctggtgaccttccaccagcagaagcccatcgagccccggcgggagctgctgacccagccctgccggcagaaggaccctgccaacgtggactatgaagatctcttcctgtacagcaatgctgtggccgaggaggccgcctgccctgtgtctgcccctgaggaggccagccccaagcctgtgctgtgccaccagagcaaggagaggaagcccagcgctgagatgaaccgcatcaccaccaaggaggccaccagcagctgcccccccaagagccccctgggggagacccggcagaagctgtggaggagcctgaagatgctgcctgagcggggccagagggtgcggcagcagaagagccacctggccaccgtgaacctgagcagcctgctggatgtgagaagaagcaccgtcatcagcggccctggcaccgggaagggcagccaggaccacagcggggaccccaccagcggggaccggggctacacagacccctgtgtggccaccagcctgaagagccccagccagccccaggcccccaaggacaggaaggtgcccaccaggaaggccgagaggtctgtgtcctgcatcgaggtgacccctggggaccgctcctggcaccagatggtggtgcgggccctgagcagccaggagagcaagccagagcaccagggcctggccgagccagaaaatgaccagctgcctgaggagtaccagcagcccccaccatttgcccctggctactgctag

SEQ ID NO: 320993 - DNA, 1990 bp, Artificial Sequence
  derived and/or modified sequence
gtccttcccaagaccacacccaggtccagtcattccctaggacttggcagagagctgtactcacagccaagatcacagcaaaatcagcaaagggaaaaggcatgcagagtgaagtccagaggcaaccagacagaagcatccagaatcctctcacagtggggtcacacaccccatgcttaactcccccaacaatgagttgtaacaacagtcaggtgtggtggtgtgtgcctgtagtcccagctacttgggagcctgaggcaggaggatcacttgagtccagcagttcaagactgcagtgagctatgatcataccactgcactccagcctgagtgacagagtgaaactctgtctctaaaatagggctcacctgcttgaggaaacaggaactgcctcggggcagccagccccgccccattgacgtgcagaccttgaatcgaaacccaggctcctgcaggcactggcacagctacagcgagggcctcggccatccaagggtctcccaggccctggtcaccttccaccagcagaagccaattgagccgcgcagggagctgctgacacagccctgcaggcagaaggatcccgcaaacgtggattacgaggatctcttcctctactccaacgcagtggccgaggaagctgcctgcccggtgtctgcccctgaggaggcctccccaaagccagtcctgtgtcaccaatcaaaggaaaggaagccgtcagcagagatgaacagaataaccaccaaggaagccacttcctcctgccccccaaaatcccctcttggagagacccgccagaaactctggaggagcctcaaaatgctccccgagagaggccagagggtccggcagcagaaaagccacctcgccactgtgaacttgtcgtcactcttggatgtccggagatccacggtgatctcaggccctgggaccggaaaaggcagccaagatcactcaggggatcccacctcgggggacagaggctacacggatccctgtgtggccacatctctcaaaagcccctcacagccccaggcaccaaaagacagaaaggtccccaccaggaaggccgagaggtcggtcagctgcattgaggtgaccccaggggacaggagttggcaccaaatggtagtgagagccctatcctcccaggagtccaagccagagcaccagggcttggcagagcctgagaacgaccagctcccggaggagtaccaacaaccgccaccctttgcccctgggtactgctagagaacaggtccaccctggctctgggactcgctgccaggggctgccacactcctgaatgccttaacatttcttccatggccccacaccatggcatccgggggtcttcgggaacccgggaaatggaataaagatgtttttggggtctgttcctgcactcacccatggggtgagctggttattttagcaacaatcatcagagtgacgctgatggtttggggcaccagctatacatcagccccagtgccagaccttctattcattattttacgcctcagagcaaggccctcagggagggtcatcctccatgttttgaagaagagactgaggttcagagaggataagaggcgtgaccaaggccacagagctatgggtgtcagcaccaggatttgaagccaggtgaatccgagcccttttcccatatcatctgtttgttctgttgtctaaaagcacactgcaagccgggctcagtggctcatgcctgtagtcccagcactctgtggggccgaggcaggcagatcgcttgaggtcaggagttcgagaccagcctggccaacatggtgaaaccccgtctatactaaaaaattcaaaaattacccggacgtggtggcgcatgcctgtaatcccagctacttgggagcctgaggcgggagaattgcttgaacccgggaggcagaggttgcagtgagccgagatcgcatcactgcagtccagcctggatgacagagtgagactccatctc

SEQ ID NO: 320994 - DNA, 789 bp, Artificial Sequence
  derived and/or modified sequence
cacagctacagcgagggcctgggccacccccgggtgagccaggccctggtgacctttcatcagcagaagccaattgagccaagacgcgagctcctgacacagccctgccgacaaaaagatccagccaacgtggattacgaagatctttttctttactcaaatgctgtcgcagaggaagctgcttgtccagtaagtgctcctgaggaggcttctcccaaacctgtgttgtgtcaccagtcaaaagagagaaagccctccgccgagatgaatcggatcacgaccaaggaagccacttcctcttgcccacccaaatcaccactcggggaaacacgccagaagttatggaggtctttgaaaatgcttcccgaacgaggacagagggtgaggcagcagaagagtcatctcgcaactgtgaacctgagttcacttctcgacgtgagaagaagcacagtgataagtgggcctggcacgggtaaagggagtcaggaccactccggggaccctacgtctggtgacagaggttatacagatccttgtgtcgccactagcttaaaatcaccaagccagccacaggcccccaaagataggaaggttccaactcggaaagctgagagatcagtcagctgtatcgaagtgaccccgggcgataggagctggcaccaaatggtcgtgcgcgccctttccagccaggaatctaaaccagagcatcagggattggctgaaccagagaacgaccagctgcccgaggaataccagcagccccctccatttgcacccgggtattgttag

SEQ ID NO: 320995 - DNA, 789 bp, Artificial Sequence
  derived and/or modified sequence
catagctactctgaaggcttgggccatccgagagtgtcacaggcgctggtcaccttccaccagcagaagccaattgaaccgaggcgcgagctcctaactcagccgtgtagacagaaggacccagccaacgtggattatgaggacttgtttctctattctaatgcagtggcagaggaagctgcctgtcctgtgtctgctcccgaagaagcgtcaccgaaaccagtcctctgccaccagagtaaagaacgcaagccctctgctgaaatgaatcgaattacaacaaaggaggcaacctcctcttgccccccaaaatcacctctcggcgagactcgacaaaagttatggagatcactcaaaatgctgccggagaggggacagagggtgagacagcagaaaagccacctggctactgtgaatctgagcagcttgctggatgtccggaggagcaccgtgatttctgggccaggcaccgggaaggggtcacaggatcactccggggatcctacatcgggggatagggggtatacagatccgtgcgtcgctaccagcctgaaatccccaagccaaccgcaggccccaaaagaccgcaaggtcccaacccgaaaggcagagcgatctgtgtcttgcatcgaagtgacgcccggagatcgctcttggcaccagatggtagtcagagccctgagtagccaagagtccaagccggagcatcaagggttagctgaacccgagaacgaccagctgccggaagaataccagcagcccccacccttcgcacctggttactgctag

SEQ ID NO: 320996 - protein, 364 aa, Artificial Sequence
  derived and/or modified sequence
MSDYSPGGGSAGGPSQPPGGGGPGIRKDAFADAVQRARQIAAKIGGDAATTVNNSTPDFGFGGQKRQLEDGDQPESKKLASQGDSISSQLGPIHPPPRTSMTEEYRVPDGMVGLIIGRGGEQINKIQQDSGCKVQISPDSGGLPERSVSLTGAPESVQKAKMMLDDIVSRGRGGPPGQFHDNANGGQNGTVQEIMIPAGKAGLVIGKGGETIKQLQERAGVKMILIQDGSQNTNVDKPLRIIGDPYKVQQACEMVMDILRERDQGGFGDRNEYGSRIGGGIDVPVPRHSVGVVIGRSGEMIKKIQNDAGVRIQFKQDDGTGPEKIAHIMGPPDRCEHAARIINDPSSSSFLLPTPGHRPSCLSG

SEQ ID NO: 320997 - DNA, 2133 bp, Artificial Sequence
  derived and/or modified sequence
atgtccgattacagcacaggcggcccgccgccaggccctccaccacctgccgggggagggggaggcgctgggggcgcggggggaggacctccaccagggcccccgggggccggggatagagggggaggtggaccaggcggaggaggccctggcggcgggtccgccgggggaccttcccagccaccgggcgggggtgggccaggtatcagaaaagatgcctttgcggacgctgtgcagcgcgcacggcagattgccgctaagatcgggggtgacgccgccactaccgtgaacaacagcacaccggactttggtttcggagggcaaaagcgccaactggaggacggcgaccagcccgagagtaaaaaactggccagtcagggggactccattagctcacaactggggccaatccaccctcctccgcgcacttccatgactgaggaatatagagtgcccgatggcatggtcgggctgataatcgggcgagggggtgagcaaataaacaagattcagcaggatagtggttgtaaagttcagatcagtccagatagtggaggtttacctgaaagaagtgtgtccctgactggagctcccgagtccgtgcagaaggccaagatgatgctggatgacattgtgtcccgtggccgcgggggcccacccggccagttccacgataacgctaacggaggccaaaatggaacggttcaggaaatcatgattcctgcaggtaaggctggcctcgtcataggaaagggaggggaaacaatcaagcagctccaagaacgagctggtgtgaaaatgattctcattcaggatggatctcaaaataccaacgtcgataagcccctgcgtataatcggagatccttataaggtgcagcaggcatgtgagatggtgatggatatccttcgcgagcgagaccaaggcggctttggcgatcgaaacgaatatgggtctcgcattggcggtgggattgatgtgcccgtccctcgtcatagcgtgggagttgtgattggacggtccggagaaatgattaaaaagatacagaacgacgccggcgtgcgaatccagtttaagcaagacgacggaacgggaccagagaaaattgcacatattatgggcccaccagataggtgcgagcacgctgcgagaatcatcaatgatctattacaaagtctgcgctccgggcctccagggccgccgggaggacctgggatgccccctggcggacgtggccgggggcgcggacagggtaactgggggccacctgggggggaaatgaccttctctatccccacccacaagtgtggattggtcattggaaggggcggggaaaacgtcaaagccatcaaccagcagacaggcgcattcgtggaaattagccgccagctgccacccaacggcgaccccaactttaagttatttattatccgagggtcaccacagcagatcgaccacgctaaacaactcatcgaagagaagatcgaagggcctctttgtcccgtgggccccggacccgggggacctggcccagccggacctatgggaccgtttaatcctggaccatttaaccaggggccacctggcgccccaccccatgctggaggcccgccaccacaccagtacccgccacaaggatggggcaatacctacccacaatggcagccacccgccccgcatgatccgtccaaggccgcggctgccgcagctgaccccaacgcagcatgggcggcatattattcgcactactatcagcaacccccaggtccggtgcctggacctgcgcctgctccggccgctccccccgcccagggtgagcccccacagcctcctcccacgggccagagtgactataccaaggcctgggaggagtactacaagaaaatcggccagcagccgcagcaacctggtgccccgccacaacaggactatacgaaggcatgggaggagtactacaagaaacaggcccaagtcgctacagggggggggcccggtgctccacctggcttcctcgcgccgcccacagtttttcagcccctactctcttccgctctagcccagcttccccggccaagacctagccccctcccggggctggtgtgttgtctgttcatttgttcccgaggcgactag

SEQ ID NO: 320998 - DNA, 2136 bp, Artificial Sequence
  derived and/or modified sequence
atgtcggactacagcaccggagggccaccacccgggcccccccctcccgccggcggcggcggcggtgccggaggtgctggtggaggtccacctcccggccctcctggtgccggtgaccgagggggtgggggaccagggggaggcggacccggggggggtagcgccgggggaccttcccagcccccagggggggggggtccaggcatcagaaaggatgccttcgccgatgcggtgcagcgggctcggcagatcgccgcaaagataggcggcgacgccgccacgacggtgaacaacagcacgcctgactttggatttggcggtcagaaacgtcagcttgaggacggcgaccaacccgagtctaaaaagttggcatctcagggggactcaatcagcagccaactggggcctatccaccctccaccacgtaccagtatgaccgaggaatacagggtgcctgatggaatggtcggcttgattatcggccgaggcggtgagcagataaataaaattcagcaggattctggttgtaaagtgcagatctcccctgattctggaggtttacccgagcggtcagtttcactgacgggagcgcccgaaagcgtgcagaaggcgaaaatgatgcttgatgacatcgtcagcagggggagaggtggtccgccagggcaatttcatgataacgccaacggcggccagaatggcacagtccaggagattatgatcccggccgggaaggccggtttggtgattggtaaaggcggggaaactatcaagcagctgcaggaacgtgctggggtcaagatgatcctgatccaagacggttcccagaatacaaacgtggataagccactgagaatcatcggggatccgtacaaggtgcagcaggcctgtgaaatggtgatggacatcctgcgcgagcgggatcagggtggtttcggggaccggaacgagtacggttctagaattgggggcggaattgacgtgcctgtcccgagacactccgtgggcgtggtcattgggcgaagcggcgagatgattaagaagatacaaaatgacgcaggtgttcgcatccagttcaagcaggatgacggcactggcccggaaaaaatcgcccacataatggggccaccagaccggtgcgaacatgcggcccgcatcatcaatgatcttctgcaaagcctccggtccggaccacccggtcccccgggcggaccagggatgccccccggtggccgcgggaggggacgcggtcagggtaactggggacctcctggcggagaaatgacattttctattccaactcataagtgtggcctcgtgataggacgcggaggagaaaacgtgaaagctattaatcagcagaccggagcattcgttgagataagccggcagttgcccccaaacggtgatcctaacttcaagctcttcataatcaggggaagtcctcagcagatagaccacgctaaacagcttattgaggagaaaattgaaggacctctgtgtcccgtgggcccaggaccaggcggaccaggccccgcagggcctatggggccttttaaccccggaccgtttaatcagggccctccaggcgccccgccccacgcaggaggacctccaccccatcagtatccccctcaggggtggggaaacacctatccgcagtggcaaccacccgccccacacgatccgagtaaggcagctgctgccgctgctgaccctaatgccgcttgggctgcctactatagtcattactatcagcagcccccaggccccgtgccgggacctgcccccgcacctgccgctcccccagcccagggagagcccccccaacctccaccgaccggacaatcggattacacaaaggcgtgggaagaatactacaagaagatcggacagcaacctcagcagcctggagcacccccacaacaggactacaccaaagcctgggaagagtactacaagaaacaggcgcaggtcgcaacaggtggaggacccggtgctccaccaggtagccagcccgactacagtgccgcttgggccgaatattaccggcaacaagcagcgtattatggacagacccccggccccggaggtccacagcccccgcccacccagcaaggtcagcagcaggcccagtag

SEQ ID NO: 320999 - DNA, 1095 bp, Artificial Sequence
  derived and/or modified sequence
atgtctgattacagtcccgggggtggtagcgcaggaggaccttctcagccacctggggggggcggaccaggcatacggaaagacgctttcgctgacgccgtccagagagcccgacagattgccgcgaagattggcggtgatgctgctactacggtcaacaatagtacacctgactttggattcggtgggcaaaaacgccaattggaggatggagaccaaccagaatccaaaaagctggcttcgcagggagatagcatctcttctcaactgggaccaattcaccctcccccacgcacctctatgacggaggagtacagagttccagacggcatggtcggactgatcatcgggcgcggcggcgagcagatcaataaaatacagcaggattctggatgcaaagtgcagatatctcccgactccggaggactgccggaaaggtcggtgtcactgacgggcgcacccgaaagcgtccagaaggcaaagatgatgctcgatgatattgtctctaggggacgaggcggtcctcccggccaattccatgacaatgcaaacggaggacaaaatggcacggtgcaggaaatcatgatccccgctgggaaagcagggctggtgatcggaaaaggtggcgaaactatcaaacagctgcaggagagagctggcgtcaagatgatcttgatacaggatggcagccaaaatactaacgttgataaaccattgagaattataggtgacccttataaagtacagcaggcatgcgaaatggttatggatattcttcgcgaacgggaccaaggggggttcggtgataggaatgagtatggcagccgtatcggcggaggcatagatgtgccagtaccacgccacagcgtgggcgtggtcattggtcgtagtggagaaatgattaagaagatccagaacgatgctggtgtccgcatccagtttaagcaagacgacggcacaggccccgagaaaattgcccacattatgggtccaccagatcggtgcgaacacgctgcccgcatcatcaatgatcctagtagctccagctttctactgcccacacctggccacaggcccagttgtctctccgggtag

SEQ ID NO: 321000 - DNA, 2243 bp, Artificial Sequence
  derived and/or modified sequence
agagtgctccgcggccgtgtggagcgaggccttgttcccgcgttgagccgccgccgccgccgccgcctcctcagcttcagcctccgcgccaggcccggccccgccgcgccatgtcggactacagcacgggaggacccccgcccgggccgccgccgcccgccggcgggggcgggggagccggaggcgccgggggaggccctccgccgggcccgccaggcgcgggggaccggggcggcggcggtcccggcggcggcggcccgggcggggggtcggccgggggcccctctcagccacccggcggaggcggcccgggaatccgcaaggacgctttcgccgacgccgtgcagcgggcccgccagattgcagccaaaattggaggcgatgctgccacgacagtgaataacagcactcctgattttggttttgggggccaaaagagacagttggaagatggagatcaaccggagagcaagaagctggcttcccagggagactcaatcagttctcaacttggacccatccatcctcccccaaggacttcaatgacagaagagtacagggtcccagacggcatggtgggcctgatcattggcagaggaggtgaacaaattaacaaaatccaacaggattcaggctgcaaagtacagatttctccagacagcggtggcctacccgagcgcagtgtgtccttgacaggagccccagaatctgtccagaaagccaagatgatgctggatgacattgtgtctcggggtcgtgggggccccccaggacagttccacgacaacgccaacgggggccagaacggcaccgtgcaggagatcatgatccccgcgggcaaggccggcctggtcattggcaagggcggggagaccattaagcagctgcaggaacgcgctggagtgaagatgatcttaattcaggacggatctcagaatacgaatgtggacaaacctctccgcatcattggggatccttacaaagtgcagcaagcctgtgagatggtgatggacatcctccgggaacgtgaccaaggcggctttggggaccggaatgagtacggatctcggattggcggaggcatcgatgtgccagtgcccaggcattctgttggcgtggtcattggccggagtggagagatgatcaagaagatccagaatgatgctggcgtgcggatacagttcaagcaagatgacgggacagggcccgagaagattgctcatataatggggcccccagacaggtgcgagcacgcagcccggatcatcaacgacctcctccagagcctcaggagtggtcccccaggtcctccagggggtccaggcatgcccccggggggccgaggccgaggaagaggccaaggcaattggggtccccctggcggggagatgaccttctccatccccactcacaagtgtgggctggtcatcggccgaggtggcgagaatgtgaaagccataaaccagcagacgggagccttcgtagagatctcccggcagctgccacccaacggggaccccaacttcaagttgttcatcatccggggttcaccccagcagattgaccacgccaagcagcttatcgaggaaaagatcgagggtcctctctgcccagttggaccaggcccaggtggcccaggccctgctggcccaatggggcccttcaatcctgggcccttcaaccaggggccacccggggctcccccacatgccggggggccccctcctcaccagtacccaccccagggctggggcaatacctacccccagtggcagccgcctgctcctcatgacccaagcaaagcagctgcagcggccgcggaccccaacgccgcgtgggccgcctactactcacactactaccagcagcccccgggccccgtccccggccccgcaccggcccctgcggccccaccggctcagggtgagccccctcagcccccacccaccggccagtcggactacactaaggcctgggaagagtattacaaaaagatcggccagcagccccagcagcccggagcacccccacagcaggactacacgaaggcttgggaggagtactacaagaagcaagcgcaagtggccaccggagggggtccaggagctcccccaggcttcctggccccccccacggtgttccagcccctcctctcttccgccctggctcagctcccgcggccccgcccgtcccccctcccaggactggtctgttgtcttttcatctgttcaagaggagattga

SEQ ID NO: 321001 - DNA, 3248 bp, Artificial Sequence
  derived and/or modified sequence
agagtgctccgcggccgtgtggagcgaggccttgttcccgcgttgagccgccgccgccgccgccgcctcctcagcttcagcctccgcgccaggcccggccccgccgcgccatgtcggactacagcacgggaggacccccgcccgggccgccgccgcccgccggcgggggcgggggagccggaggcgccgggggaggccctccgccgggcccgccaggcgcgggggaccggggcggcggcggtcccggcggcggcggcccgggcggggggtcggccgggggcccctctcagccacccggcggaggcggcccgggaatccgcaaggacgctttcgccgacgccgtgcagcgggcccgccagattgcagccaaaattggaggcgatgctgccacgacagtgaataacagcactcctgattttggttttgggggccaaaagagacagttggaagatggagatcaaccggagagcaagaagctggcttcccagggagactcaatcagttctcaacttggacccatccatcctcccccaaggacttcaatgacagaagagtacagggtcccagacggcatggtgggcctgatcattggcagaggaggtgaacaaattaacaaaatccaacaggattcaggctgcaaagtacagatttctccagacagcggtggcctacccgagcgcagtgtgtccttgacaggagccccagaatctgtccagaaagccaagatgatgctggatgacattgtgtctcggggtcgtgggggccccccaggacagttccacgacaacgccaacgggggccagaacggcaccgtgcaggagatcatgatccccgcgggcaaggccggcctggtcattggcaagggcggggagaccattaagcagctgcaggaacgcgctggagtgaagatgatcttaattcaggacggatctcagaatacgaatgtggacaaacctctccgcatcattggggatccttacaaagtgcagcaagcctgtgagatggtgatggacatcctccgggaacgtgaccaaggcggctttggggaccggaatgagtacggatctcggattggcggaggcatcgatgtgccagtgcccaggcattctgttggcgtggtcattggccggagtggagagatgatcaagaagatccagaatgatgctggcgtgcggatacagttcaagcaagatgacgggacagggcccgagaagattgctcatataatggggcccccagacaggtgcgagcacgcagcccggatcatcaacgacctcctccagagcctcaggagtggtcccccaggtcctccagggggtccaggcatgcccccggggggccgaggccgaggaagaggccaaggcaattggggtccccctggcggggagatgaccttctccatccccactcacaagtgtgggctggtcatcggccgaggtggcgagaatgtgaaagccataaaccagcagacgggagccttcgtagagatctcccggcagctgccacccaacggggaccccaacttcaagttgttcatcatccggggttcaccccagcagattgaccacgccaagcagcttatcgaggaaaagatcgagggtcctctctgcccagttggaccaggcccaggtggcccaggccctgctggcccaatggggcccttcaatcctgggcccttcaaccaggggccacccggggctcccccacatgccggggggccccctcctcaccagtacccaccccagggctggggcaatacctacccccagtggcagccgcctgctcctcatgacccaagcaaagcagctgcagcggccgcggaccccaacgccgcgtgggccgcctactactcacactactaccagcagcccccgggccccgtccccggccccgcaccggcccctgcggccccaccggctcagggtgagccccctcagcccccacccaccggccagtcggactacactaaggcctgggaagagtattacaaaaagatcggccagcagccccagcagcccggagcacccccacagcaggactacacgaaggcttgggaggagtactacaagaagcaagcgcaagtggccaccggagggggtccaggagctcccccaggctcccagccagactacagtgccgcctgggcggaatattacagacagcaggccgcttactacggacagaccccaggtcctggcggcccccagccgccgcccacgcagcagggacagcagcaggctcaatgaatcgaatgaatgtgaacttcttcatctgtgaaaaatcttttttttttccattttgttctgtttgggggcttctgttttgtttggcgagagagcgatggctgccgtggggagtactggggagccctcgcggcaagcagggtgggggggacttgggggcatgccgggccctcactctctcgcctgttctgtgtctcacatgctttttctttcaaaattgggatccttccatgttgagccagccagagaagatagcgagatctaaatctctgccaaaaaaaaaaaaaaacttaaaaattaaaaacacaaagagcaaagcagaacttataaaattatatatatatatattaaaaagtctctattcttcaccccccagccttcctgaacctgcctctctgaggataaagcaattcattttctcccaccctcggccctcttgtttttaaaataaacttttaaaaaggaaaaaaaaaagtcactcttgctatttcttttttttagttagaggtggaacattccttggaccaggtgttgtattgcaggaccccttcccccagcagccaagccccctcttctctccctcccgccctggctcagctcccgcggccccgcccgtcccccctcccaggactggtctgttgtcttttcatctgttcaagaggagattgaaactgaaaacaaaatgagaacaacaaaaaaaattgtatggcagtttttactttttatcgctcgtttttaacttcacaaataaatgataacaaaacctccccgtctgcgggtgctgtctgtctccccccctttccttccctccctgtagttttgaagcggatgtttgttctttatagatgttgtttaaaaagcctgataatggtgattgaaatttacaaactttgtgtttttttttttttaagaaaaatataaaatagttttcttcaggctcaatgtgctttcctaaccgtgccccccccccttttttttttttgttaaataaagtgctttttgttt

SEQ ID NO: 321002 - DNA, 1177 bp, Artificial Sequence
  derived and/or modified sequence
gccttgttcccgcgttgagccgccgccgccgccgccgcctcctcagcttcagcctccgcgccaggcccggccccgccgcgccatgtcggactacagcccgggcggggggtcggccgggggcccctctcagccacccggcggaggcggcccgggaatccgcaaggacgctttcgccgacgccgtgcagcgggcccgccagattgcagccaaaattggaggcgatgctgccacgacagtgaataacagcactcctgattttggttttgggggccaaaagagacagttggaagatggagatcaaccggagagcaagaagctggcttcccagggagactcaatcagttctcaacttggacccatccatcctcccccaaggacttcaatgacagaagagtacagggtcccagacggcatggtgggcctgatcattggcagaggaggtgaacaaattaacaaaatccaacaggattcaggctgcaaagtacagatttctccagacagcggtggcctacccgagcgcagtgtgtccttgacaggagccccagaatctgtccagaaagccaagatgatgctggatgacattgtgtctcggggtcgtgggggccccccaggacagttccacgacaacgccaacgggggccagaacggcaccgtgcaggagatcatgatccccgcgggcaaggccggcctggtcattggcaagggcggggagaccattaagcagctgcaggaacgcgctggagtgaagatgatcttaattcaggacggatctcagaatacgaatgtggacaaacctctccgcatcattggggatccttacaaagtgcagcaagcctgtgagatggtgatggacatcctccgggaacgtgaccaaggcggctttggggaccggaatgagtacggatctcggattggcggaggcatcgatgtgccagtgcccaggcattctgttggcgtggtcattggccggagtggagagatgatcaagaagatccagaatgatgctggcgtgcggatacagttcaagcaagatgacgggacagggcccgagaagattgctcatataatggggcccccagacaggtgcgagcacgcagcccggatcatcaacgacccctcctcctcctcctttctccttccaacccccggccaccgtccatcctgccttagtgggtag

SEQ ID NO: 321003 - DNA, 2133 bp, Artificial Sequence
  derived and/or modified sequence
atgtctgactacagcactggaggccccccacctggccccccacctcctgctgggggcggcggcggggccggcggggccggcggcggccccccacctggccccccaggagctggggacagaggaggcggcggccctgggggcggcggccctgggggcggcagcgctgggggccccagccagcccccaggcggcggcggccctggcatcaggaaggatgcctttgctgatgctgtgcagagggcccggcagattgctgccaagattggaggagatgctgccaccaccgtgaacaacagcaccccagactttggatttggaggccagaagaggcagctggaggatggagaccagcctgagagcaagaagctggccagccagggcgacagcatcagcagccagctgggccccatccaccccccacccaggacctccatgacagaggagtacagagtgcctgatggcatggtgggcctcatcatcggccggggcggggagcagatcaacaagatccagcaggacagcggctgcaaggtgcagatcagcccagacagcggcggcctgcctgagaggtctgtgtccctgactggagcccctgagagcgtgcagaaggccaagatgatgctggatgacatcgtgtcccggggccggggcggccccccaggccagttccatgacaatgccaacggcggccagaatggcaccgtgcaggagatcatgatcccagctgggaaggccggcctggtgattggaaaaggaggagagaccatcaagcagctgcaggagagagctggggtgaagatgatcctgatccaggacggcagccagaacaccaacgtggacaagcccctgcgcatcatcggggacccctacaaggtgcagcaggcctgtgagatggtgatggacatcctgcgggagcgggaccagggcggctttggagacagaaatgaatatggcagcagaattggaggcggcattgatgtgcctgtgcccaggcacagcgtgggcgtggtgattggccgctctggagagatgatcaagaagatccagaatgatgctggggtgcgcatccagttcaagcaggatgatggcaccggccctgagaagatcgcccacatcatgggccccccagacagatgtgaacatgctgcccgcatcatcaatgacctgctgcagagcctgcggagcggccccccaggccccccaggcggccctggcatgcctcctgggggccggggccggggccggggccagggcaactggggccccccaggaggagagatgaccttcagcatccccacccacaagtgtggcctggtgattggaagaggaggagaaaatgtgaaggccatcaaccagcagacaggagcctttgtggagatcagccggcagctgcccccaaatggagaccccaacttcaagctgttcatcatccggggcagcccccagcagattgaccacgccaagcagctgattgaggagaagattgagggccccctgtgccctgtgggccctggccctgggggccctggccctgctggccccatgggccccttcaaccctggccccttcaaccagggccccccaggggcccctcctcatgctgggggccccccaccccaccagtacccaccccagggctggggcaacacctacccccagtggcagcccccagcccctcatgaccccagcaaggctgctgctgctgctgctgaccccaatgctgcctgggccgcctactacagccactactaccagcagcccccaggccctgtgcccggccctgccccagccccagctgcccccccagcccagggcgagcccccccagcccccacccaccggccagagcgactacaccaaggcctgggaggagtactacaagaagattggccagcagccccagcagcccggggccccaccccagcaggactacaccaaggcctgggaggagtactacaagaagcaggcccaggtggccaccggcggcggccctggggcccctcctggcttcctggcccccccaacagtgttccagcccctgctgagcagcgccctggcccagctgccccggccccggcccagccccctgcccggcctggtgtgctgcctcttcatctgcagcagaggagactag

SEQ ID NO: 321004 - DNA, 2136 bp, Artificial Sequence
  derived and/or modified sequence
atgtctgactacagcactggaggccccccacctggccccccacctcctgctgggggcggcggcggggccggcggggccggcggcggccccccacctggccccccaggagctggggacagaggaggcggcggccctgggggcggcggccctgggggcggcagcgctgggggccccagccagcccccaggcggcggcggccctggcatcaggaaggatgcctttgctgatgctgtgcagagggcccggcagattgctgccaagattggaggagatgctgccaccaccgtgaacaacagcaccccagactttggatttggaggccagaagaggcagctggaggatggagaccagcctgagagcaagaagctggccagccagggcgacagcatcagcagccagctgggccccatccaccccccacccaggacctccatgacagaggagtacagagtgcctgatggcatggtgggcctcatcatcggccggggcggggagcagatcaacaagatccagcaggacagcggctgcaaggtgcagatcagcccagacagcggcggcctgcctgagaggtctgtgtccctgactggagcccctgagagcgtgcagaaggccaagatgatgctggatgacatcgtgtcccggggccggggcggccccccaggccagttccatgacaatgccaacggcggccagaatggcaccgtgcaggagatcatgatcccagctgggaaggccggcctggtgattggaaaaggaggagagaccatcaagcagctgcaggagagagctggggtgaagatgatcctgatccaggacggcagccagaacaccaacgtggacaagcccctgcgcatcatcggggacccctacaaggtgcagcaggcctgtgagatggtgatggacatcctgcgggagcgggaccagggcggctttggagacagaaatgaatatggcagcagaattggaggcggcattgatgtgcctgtgcccaggcacagcgtgggcgtggtgattggccgctctggagagatgatcaagaagatccagaatgatgctggggtgcgcatccagttcaagcaggatgatggcaccggccctgagaagatcgcccacatcatgggccccccagacagatgtgaacatgctgcccgcatcatcaatgacctgctgcagagcctgcggagcggccccccaggccccccaggcggccctggcatgcctcctgggggccggggccggggccggggccagggcaactggggccccccaggaggagagatgaccttcagcatccccacccacaagtgtggcctggtgattggaagaggaggagaaaatgtgaaggccatcaaccagcagacaggagcctttgtggagatcagccggcagctgcccccaaatggagaccccaacttcaagctgttcatcatccggggcagcccccagcagattgaccacgccaagcagctgattgaggagaagattgagggccccctgtgccctgtgggccctggccctgggggccctggccctgctggccccatgggccccttcaaccctggccccttcaaccagggccccccaggggcccctcctcatgctgggggccccccaccccaccagtacccaccccagggctggggcaacacctacccccagtggcagcccccagcccctcatgaccccagcaaggctgctgctgctgctgctgaccccaatgctgcctgggccgcctactacagccactactaccagcagcccccaggccctgtgcccggccctgccccagccccagctgcccccccagcccagggcgagcccccccagcccccacccaccggccagagcgactacaccaaggcctgggaggagtactacaagaagattggccagcagccccagcagcccggggccccaccccagcaggactacaccaaggcctgggaggagtactacaagaagcaggcccaggtggccaccggcggcggccctggggcccctcctggcagccagcctgactacagcgctgcctgggccgagtactaccggcagcaggccgcctactacggccagaccccaggccctgggggcccccagcccccacccacccagcagggccagcagcaggcccagtag

SEQ ID NO: 321005 - DNA, 1095 bp, Artificial Sequence
  derived and/or modified sequence
atgtctgactacagccctgggggcggcagcgctgggggccccagccagcccccaggcggcggcggccctggcatcaggaaggatgcctttgctgatgctgtgcagagggcccggcagattgctgccaagattggaggagatgctgccaccaccgtgaacaacagcaccccagactttggatttggaggccagaagaggcagctggaggatggagaccagcctgagagcaagaagctggccagccagggcgacagcatcagcagccagctgggccccatccaccccccacccaggacctccatgacagaggagtacagagtgcctgatggcatggtgggcctcatcatcggccggggcggggagcagatcaacaagatccagcaggacagcggctgcaaggtgcagatcagcccagacagcggcggcctgcctgagaggtctgtgtccctgactggagcccctgagagcgtgcagaaggccaagatgatgctggatgacatcgtgtcccggggccggggcggccccccaggccagttccatgacaatgccaacggcggccagaatggcaccgtgcaggagatcatgatcccagctgggaaggccggcctggtgattggaaaaggaggagagaccatcaagcagctgcaggagagagctggggtgaagatgatcctgatccaggacggcagccagaacaccaacgtggacaagcccctgcgcatcatcggggacccctacaaggtgcagcaggcctgtgagatggtgatggacatcctgcgggagcgggaccagggcggctttggagacagaaatgaatatggcagcagaattggaggcggcattgatgtgcctgtgcccaggcacagcgtgggcgtggtgattggccgctctggagagatgatcaagaagatccagaatgatgctggggtgcgcatccagttcaagcaggatgatggcaccggccctgagaagatcgcccacatcatgggccccccagacagatgtgaacatgctgcccgcatcatcaatgaccccagcagcagcagcttcctgctgcccaccccaggccaccggcccagctgcctgtctggatag

SEQ ID NO: 321006 - DNA, 2133 bp, Artificial Sequence
  derived and/or modified sequence
atgagcgactacagcaccggcggccccccccccggcccccccccccctgccggcggcgggggtggcgctggcggggccgggggagggcctccacccggcccgccaggggccggagatagaggtggagggggacctggcggcggcggacctggtggcgggtccgcagggggacccagccaacctcctggcggcggggggcctggaattaggaaggacgcgttcgctgatgccgtccagcgagctcggcaaatcgccgccaagattgggggcgacgctgccacgaccgtgaacaatagtaccccagatttcggcttcggaggacagaaacgccagctggaagacggggaccagcccgagtctaagaagttagcttcccagggcgactctatcagtagccagctgggccccatccatcccccccctaggacctctatgacagaagaatatcgggtgcccgatggcatggtcggactcatcatcgggcgggggggggaacagataaataaaatacagcaagatagtggttgtaaagtgcaaatctcccctgattcggggggcctacccgaaagaagcgtgagcctgacaggcgccccagaatccgtgcagaaggccaaaatgatgctggatgacatcgtctctcgaggtcgaggcggtcctcctgggcagttccacgataacgccaatggcggccagaacgggactgtccaggagattatgattcctgccggaaaggccggtttagtgataggtaagggaggagagacgataaagcagctccaggagcgggctggggtgaagatgatcttaattcaggatggctcccagaacacgaatgtggacaagcccctgcgcataattggagacccctataaggtccaacaggcatgcgagatggtgatggacatcctcagagagcgagaccaagggggatttggcgatagaaacgaatatgggtctcggatcggaggagggatcgacgtgcccgtccccagacactctgtaggtgtggtaatcggacggagcggcgaaatgattaagaaaatacaaaatgatgctggggtacgtatccagttcaagcaggatgacggaaccggacccgagaaaatcgcccacattatgggtcctccagataggtgtgagcatgccgcgcggattataaacgacctcctgcagtcactgcggtccgggccccccggacctcctgggggaccggggatgcctcctgggggaagaggacgcggtcgcggccaggggaattggggtccgccaggaggcgagatgacattttcaatcccaactcataaatgtggcctagttatagggagaggcggtgaaaatgtgaaggctatcaaccagcaaactggggctttcgtggagatttcccgacagctacctcctaacggtgatcccaattttaaactcttcattattagagggagtccacagcagattgatcatgccaaacaactgatcgaggagaaaatcgaaggaccactctgtcccgtgggtcccgggcccggggggcctgggcccgctgggcctatgggaccattcaatccaggtcctttcaaccaggggcccccaggagcccctccacacgctggcggccctcccccacaccagtaccccccacaaggttgggggaacacgtatccacagtggcagcctcccgcacctcatgaccccagtaaggccgccgcagcagcagcggatcctaatgctgcctgggctgcttactacagtcattactaccagcagcctccgggccctgtgccgggacctgcacctgctcccgccgcacctccagcgcagggtgagcccccgcaacctcctcccactggccagagcgattatacgaaggcctgggaggagtattataaaaaaatcggacagcagccccagcagccgggagcccccccacaacaggactacacaaaagcgtgggaggagtactataaaaaacaggctcaggttgctactggcggcggtcctggtgcaccgcccgggtttctggcccctccgactgtgttccagcccctgcttagttctgccctggcacaactgccccgtccaaggccttctcctctccctgggctggtatgttgtctctttatctgctcccggggtgattag

SEQ ID NO: 321007 - DNA, 2136 bp, Artificial Sequence
  derived and/or modified sequence
atgagcgactacagcaccggcggccccccccccggcccccccccccctgccggggggggaggcggcgctggtggagccggagggggcccccctcccggaccacctggtgcaggggacaggggcggcgggggcccgggaggcggagggccaggcggcgggtccgccggaggccctagtcaaccgccaggagggggtggtcctgggatacgcaaggatgccttcgctgatgccgtccaaagagcccggcaaatcgccgccaagattgggggagacgccgcaacaacagtgaacaattctacccccgacttcggcttcggaggccagaagagacaactggaagatggggatcagcccgagtcaaagaaactggcatcgcagggagactcaattagtagtcaattggggcctatacatccacctcctcgaaccagtatgactgaagagtacagagttcccgacggcatggtaggactgataattggccgtggcggcgagcaaattaacaagattcagcaagacagcgggtgtaaggtccaaatcagtcctgacagcggaggcctgccagagagaagcgtgtcattgaccggggcccctgagagcgtgcagaaagcaaaaatgatgttagacgatatcgtgtccagagggagaggcgggcccccgggacagttccatgataatgccaatgggggacagaacggcacagtgcaagaaattatgatccccgcgggaaaggctggcctggtgattggcaagggcggagagacaatcaagcagctccaggaaagggccggggtaaagatgatcctgatccaagacggatcccagaatactaacgttgacaaacctctgcggataattggcgacccttacaaggtgcaacaagcatgtgagatggtcatggatattctcagagaaagggaccaaggaggattcggcgatagaaacgagtacggcagtaggattggtggaggtattgatgtacccgttcctcgccactctgtgggcgttgttataggtcgaagcggtgaaatgattaaaaagattcaaaacgacgccggcgtgaggattcaatttaagcaggacgacggcactgggccagagaagatcgcacacattatgggacctccagaccgctgcgagcacgccgcaagaattatcaatgacctactgcagagtctgagaagcggccctcccggcccgcccgggggacccgggatgccacccggtggacgcgggcgcggccgaggacagggcaactggggacctcctggaggagagatgacattctctatccctactcataagtgcggcctcgtgattgggcgaggcggagaaaacgttaaagccatcaaccagcaaacgggcgctttcgttgagatttcgcgtcagctgccacccaacggagatcccaatttcaagttgttcatcataagggggtcgcctcagcagatagaccacgcaaaacaactgattgaggaaaagatcgagggccccctgtgcccggtcggacccgggccaggcgggcctggtccagctggccccatgggcccctttaacccagggccatttaaccagggaccccccggggcccccccacatgctggggggccgccccctcaccaatacccaccacagggctggggaaacacatacccccaatggcaacccccagcccctcacgaccctagtaaggcggctgccgctgccgctgaccctaacgccgcctgggcagcctactattcccactactaccagcagcctccaggccccgtgcccggccctgctcctgcacccgcagcaccccctgcacagggggagcctccccaacctccgccaaccgggcagagtgattatacaaaagcttgggaagagtattacaagaagatcggccagcagcctcagcagcccggggctcccccacagcaagactatacaaaagcatgggaagaatactataagaagcaggcacaagtggctaccggtggaggccctggggcgcccccaggttctcaacccgactatagcgcagcatgggcagaatattatcggcaacaggcagcctattacggacagaccccaggccccggaggacctcagccaccccccacccagcaggggcaacagcaagcacagtag

SEQ ID NO: 321008 - DNA, 1095 bp, Artificial Sequence
  derived and/or modified sequence
atgagcgactacagccccggcggcggcagcgccggcggccccagccagccacccggtgggggcggcccagggatccggaaggatgccttcgccgacgccgttcaacgggccaggcagatcgctgctaagattggtggcgatgcagccacaacggtgaacaattctacaccagactttggcttcggtggccagaagcgccagctcgaagatggagaccaaccagaaagcaaaaagctggcatcccaaggagacagtatctcctcccaattaggccctatccaccctccacctcgaacatctatgaccgaggaatatcgggtgccagacggaatggtgggcctgataatcggcaggggcggggagcagataaataagatccagcaagatagtggttgcaaagttcagatttccccagattccggcgggttacctgaacgcagtgtgtccctgacaggggcacctgagtccgttcagaaggctaagatgatgctggacgatatcgtttcaagaggccggggcgggccccccggccagttccacgacaacgcaaatggtggacaaaatgggaccgtacaggagatcatgattcccgcgggcaaagctggtctggttattggcaagggaggagagacaatcaagcagcttcaggagagggctggcgttaaaatgattctaattcaggacggatcgcagaatacaaatgtggacaagcctcttcgcatcatcggagacccgtataaggtacaacaggcatgtgagatggtcatggatattcttagggagcgcgatcaggggggattcggcgaccgcaacgagtacgggagcaggatcggtggtggcatcgatgtccccgtaccccgccactccgtgggcgtggtaattggaagatctggcgaaatgatcaagaaaattcagaacgatgctggtgtgcgcatccagttcaagcaggatgacgggacagggccagagaaaattgcacacataatgggtcctcccgacagatgcgagcacgcagcgaggatcattaacgatccatcctctagttcattccttctgcccacacccggtcataggcccagttgcctgtccggctag

SEQ ID NO: 321009 - DNA, 2133 bp, Artificial Sequence
  derived and/or modified sequence
atgtccgactatagcaccggaggcccaccacctggcccacccccaccagccggtggcggaggaggagccggtggcgcagggggagggccaccacctggcccaccaggggctggggatagggggggtggtggcccaggcggtgggggaccagggggaggttccgccggaggaccctcccagcccccaggaggtggtggcccagggatccgcaaagacgcctttgctgacgccgttcagcgggctaggcagatcgctgctaaaatcggcggtgatgccgctaccacagtgaacaatagtacacccgacttcgggttcggcggtcagaaaaggcagctggaggacggagatcagcctgagagcaagaagctggctagtcagggagatagcatcagctcacaactggggcctattcatccacctccacgcacttcaatgaccgaggagtatcgggtgcctgatgggatggttggcctgatcatagggcgagggggagagcaaatcaacaagattcaacaggactcagggtgtaaggttcagataagcccagactctgggggtttacccgagagaagtgtgagtctcacaggggcacctgagtccgtgcagaaggcgaaaatgatgctagacgacattgtatcaagaggacgcggtggtcctcctggacaatttcatgataatgcgaacggcggtcagaacgggactgtgcaggaaataatgattccagccggtaaagcgggacttgtgatcggcaagggcggtgagactataaagcagcttcaggagagagccggagtcaagatgattctgatacaagacgggtcccagaacacaaacgtggataagccactaaggatcatcggagatccttacaaagtgcagcaggcttgcgaaatggttatggacattcttcgcgagcgggaccagggtggtttcggagatagaaacgaatacggatcaagaatcggcggtggcattgatgtgccagttccccgacatagtgtcggagtggtaattgggagatccggggagatgatcaaaaagattcagaacgatgccggtgtccgtattcaatttaaacaagatgatggcacggggccagaaaagattgctcacatcatggggcctcccgacaggtgcgagcacgcagctcggataattaacgacctcctgcagtccctccgttctgggcctcctggccctcccggtggacccggaatgccgccaggcggacggggaagaggaagggggcaaggtaactgggggccacctggcggagagatgacgttctccatacccacccacaagtgcggtctggtcattggtagggggggagagaacgtgaaggccatcaatcagcagacaggcgcattcgttgagatcagcaggcagttgccacctaatggagacccaaatttcaaactcttcatcatccgaggttcccctcagcagatcgaccatgccaagcaactgatcgaggaaaaaatagaagggcctctgtgtcccgttggaccaggaccagggggacccggtcccgctggccctatggggcctttcaatcccggaccgtttaatcagggcccacctggcgcaccccctcatgccggagggcctccacctcaccaatacccccctcagggctgggggaatacttaccctcagtggcagccccctgcgcctcacgatccttccaaggccgcagctgctgccgcagaccccaacgccgcttgggctgcctactactcccactattaccagcaacccccaggccctgtgcctgggccagcacctgcgcctgctgctccaccagcgcaaggcgagcctccacaacctccacctacgggtcagagcgactatactaaggcttgggaggaatactataaaaagattgggcaacagcctcagcagcctggcgctcctccacagcaggactacaccaaggcttgggaagaatactacaagaagcaagctcaagtggccactggcggaggtccaggcgcacccccagggtttctggcacccccaacggttttccagcctctcctcagttctgctctggcccagcttcccaggcctagaccttccccgcttcccggactggtttgctgcttgttcatctgtagccgcggagactag

SEQ ID NO: 321010 - DNA, 2136 bp, Artificial Sequence
  derived and/or modified sequence
atgtcagactatagcactggagggcctcccccaggaccaccgccacccgctggagggggaggtggagctggaggagctggcggaggaccaccacctggccctccaggagcaggcgacagggggggtgggggtccgggaggaggaggacccggaggaggatctgctggcggtccatctcaacctcctggaggaggcggaccagggattagaaaagacgctttcgcggatgcagtgcaacgagccagacaaattgcagctaagattggaggcgacgctgcaacaacagtgaataactcaacccctgatttcggctttgggggacagaaacggcaattagaggatggtgaccaaccagagagcaagaagttggcttctcaaggtgactccatttcaagccagttgggtccaattcaccctccccctcgaacgtcaatgacagaagagtatcgcgtccccgatgggatggtgggactgatcatcggtcggggaggcgagcaaataaataagattcagcaggactccggctgcaaagtccaaatatcccccgattcagggggactgcccgagagaagtgtgagtctcacaggagcaccagagtctgtgcagaaggcaaaaatgatgttggatgatattgtctctagaggtcgcggaggccctcccggtcagttccacgacaacgccaatggaggccagaacggcactgtgcaagaaataatgatccctgcaggaaaagctggacttgtaattggcaagggaggcgagaccatcaaacaactccaggagagagccggagtcaaaatgatcttaatacaggacggcagccagaacaccaacgttgacaaacccctccgcatcattggcgatccatataaagtccaacaggcatgtgaaatggtaatggatatactcagggagagggatcaaggaggctttggggacaggaatgaatacggctcacggattggcggtggtatcgatgtgcccgtgccccgacactcagtcggtgtcgtgatcgggagatctggcgaaatgatcaaaaaaatccagaacgacgcaggcgtccgcattcagtttaagcaagacgacgggaccggaccagaaaagattgctcatatcatggggccacccgaccggtgtgaacacgccgcacgaattattaacgatttacttcagtctctcaggtctggcccacctgggcctcctggcggtccgggaatgccgcctggtggcaggggccgtgggcgtggccagggtaattgggggcctccaggaggggaaatgaccttttcgatacccacacataaatgtgggctagtcatcggtcgcggaggagagaacgtgaaggcgattaatcagcagacaggggctttcgtggagattagcaggcagctgcctcctaacggggaccccaatttcaagctatttatcatccgaggctcaccacaacaaatagaccacgccaagcagcttatagaagaaaagatcgaggggccactttgcccagtgggtccaggccctgggggacctggacctgctggcccaatgggacctttcaaccccggaccgttcaaccagggtcctccaggggcacctccccatgccggaggccctccacctcatcaatacccacctcaggggtggggcaatacctaccctcaatggcagcccccagcaccgcacgacccctccaaggccgctgccgcagctgctgacccaaacgctgcttgggctgcttattactcccattattatcaacagcctcctggtccggtgcccggacccgcacctgctccagccgctcccccagcccagggagaacctccgcagccaccacccaccggacagagtgattacacaaaggcctgggaggagtactataagaagattggccagcagccccaacaacccggagcccctcctcaacaggactataccaaggcatgggaggagtactacaagaagcaagcgcaggtagctaccggtggcggaccgggagctcctccgggaagccagcccgattatagtgcggcttgggctgagtactaccggcagcaagctgcctactatggacagacacctgggccagggggaccacagccccctccaacacagcaaggccagcaacaagcccagtag

SEQ ID NO: 321011 - DNA, 1095 bp, Artificial Sequence
  derived and/or modified sequence
atgtccgactacagtcccggtgggggtagcgccggagggcctagccagccacccggaggcggaggcccaggaattagaaaagatgcgttcgccgatgccgttcagagggctaggcagatagctgccaagattggcggtgacgctgccactacagtgaataattcaactccggacttcggatttggtgggcagaaacgacagctggaggatggcgaccagcctgaatctaagaagcttgccagccaaggggactcaattagctctcagttaggcccaattcaccctccccctcgcacatcaatgaccgaggaatatagagttcccgacgggatggtcggcctgattatcggtcggggtggggaacagataaacaaaattcagcaggattctggatgcaaggtgcaaatcagccccgatagcggtggcctacctgagcggagcgttagccttaccggtgcacctgaatcagtccagaaggctaaaatgatgctcgatgacattgtgtcgaggggtcggggaggacctcccggacaatttcacgataatgcaaacggtggacaaaacggcaccgtgcaagaaattatgatccccgcagggaaagcaggcctcgtcattggtaaaggaggagagacaattaaacagttgcaagaacgagctggagtgaagatgatattgattcaggacggaagccaaaataccaatgtggataaacctttgcggataatcggcgatccttataaagtccagcaggcttgtgaaatggtgatggacattctcagagaaagagaccaggggggattcggtgatcgaaatgaatacgggtctagaatcggtgggggaatcgacgtgcctgttcccagacacagcgtaggcgtcgttattggaagaagtggagagatgataaagaaaattcagaacgacgctggagttagaatacagttcaagcaagatgacggcaccgggcctgagaagatagcccacataatggggcctccagacagatgtgaacacgccgctagaatcattaacgatccaagtagctctagctttcttctccccactccgggacatcgcccttcttgcctgtcaggatag

SEQ ID NO: 321012 - DNA, 2133 bp, Artificial Sequence
  derived and/or modified sequence
atgagcgactacagcaccggcggccccccccccggcccccccccccccgccggcggcggcggcggcgccggcggcgccggcggcggccccccccccggcccccccggcgccggcgacagaggcggcggcggccccggcggcggcggccccggcggcggcagcgccggcggccccagccagccccccggcggcggcggccccggcatcagaaaggacgccttcgccgacgccgtgcagagagccagacagatcgccgccaagatcggcggcgacgccgccaccaccgtgaacaacagcacccccgacttcggcttcggcggccagaagagacagctggaggacggcgaccagcccgagagcaagaagctggccagccagggcgacagcatcagcagccagctgggccccatccaccccccccccagaaccagcatgaccgaggagtacagagtgcccgacggcatggtgggcctgatcatcggcagaggcggcgagcagatcaacaagatccagcaggacagcggctgcaaggtgcagatcagccccgacagcggcggcctgcccgagagaagcgtgagcctgaccggcgcccccgagagcgtgcagaaggccaagatgatgctggacgacatcgtgagcagaggcagaggcggcccccccggccagttccacgacaacgccaacggcggccagaacggcaccgtgcaggagatcatgatccccgccggcaaggccggcctggtgatcggcaagggcggcgagaccatcaagcagctgcaggagagagccggcgtgaagatgatcctgatccaggacggcagccagaacaccaacgtggacaagcccctgagaatcatcggcgacccctacaaggtgcagcaggcctgcgagatggtgatggacatcctgagagagagagaccagggcggcttcggcgacagaaacgagtacggcagcagaatcggcggcggcatcgacgtgcccgtgcccagacacagcgtgggcgtggtgatcggcagaagcggcgagatgatcaagaagatccagaacgacgccggcgtgagaatccagttcaagcaggacgacggcaccggccccgagaagatcgcccacatcatgggcccccccgacagatgcgagcacgccgccagaatcatcaacgacctgctgcagagcctgagaagcggcccccccggcccccccggcggccccggcatgccccccggcggcagaggcagaggcagaggccagggcaactggggcccccccggcggcgagatgaccttcagcatccccacccacaagtgcggcctggtgatcggcagaggcggcgagaacgtgaaggccatcaaccagcagaccggcgccttcgtggagatcagcagacagctgccccccaacggcgaccccaacttcaagctgttcatcatcagaggcagcccccagcagatcgaccacgccaagcagctgatcgaggagaagatcgagggccccctgtgccccgtgggccccggccccggcggccccggccccgccggccccatgggccccttcaaccccggccccttcaaccagggcccccccggcgcccccccccacgccggcggcccccccccccaccagtaccccccccagggctggggcaacacctacccccagtggcagccccccgccccccacgaccccagcaaggccgccgccgccgccgccgaccccaacgccgcctgggccgcctactacagccactactaccagcagccccccggccccgtgcccggccccgcccccgcccccgccgccccccccgcccagggcgagcccccccagcccccccccaccggccagagcgactacaccaaggcctgggaggagtactacaagaagatcggccagcagccccagcagcccggcgcccccccccagcaggactacaccaaggcctgggaggagtactacaagaagcaggcccaggtggccaccggcggcggccccggcgccccccccggcttcctggccccccccaccgtgttccagcccctgctgagcagcgccctggcccagctgcccagacccagacccagccccctgcccggcctggtgtgctgcctgttcatctgcagcagaggcgactag

SEQ ID NO: 321013 - DNA, 2136 bp, Artificial Sequence
  derived and/or modified sequence
atgagcgactacagcaccggcggccccccccccggcccccccccccccgccggcggcggcggcggcgccggcggcgccggcggcggccccccccccggcccccccggcgccggcgacagaggcggcggcggccccggcggcggcggccccggcggcggcagcgccggcggccccagccagccccccggcggcggcggccccggcatcagaaaggacgccttcgccgacgccgtgcagagagccagacagatcgccgccaagatcggcggcgacgccgccaccaccgtgaacaacagcacccccgacttcggcttcggcggccagaagagacagctggaggacggcgaccagcccgagagcaagaagctggccagccagggcgacagcatcagcagccagctgggccccatccaccccccccccagaaccagcatgaccgaggagtacagagtgcccgacggcatggtgggcctgatcatcggcagaggcggcgagcagatcaacaagatccagcaggacagcggctgcaaggtgcagatcagccccgacagcggcggcctgcccgagagaagcgtgagcctgaccggcgcccccgagagcgtgcagaaggccaagatgatgctggacgacatcgtgagcagaggcagaggcggcccccccggccagttccacgacaacgccaacggcggccagaacggcaccgtgcaggagatcatgatccccgccggcaaggccggcctggtgatcggcaagggcggcgagaccatcaagcagctgcaggagagagccggcgtgaagatgatcctgatccaggacggcagccagaacaccaacgtggacaagcccctgagaatcatcggcgacccctacaaggtgcagcaggcctgcgagatggtgatggacatcctgagagagagagaccagggcggcttcggcgacagaaacgagtacggcagcagaatcggcggcggcatcgacgtgcccgtgcccagacacagcgtgggcgtggtgatcggcagaagcggcgagatgatcaagaagatccagaacgacgccggcgtgagaatccagttcaagcaggacgacggcaccggccccgagaagatcgcccacatcatgggcccccccgacagatgcgagcacgccgccagaatcatcaacgacctgctgcagagcctgagaagcggcccccccggcccccccggcggccccggcatgccccccggcggcagaggcagaggcagaggccagggcaactggggcccccccggcggcgagatgaccttcagcatccccacccacaagtgcggcctggtgatcggcagaggcggcgagaacgtgaaggccatcaaccagcagaccggcgccttcgtggagatcagcagacagctgccccccaacggcgaccccaacttcaagctgttcatcatcagaggcagcccccagcagatcgaccacgccaagcagctgatcgaggagaagatcgagggccccctgtgccccgtgggccccggccccggcggccccggccccgccggccccatgggccccttcaaccccggccccttcaaccagggcccccccggcgcccccccccacgccggcggcccccccccccaccagtaccccccccagggctggggcaacacctacccccagtggcagccccccgccccccacgaccccagcaaggccgccgccgccgccgccgaccccaacgccgcctgggccgcctactacagccactactaccagcagccccccggccccgtgcccggccccgcccccgcccccgccgccccccccgcccagggcgagcccccccagcccccccccaccggccagagcgactacaccaaggcctgggaggagtactacaagaagatcggccagcagccccagcagcccggcgcccccccccagcaggactacaccaaggcctgggaggagtactacaagaagcaggcccaggtggccaccggcggcggccccggcgccccccccggcagccagcccgactacagcgccgcctgggccgagtactacagacagcaggccgcctactacggccagacccccggccccggcggcccccagcccccccccacccagcagggccagcagcaggcccagtag

SEQ ID NO: 321014 - DNA, 1095 bp, Artificial Sequence
  derived and/or modified sequence
atgagcgactacagccccggcggcggcagcgccggcggccccagccagccccccggcggcggcggccccggcatcagaaaggacgccttcgccgacgccgtgcagagagccagacagatcgccgccaagatcggcggcgacgccgccaccaccgtgaacaacagcacccccgacttcggcttcggcggccagaagagacagctggaggacggcgaccagcccgagagcaagaagctggccagccagggcgacagcatcagcagccagctgggccccatccaccccccccccagaaccagcatgaccgaggagtacagagtgcccgacggcatggtgggcctgatcatcggcagaggcggcgagcagatcaacaagatccagcaggacagcggctgcaaggtgcagatcagccccgacagcggcggcctgcccgagagaagcgtgagcctgaccggcgcccccgagagcgtgcagaaggccaagatgatgctggacgacatcgtgagcagaggcagaggcggcccccccggccagttccacgacaacgccaacggcggccagaacggcaccgtgcaggagatcatgatccccgccggcaaggccggcctggtgatcggcaagggcggcgagaccatcaagcagctgcaggagagagccggcgtgaagatgatcctgatccaggacggcagccagaacaccaacgtggacaagcccctgagaatcatcggcgacccctacaaggtgcagcaggcctgcgagatggtgatggacatcctgagagagagagaccagggcggcttcggcgacagaaacgagtacggcagcagaatcggcggcggcatcgacgtgcccgtgcccagacacagcgtgggcgtggtgatcggcagaagcggcgagatgatcaagaagatccagaacgacgccggcgtgagaatccagttcaagcaggacgacggcaccggccccgagaagatcgcccacatcatgggcccccccgacagatgcgagcacgccgccagaatcatcaacgaccccagcagcagcagcttcctgctgcccacccccggccacagacccagctgcctgagcggctag

SEQ ID NO: 321015 - DNA, 1705 bp, Artificial Sequence
  derived and/or modified sequence
attcctgacagcacctcccggaccggacataacggtccccgcgcggctccccgaaccggaagtggaggtgagctgtcgcgggcggcgcccggccttgctcaacgcccagcagtccccaccgtcgctgccgccgccaccgccctcggccgctgccgaggcctcctgcagccatcatgtccgccagcgccgtctacgtgctggacctgaagggcaaggtggtgcaggtgttttccgagtacttcaaggagctggaggaggagagcatccgggacaactttgttatcatctacgagctgctggacgagctcatggacttcggctacccccagaccaccgacagcaagatcctgcaggagtacatcactcaggaaggccacaagctggaaacaggggccccgcggccaccagccaccgtcaccaacgcggtgtcctggcggtccgaaggcatcaagtatcggaagaatgaggtgttcttggacgtcatcgagtctgtcaacctcttggtcagcgccaacggcaatgtcctgcgcagcgagatcgtgggctccatcaagatgcgagtcttcctctcgggcatgcccgagctgcgcctgggcctcaacgacaaggtcctctttgacaacacgggccgcggcaaaagcaaatccgtggagctggaggatgtgaagttccaccagtgtgtgcggctatcacgcttcgagaatgaccgcaccatctccttcatcccacccgacggcgagttcgagctcatgtcctaccgtctcaacacccacgtcaagcctttgatatggatcgagtcggtgatcgagaagcactcccacagccgcatcgagtacatgatcaaggccaaaagccagttcaagcggcggtcaacagccaacaacgtggagatccacattcccgtgcccaatgatgccgactcacccaagttcaagacgacggtggggagcgttaagtgggtccccgagaacagcgagatcgtgtggtccatcaagtccttcccgggcggcaaggagtacctgatgcgggcccacttcggcctgcctagtgtggaggccgaagacaaggagggcaagcccccgatcagtgtcaagttcgagatcccttacttcactacctccggcatccaggtgcgctacctgaagatcattgagaagagtgggtaccaggccctgccctgggtgcgttatatcacgcagaatggagattaccagctccggacccagtgaggggctgtcgcagccaacaccccggcctcggggctcctggtggcagcaccaggggacacacctgccaaacccaccagatggaggggccctccctggtctctggccaccctcccagcctctgcccagggacccctgccttccccaggccatctgctctgccgtcgacactcgtctcagaagcccctttcccagaagaggctggtcttcaagaagtctcgtttctttgcccctgaagtcagtttcaggggaaggatgtgaaatttttccgtgtagaggttacagccttttatgctgttgagctcccaggtaccaaaaagcttggccaacgcttgccagccagccagctgcaggtggcatctgccacgaaggaagcgccagcctcgccaggccagcaggggcgtcgttttgttgccattttgttgaacgttatgggtttatgggtgttcctggaacttgtctttgtgcattcgttgctg

SEQ ID NO: 321016 - DNA, 1056 bp, Artificial Sequence
  derived and/or modified sequence
atgagcgccagcgctgtgtatgttctggacctcaagggtaaagtggtacaagtatttagtgaatattttaaggaattggaagaggagtcaatccgcgataactttgtgattatttacgagcttcttgacgaacttatggactttggctatccgcagacaaccgactctaaaattctgcaagagtacatcacgcaggaaggccacaagttagaaacaggtgccccgagacctcccgccactgtcactaacgctgtttcctggagaagtgagggcattaagtatcggaagaacgaggtgttccttgatgtgattgagtcagtgaacctgctagtgtctgccaacgggaacgttctgaggagcgaaatcgtgggaagcataaaaatgcgcgtctttttgagtggcatgcctgaactccgccttggattgaatgacaaggtgctttttgataacacaggccgtgggaaatcaaagtcagtggagctggaggatgtaaaatttcaccagtgcgtgcgactgtcccgctttgaaaacgacaggaccatctcatttatccctcccgacggagagtttgaactgatgagttataggctcaacacacatgtcaagccactgatttggatcgagagcgtgatcgaaaagcactcccactccagaatcgaatatatgatcaaagccaagtctcagtttaaacgaaggtccactgccaataacgtggagatccacattccggtgccgaatgatgccgacagccctaaattcaagacaaccgttggatctgtcaaatgggtaccagagaactccgaaatagtctggtcaataaaaagcttccccggaggcaaggaatacctgatgcgggcccactttgggctgccatctgtcgaggcggaagacaaagaagggaagcctcccataagtgtcaaattcgagattccttacttcacaacgtcgggtattcaggtgcgctatctaaaaatcattgagaagagcggctaccaggcgctcccgtgggtgaggtatatcacccaaaatggtgattatcaacttcggacccagtag

SEQ ID NO: 321017 - DNA, 1056 bp, Artificial Sequence
  derived and/or modified sequence
atgtctgccagcgctgtgtatgtgctggacctgaagggcaaggtggtgcaggtgttcagcgagtacttcaaggagctggaggaggagagcatccgggacaactttgtgatcatctatgagctgctggatgagctgatggactttggctacccccagaccacagacagcaagatcctgcaggagtacatcacccaggagggccacaagctggagaccggggccccccggcccccagccaccgtgaccaatgctgtgtcctggaggtctgagggcatcaagtacaggaagaatgaggtgttcctggatgtgattgagagcgtgaacctgctggtgtctgccaatggaaatgtgctgcggtctgagatcgtgggcagcatcaagatgagggtcttcctgagcggcatgcctgagctgcggctgggcctgaatgacaaggtgctgtttgacaacacaggccggggcaagagcaagtctgtggagctggaggatgtgaagttccaccagtgtgtgcggctgagcagatttgaaaatgacaggaccatctccttcatccccccagatggagaatttgagctgatgagctaccgcctgaacacccacgtgaagcccctcatctggattgaatctgtgattgagaagcacagccacagcagaattgagtacatgatcaaggccaagagccagttcaagagaagaagcacagccaacaacgtggagatccacatccctgtgcccaatgatgctgacagccccaagttcaagaccaccgtgggctctgtgaagtgggtgcctgaaaattctgaaattgtgtggagcatcaagagcttccctgggggcaaggagtacctgatgagggcccacttcggcctgcccagcgtggaggccgaggacaaggagggcaagccacccatctctgtgaagtttgagatcccctacttcaccaccagcggcatccaggtgcgctacctgaagatcatcgagaagagcggctaccaggccctgccctgggtgcgctacatcacccagaatggagactaccagctgcggacccagtag

SEQ ID NO: 321018 - DNA, 1056 bp, Artificial Sequence
  derived and/or modified sequence
atgagcgccagcgccgtgtacgtgctggacctgaagggcaaggtggtccaggtgttttccgagtacttcaaggaactcgaggaggagtccatccgagataatttcgtgatcatttacgagctcttagacgagctgatggatttcggatatccacagacaacggactctaagattctgcaggagtacatcactcaggagggccacaagctcgagaccggggctcctcgcccccctgccaccgtgaccaatgccgtttcgtggaggtctgaaggcataaaatacaggaagaatgaagtgttcctagatgtgattgaatctgtcaacctgctcgtctcagctaacggcaacgtgctgaggagcgagatagtcggctctattaagatgagggtctttctgtctgggatgccggagctccgcctcggactcaacgataaggtgcttttcgacaacacaggcagaggaaaatcgaagagcgtcgagcttgaggacgttaagttccaccagtgtgtacggctctcaagatttgaaaacgacagaacaatttccttcattccccccgatggcgaattcgaacttatgagctataggctaaacacccatgtgaagcctctcatctggatcgagtctgttatcgagaagcacagccacagtcgcatagagtacatgataaaggcaaagtcgcagtttaagcgtcgatctactgctaataacgtggaaatccacatccctgtgccaaacgatgccgactcacccaaattcaagaccacggttggaagcgtcaagtgggttcccgaaaactctgaaatcgtttggtcaattaagagtttccctgggggcaaagaatatttaatgcgtgcacactttggactgcctagcgtcgaggcagaggacaaggaagggaagccacctatcagcgtaaagttcgagatcccctacttcacaacctccggaatccaggtaagatacttaaagattatcgagaaatctggataccaggccctgccatgggtgcggtacattacgcaaaacggagattatcagctgagaacacagtag

SEQ ID NO: 321019 - DNA, 1056 bp, Artificial Sequence
  derived and/or modified sequence
atgtctgcaagcgccgtttatgtgctggatttgaaaggcaaagtggtgcaggtgttcagcgaatattttaaagagttggaagaagagagcatacgcgataattttgttatcatttacgagctgctcgacgagttgatggacttcggttatcctcagaccactgattcgaaaatcctccaggaatacataacacaggagggacataaactggaaaccggagcaccccgacctccagccacagttacaaatgcagtctcttggaggtccgaggggattaaatatcgaaaaaatgaggtattcctcgatgtgatcgaatccgtgaacttattggtttcagccaacggtaacgtgctgaggagcgaaatcgttggttcgattaagatgagagtgtttctctccggcatgccagagctaagactaggcctcaatgacaaggtgttgtttgataacaccggccgtggaaaatccaaatccgtcgagctcgaggatgtgaagtttcaccagtgtgtgagactcagcagattcgaaaacgacaggactatatcctttataccacccgatggcgaattcgaactcatgagctatcgcctgaacacccatgtgaagccattgatttggatcgaaagtgtgattgaaaagcactcccacagtaggatcgaatatatgattaaagctaaatctcaatttaagcgccgatccacggcgaataacgttgagatacatatacccgttcctaacgacgcagattctccaaagttcaaaaccacggtaggttctgtaaagtgggtaccagagaattctgagattgtatggagcatcaagagctttccagggggaaaggaatacttaatgagagcccattttggactgcccagcgtggaagcggaggacaaggagggaaagcccccaataagtgtgaagttcgagatcccgtactttaccacgtccggcatccaggtgagatatttaaaaattatcgaaaagtccggataccaagcactgccttgggtacgttacattacacagaatggagattaccagttacgaacccagtag

SEQ ID NO: 321020 - DNA, 1056 bp, Artificial Sequence
  derived and/or modified sequence
atgagcgccagcgccgtgtacgtgctggacctgaagggcaaggtggtgcaggtgttcagcgagtacttcaaggagctggaggaggagagcatcagagacaacttcgtgatcatctacgagctgctggacgagctgatggacttcggctacccccagaccaccgacagcaagatcctgcaggagtacatcacccaggagggccacaagctggagaccggcgcccccagaccccccgccaccgtgaccaacgccgtgagctggagaagcgagggcatcaagtacagaaagaacgaggtgttcctggacgtgatcgagagcgtgaacctgctggtgagcgccaacggcaacgtgctgagaagcgagatcgtgggcagcatcaagatgagagtgttcctgagcggcatgcccgagctgagactgggcctgaacgacaaggtgctgttcgacaacaccggcagaggcaagagcaagagcgtggagctggaggacgtgaagttccaccagtgcgtgagactgagcagattcgagaacgacagaaccatcagcttcatcccccccgacggcgagttcgagctgatgagctacagactgaacacccacgtgaagcccctgatctggatcgagagcgtgatcgagaagcacagccacagcagaatcgagtacatgatcaaggccaagagccagttcaagagaagaagcaccgccaacaacgtggagatccacatccccgtgcccaacgacgccgacagccccaagttcaagaccaccgtgggcagcgtgaagtgggtgcccgagaacagcgagatcgtgtggagcatcaagagcttccccggcggcaaggagtacctgatgagagcccacttcggcctgcccagcgtggaggccgaggacaaggagggcaagccccccatcagcgtgaagttcgagatcccctacttcaccaccagcggcatccaggtgagatacctgaagatcatcgagaagagcggctaccaggccctgccctgggtgagatacatcacccagaacggcgactaccagctgagaacccagtag

SEQ ID NO: 321021 - DNA, 96 bp, Artificial Sequence
  derived and/or modified sequence
atgcgacctggctggagccacctccctctctgccctacactgcaggacgccgtgcttggacactttctcagccacctcggcagacgacatctctag

SEQ ID NO: 321022 - DNA, 2502 bp, Artificial Sequence
  derived and/or modified sequence
ctgagcagaagagtgccctgcgtgagaagaggctgcagaccccccctgccccccctgcccggcagccagagcagagcctggagcagagacagagaggcccccctggaccccggcagacccgcccagagcggcagaagacccaccagcagaagcgtgagccacgcctgcagctggaacggcggcagcctggaccccctggagggcacccccgccctgctgagaagcgccgagagactgatgagaaaggtgaagaagctgagactggacaaggagaacaccggcagctggagaagcttcagcctgaacagcgagggcgccgagagaatcaccagctacgacttccacagcgagagcggcctgttcctgttccaggccagcaacagcctgttccactgcagagacggcggcaagaacggcttcatggtgagccccatgaagcccctggagatcaagacccagtgcagcggccccagaatggaccccaagatctgccccgccgaccccgccttcttcagcttcatcaacaacagcgacctgtgggtggccaacatcgagaccggcgaggagagaagactgaccttctgccaccagggcctgagcaacgtgctggacgaccccaagagcgccggcgtggccaccttcgtgatccaggaggagttcgacagattcaccggctactggtggtgccccaccgccagctgggagggcagcgagggcctgaagaccctgagaatcctgtacgaggaggtggacgagagcgaggtggaggtgatccacgtgcccagccccgccctggaggagagaaagaccgacagctacagataccccagaaccggcagcaagaaccccaagatcgccctgaagctggccgagttccagaccgacagccagggcaagatcgtgagcacccaggagaaggagctggtgcagcccttcagcagcctgttccccaaggtggagtacatcgccagagccggctggaccagagacggcaagtacgcctgggccatgttcctggacagaccccagcagtggctgcagctggtgctgctgccccccgccctgttcatccccagcaccgagaacgaggagcagagactggccagcgccagagccgtgcccagaaacgtgcagccctacgtggtgtacgaggaggtgaccaacgtgtggatcaacgtgcacgacatcttctaccccttcccccagagcgagggcgaggacgagctgtgcttcctgagagccaacgagtgcaagaccggcttctgccacctgtacaaggtgaccgccgtgctgaagagccagggctacgactggagcgagcccttcagccccggcgaggacgagttcaagtgccccatcaaggaggagatcgccctgaccagcggcgagtgggaggtgctggccagacacggcagcaagatctgggtgaacgaggagaccaagctggtgtacttccagggcaccaaggacacccccctggagcaccacctgtacgtggtgagctacgaggccgccggcgagatcgtgagactgaccacccccggcttcagccacagctgcagcatgagccagaacttcgacatgttcgtgagccactacagcagcgtgagcacccccccctgcgtgcacgtgtacaagctgagcggccccgacgacgaccccctgcacaagcagcccagattctgggccagcatgatggaggccgccagctgcccccccgactacgtgccccccgagatcttccacttccacaccagaagcgacgtgagactgtacggcatgatctacaagccccacgccctgcagcccggcaagaagcaccccaccgtgctgttcgtgtacggcggcccccaggtgcagctggtgaacaacagcttcaagggcatcaagtacctgagactgaacaccctggccagcctgggctacgccgtggtggtgatcgacggcagaggcagctgccagagaggcctgagattcgagggcgccctgaagaaccagatgggccaggtggagatcgaggaccaggtggagggcctgcagttcgtggccgagaagtacggcttcatcgacctgagcagagtggccatccacggctggagctacggcggcttcctgagcctgatgggcctgatccacaagccccaggtgttcaaggtggccatcgccggcgcccccgtgaccgtgtggatggcctacgacaccggctacaccgagagatacatggacgtgcccgagaacaaccagcacggctacgaggccggcagcgtggccctgcacgtggagaagctgcccaacgagcccaacagactgctgatcctgcacggcttcctggacgagaacgtgcacttcttccacaccaacttcctggtgagccagctgatcagagccggcaagccctaccagctgcagatctaccccaacgagagacacagcatcagatgccccgagagcggcgagcactacgaggtgaccctgctgcacttcctgcaggagtacctgtag

SEQ ID NO: 321023 - DNA, 2502 bp, Artificial Sequence
  derived and/or modified sequence
ctttcacgacgtgtgccttgcgtgagaagaggatgtcggccccctcttccaccattacctggctcccaaagtagagcctggtctagagatcgggaggctccactggatccggggaggccggctcaaagcgggcgacgacccacaagcaggtcagtgtcacacgcttgcagctggaacggaggctctctggatccactggaagggacccctgctctcctgcgcagtgcggaacggctcatgcgcaaggttaagaagctgcggttggataaggaaaacaccggctcatggagatcttttagcttgaacagcgaaggggccgagagaatcacctcatacgatttccactccgaaagcgggctgttcctgttccaggcaagcaactctctatttcactgccgcgacgggggaaagaacggcttcatggtgtcaccaatgaaacccttggaaatcaagacacagtgctcagggcccagaatggatccaaaaatctgcccggccgatcccgcgttttttagtttcattaacaacagcgatttatgggtggctaacatagagactggagaggagagaaggctgactttttgccatcagggtctttccaatgtgttagatgaccccaaaagcgcaggggtggccacattcgtgatccaggaggagtttgaccgttttaccggatactggtggtgccctacagcctcgtgggagggctccgagggcctgaaaaccctgaggattctctatgaagaggtagacgagtccgaggtggaagtgatccacgtgccttccccagccttggaggagagaaagaccgactcataccggtaccctcgaaccgggagcaaaaatccgaaaatcgccctgaagctggccgaattccaaacagatagtcagggaaagatcgttagtacgcaggagaaggaactcgtacaacccttctcgtcgctgttccccaaggtcgaatacatcgccagggctggctggactagggacgggaagtacgcctgggcaatgtttctggatcggccacagcagtggctgcagctggtattactcccacctgccctcttcattccctcgacagaaaatgaagaacagcggctggcgtccgcccgggccgtgccaagaaacgtgcagccttacgtggtgtacgaggaagtgactaatgtttggatcaacgtgcatgacattttctatccatttcctcaaagcgagggagaagatgaactgtgttttttaagagcaaatgagtgcaaaacaggtttttgccatttgtacaaagttactgccgtgttgaagagccagggatacgactggagcgagcccttctcacccggcgaagacgaattcaagtgtccaatcaaagaggaaatcgccctaacctccggtgaatgggaggtgctggctaggcacgggagtaaaatctgggtgaacgaggagaccaagctcgtgtacttccagggaaccaaggacaccccccttgagcaccacctgtatgttgtgtcctatgaagccgcaggtgagatcgtgcggttgacaactcctggcttctcacatagctgtagcatgtcacagaattttgatatgttcgtgtcccactactccagcgtgtccactcccccctgcgtgcacgtgtataagctgtccgggccagatgacgatcccctgcacaaacaaccaaggttctgggcatctatgatggaggccgcctcttgccctcccgattacgtacccccagagatcttccactttcacactagaagtgacgtacggctttacggaatgatttataagcctcacgcactccaacccgggaaaaaacatcctactgtgctctttgtgtatggaggcccacaggttcagctcgtgaataattcatttaaaggaataaagtaccttcgcctgaataccttggcatccctcgggtatgcagtggtggtgatcgacggtcggggttcctgtcagagaggtcttaggtttgaaggagctctgaaaaatcaaatgggccaggtggagatcgaggaccaagtagagggactccagttcgtagcagagaagtacggcttcatagacctgagccgtgtggccatccacggatggagctatggagggttcctctccttgatggggctaatccataaaccacaggtgttcaaggtggcaatcgccggggcaccagttacagtctggatggcgtacgataccggttacactgaacgctacatggatgtacctgaaaacaaccagcacggatacgaagctggatccgtggccctccatgtggagaaactccccaatgagccgaacaggttgctgattctgcatggtttccttgatgagaacgtccacttctttcacaccaattttcttgtatctcaactgatccgggcagggaaaccgtaccagctacaaatctatcctaatgagcgacactccatacgctgccccgaatcaggggaacactacgaagtgacccttctgcatttcttgcaagaatacctttag

SEQ ID NO: 321024 - DNA, 2502 bp, Artificial Sequence
  derived and/or modified sequence
ctgagcagaagagtgccctgtgtgagaagaggctgccggccccccctgccccccctgcccggcagccagagccgggcctggagccgggaccgggaggcccccctggaccccggccggcctgcccagagcggcagaagacccaccagccgctctgtgagccacgcctgctcctggaatggaggcagcctggaccccctggagggcaccccagccctgctgcggtctgctgagcggctgatgaggaaggtgaagaagctgcggctggacaaggaaaatacaggctcctggaggagcttcagcctgaacagcgagggcgctgagcgcatcaccagctatgacttccacagcgagagcggcctcttcctgttccaggccagcaacagcctcttccactgcagagatggcggcaagaatggcttcatggtgagccccatgaagcccctggagatcaagacccagtgcagcggccccaggatggaccccaagatctgcccagctgaccctgccttcttctccttcatcaacaacagcgacctgtgggtggccaacatcgagaccggggaggagcggcggctgaccttctgccaccagggcctgagcaatgtgctggatgaccccaagtctgctggggtggccaccttcgtcatccaggaggagtttgaccgcttcaccggctactggtggtgccccacagcctcctgggagggcagcgagggcctgaagaccctgcgcatcctgtatgaggaggtggatgaaagtgaggtggaggtgattcatgtgcccagccctgccctggaggagaggaagacagacagctaccgctaccccaggacaggcagcaagaaccccaagatcgccctgaagctggccgagttccagacagacagccagggcaagatcgtgtccacccaggagaaggagctggtgcagcccttcagcagcctcttccccaaggtggagtacatcgcccgggccggctggaccagagatggcaagtatgcctgggccatgttcctggaccggccccagcagtggctgcagctggtgctgctgcccccagccctcttcatccccagcacagaaaatgaggagcagaggctggccagcgcccgggctgtgcccagaaatgtgcagccctacgtggtgtatgaggaggtgaccaacgtgtggatcaacgtgcatgacatcttctaccccttcccccagagcgagggggaggatgagctgtgcttcctgcgggccaatgaatgcaagacaggcttctgccacctgtacaaggtgacagctgtgctgaagagccagggctatgactggagcgagcccttcagccctggagaagatgagttcaagtgccccatcaaggaggagatcgccctgaccagcggggagtgggaggtgctggcccggcacggcagcaagatctgggtgaatgaggagaccaagctggtgtacttccagggcaccaaggacacccccctggagcaccacctgtatgtggtgtcctatgaggccgccggggagatcgtgcggctgaccaccccaggcttcagccacagctgcagcatgagccagaactttgacatgtttgtgagccactacagctctgtgtccaccccaccctgtgtgcacgtgtacaagctgagcggcccagatgatgaccccctgcacaagcagccccgcttctgggcctccatgatggaggccgccagctgccccccagactatgtgcccccagagatcttccacttccacaccaggagtgatgtgcggctgtatggcatgatctacaagccccacgccctgcagcccgggaagaagcaccccaccgtgctgtttgtgtatggaggcccccaggtgcagctggtgaacaacagcttcaagggcatcaagtacctgcggctgaacaccctggccagcctgggctatgctgtggtggtgattgatggccggggcagctgccagaggggcctgcgctttgaaggagccctgaagaaccagatgggccaggtggagattgaggaccaggtggagggcctgcagtttgtggccgagaagtatggcttcatcgacctgagccgggtggccatccacggctggagctatggaggcttcctgagcctgatgggcctcatccacaagccccaggtgttcaaggtggccatcgccggggcccctgtgacagtgtggatggcctatgacaccggctacacagagcgctacatggatgtgcctgagaacaaccagcacggctatgaagctggctctgtggccctgcacgtggagaagctgcccaatgagcccaaccggctgctgatcctgcacggcttcctggatgaaaatgtgcacttcttccacaccaacttcctggtgtcccagctgatccgggccggcaagccctaccagctgcagatctacccaaatgaaagacacagcatccgctgcccagagagcggggagcactatgaggtgaccctgctgcacttcctgcaggagtacctgtag

SEQ ID NO: 321025 - DNA, 3881 bp, Artificial Sequence
  derived and/or modified sequence
aggccgccgcctgggtcgctcaacttccgggtcaaaggtgcctgagccggcgggtcccctgtgtccgccgcggctgtcgtcccccgctcccgccacttccggggtcgcagtcccgggcatggagccgcgaccgtgaggcgccgctggacccgggacgacctgcccagtccggccgccgccccacgtcccggtctgtgtcccacgcctgcagctggaatggaggctctctggaccctttagaaggcacccctgccctcctgaggtcagctgagcggttaatgcggaaggttaagaaactgcgcctggacaaggagaacaccggaagttggagaagcttctcgctgaattccgagggggctgagaggatcacctcctacgacttccacagcgagagtggcctcttcctcttccaggccagcaacagcctcttccactgccgcgacggcggcaagaacggcttcatggtgtcccctatgaaaccgctggaaatcaagacccagtgctcagggccccggatggaccccaaaatctgccctgccgaccctgccttcttctccttcatcaataacagcgacctgtgggtggccaacatcgagacaggcgaggagcggcggctgaccttctgccaccaaggtttatccaatgtcctggatgaccccaagtctgcgggtgtggccaccttcgtcatacaggaagagttcgaccgcttcactgggtactggtggtgccccacagcctcctgggaaggttcagagggcctcaagacgctgcgaatcctgtatgaggaagtcgatgagtccgaggtggaggtcattcacgtcccctctcctgcgctagaagaaaggaagacggactcgtatcggtaccccaggacaggcagcaagaatcccaagattgccttgaaactggctgagttccagactgacagccagggcaagatcgtctcgacccaggagaaggagctggtgcagcccttcagctcgctgttcccgaaggtggagtacatcgccagggccgggtggacccgggatggcaaatacgcctgggccatgttcctggaccggccccagcagtggctccagctcgtcctcctccccccggccctgttcatcccgagcacagagaatgaggagcagcggctagcctctgccagagctgtccccaggaatgtccagccgtatgtggtgtacgaggaggtcaccaacgtctggatcaatgttcatgacatcttctatcccttcccccaatcagagggagaggacgagctctgctttctccgcgccaatgaatgcaagaccggcttctgccatttgtacaaagtcaccgccgttttaaaatcccagggctacgattggagtgagcccttcagccccggggaagatgaatttaagtgccccattaaggaagagattgctctgaccagcggtgaatgggaggttttggcgaggcacggctccaagatctgggtcaatgaggagaccaagctggtgtacttccagggcaccaaggacacgccgctggagcaccacctctacgtggtcagctatgaggcggccggcgagatcgtacgcctcaccacgcccggcttctcccatagctgctccatgagccagaacttcgacatgttcgtcagccactacagcagcgtgagcacgccgccctgcgtgcacgtctacaagctgagcggccccgacgacgaccccctgcacaagcagccccgcttctgggctagcatgatggaggcagccagctgccccccggattatgttcctccagagatcttccatttccacacgcgctcggatgtgcggctctacggcatgatctacaagccccacgccttgcagccagggaagaagcaccccaccgtcctctttgtatatggaggcccccaggtgcagctggtgaataactccttcaaaggcatcaagtacttgcggctcaacacactggcctccctgggctacgccgtggttgtgattgacggcaggggctcctgtcagcgagggcttcggttcgaaggggccctgaaaaaccaaatgggccaggtggagatcgaggaccaggtggagggcctgcagttcgtggccgagaagtatggcttcatcgacctgagccgagttgccatccatggctggtcctacgggggcttcctctcgctcatggggctaatccacaagccccaggtgttcaaggtggccatcgcgggtgccccggtcaccgtctggatggcctacgacacagggtacactgagcgctacatggacgtccctgagaacaaccagcacggctatgaggcgggttccgtggccctgcacgtggagaagctgcccaatgagcccaaccgcttgcttatcctccacggcttcctggacgaaaacgtgcactttttccacacaaacttcctcgtctcccaactgatccgagcagggaaaccttaccagctccagatctaccccaacgagagacacagtattcgctgccccgagtcgggcgagcactatgaagtcacgttgctgcactttctacaggaatacctctgagcctgcccaccgggagccgccacatcacagcacaagtggctgcagcctccgcggggaaccaggcgggagggactgagtggcccgcgggccccagtgaggcactttgtcccgcccagcgctggccagccccgaggagccgctgccttcaccgccccgacgccttttatccttttttaaacgctcttgggttttatgtccgctgcttcttggttgccgagacagagagatggtggtctcgggccagcccctcctctccccgccttctgggaggaggaggtcacacgctgatgggcactggagaggccagaagagactcagaggagcgggctgccttccgcctggggctccctgtgacctctcagtcccctggcccggccagccaccgtccccagcacccaagcatgcaattgcctgtcccccccggccagcctccccaacttgatgtttgtgttttgtttggggggatatttttcataattatttaaaagacaggccgggcgcggtggctcacgtctgtaatcccagcactttgggaggctgaggcgggcggatcacctgaggttgggagttcaagaccagcctggccaacatggggaaaccccgtctctactaaaaatacaaaaaattagccgggtgtggtggcgcgtgcctataatcccagctactcgggaggctgaggcaggagaatcgcttgaacccgggaggtggaggttgcggtgagccaagatcgcaccattgcactccagcctgggcaacaagagcgaaactctgtctcaaaataaataaaaaataaaagacagaaagcaaggggtgcctaaatctagacttggggtccacaccgggcagcggggttgcaacccagcacctggtaggctccatttcttcccaagcccgagcagagggtcatgcgggccccacaggagaagcggccagggcccgcggggggcaccacctgtggacagccctcctgtccccaagctttcaggcaggcactgaaacgcaccgaacttccacgctctgctggtcagtggcggctgtcccctccccagcccagccgcccagccacatgtgtctgcctgacccgtacacaccaggggttccggggttgggagctgaaccatccccacctcagggttatatttccctctccccttccctccccgccaagagctctgccaggggcgggcaaaaaaaaaagtaaaaagaaaagaaaaaaaaaaaaaagaaacaaaccacctctacatattatggaaagaaaatatttttgtcgattcttattcttttataattatgcgtggaagaagtagacacattaaacgattccagttggaaacatgt

SEQ ID NO: 321026 - DNA, 2502 bp, Artificial Sequence
  derived and/or modified sequence
ctgagccggcgggtgccctgcgtgcggcggggctgccggccccccctacctcctctaccaggtagtcagtcccgcgcctggtccagggacagggaagcaccccttgatcctggccggccggctcaatccggaaggcggcctaccagtaggtctgtaagccacgcttgcagctggaacggtggctcattggatcccctggaggggacacctgcgctgttgaggagcgctgagcgcctcatgcggaaagtgaagaaactccgccttgacaaggaaaatactgggtcctggcggagcttcagccttaactctgagggtgcagaacgtatcacctcctacgactttcattctgagtcggggttgtttctttttcaagccagtaatagtttgtttcattgccgcgacgggggcaagaacggatttatggttagtccgatgaagccattggagattaaaacccagtgttctggtcctaggatggatcctaaaatttgtccagccgaccctgccttcttcagtttcattaataactccgacctatgggtggccaatattgagaccggtgaagaacgacgcctgactttttgtcaccaggggctcagcaatgtgctggatgatccaaaatcagcaggcgtcgcaacattcgtcatccaggaggagttcgataggtttacaggatattggtggtgccctacggcttcctgggagggcagcgaaggattaaagacactgcggattttgtatgaggaggtcgatgagagtgaggtcgaggtcattcatgttccaagtcccgctctggaggagcggaagacggattcttatcgctatcccaggacagggtccaaaaaccctaagatagcactgaagctggcagagttccagaccgactcccagggaaagattgtctccacccaggagaaggaacttgtgcagccttttagctccctgtttcctaaagtggaatacatcgcacgggcgggttggactcgggacggaaaatatgcctgggcaatgttcctcgacaggcctcagcagtggctgcaattggttctgctgcccccagccttattcataccctctaccgaaaacgaagagcaaaggttggcttcagctagagccgttccaaggaacgttcagccatacgtagtttatgaagaagtgacaaatgtgtggataaacgtgcatgatatattttacccttttcctcagtccgagggagaggacgaactctgttttctgagggctaatgaatgtaagaccggcttctgtcatctatacaaagtcacagctgtgctcaagtcacaaggttatgattggagcgagcctttttccccgggagaagacgaatttaaatgcccaatcaaggaggaaatcgccctgacatcaggagaatgggaggtgctagctcgccatggaagcaagatctgggtgaatgaggaaacaaagctcgtctattttcagggcacaaaagacactccactggaacaccatctgtacgtggtgagctacgaagccgccggggaaatcgtgcggttgaccacacccggtttttcccatagttgctctatgagccagaattttgatatgttcgttagtcactacagtagcgtgagtacacctccctgtgttcatgtctacaaactgtctggcccggacgatgatcctctgcacaagcagccccgattctgggcctccatgatggaggcagcttcatgcccccccgactatgtcccccctgaaatcttccactttcacacacgcagtgatgtcaggctgtacggcatgatttataaacctcacgcactccagccagggaagaagcatcccacagtgttgtttgtttacggcggtccacaggtgcagttagtgaacaatagtttcaaaggtataaaatatctccggcttaataccctggcttcactgggctatgctgtggtcgtcatagatgggagaggaagctgccagcgaggcctgaggtttgagggcgccctcaaaaatcagatgggtcaggtcgagatcgaggaccaggttgagggcctacagtttgtggcggaaaagtacggtttcattgacctgtctcgagtggccattcacgggtggagctatggcgggttcctgtctctgatgggcctaattcacaagccacaagtttttaaagtagccatcgcgggagctcctgttactgtgtggatggcatacgatactggatacacagaaaggtacatggatgtccccgaaaacaaccaacacggctacgaagctggtagcgtggccttgcacgtagagaaactgcctaatgagccgaacagattattgattctgcacgggttcctggacgaaaatgtgcattttttccatactaatttcctcgtttcacagctgatccgtgcaggcaagccataccagcttcagatttatcccaatgagcgacattccattcgatgtccggaatctggcgagcattacgaagtgaccctcctccacttcctgcaggagtatttgtag

SEQ ID NO: 321027 - DNA, 2502 bp, Artificial Sequence
  derived and/or modified sequence
ctttctagaagagtaccatgtgtgcgcagagggtgtaggccgcctctgcctcccttgcccggatcacagagtcgggcttggtcgcgcgatagagaagcacctctcgatccaggaagacccgcacagtctgggcgaagaccaaccagtagaagtgtgtcacacgcctgttcatggaatgggggtagtctagaccctctggaaggcactccagcccttctgcgcagcgcggagcgcctcatgaggaaagtgaagaagctacgtctggataaagaaaataccggatcctggagatccttttctctgaactctgaaggggctgaacgaattacatcttacgatttccactcagagtccgggttgtttttgtttcaagcaagtaatagtctcttccactgcagagacggaggaaagaacggatttatggttagtcctatgaagccacttgaaatcaagacacaatgcagtggcccacgcatggaccctaaaatctgccctgcagatcctgcctttttctcattcatcaacaattcagatctgtgggtggctaatattgagacaggggaagaaaggcgactgacattttgtcaccagggcctgtctaatgttctcgacgacccgaaatccgccggagtggcaacattcgtaattcaagaggaatttgataggtttacaggctactggtggtgccccacggcctcctgggaagggagtgagggattgaaaacactcaggatactgtacgaggaagtggatgagagcgaagtggaggtcatccacgtgccaagcccggcactggaggagaggaaaacggactcctacaggtacccacggacaggatcaaaaaacccaaaaatcgcccttaaactcgccgagttccagaccgatagccagggaaaaattgtctctactcaggagaaggaactagtgcagccattcagttcccttttccccaaggtggaatacattgcacgcgctggctggacccgagacgggaagtatgcgtgggcgatgttcttagaccgcccacaacagtggcttcagttagtactgcttccacccgcactctttattcctagtaccgagaacgaggagcagaggctggcaagcgcaagggcagtgcccaggaacgtgcagccttacgttgtttacgaggaggtcacgaacgtgtggataaatgtgcacgacatcttttatcccttcccccaaagtgagggtgaagacgaactttgcttcttacgcgcaaacgagtgcaaaaccggtttttgtcacctgtataaggtcaccgccgtgttgaagtctcaaggatacgattggtccgagcccttcagcccgggagaggatgagtttaaatgcccaatcaaggaagagattgctctgacatccggcgaatgggaagttcttgccaggcatggatctaaaatatgggtgaatgaggagactaaattggtgtacttccagggaactaaagacacacccctggaacatcatctatacgtggtctcttatgaggctgccggtgagatcgtgagattaaccacacccggattcagtcattcttgttcaatgtcccagaacttcgatatgttcgtcagtcactactctagcgtgagcacacccccatgcgttcacgtttacaagctcagcggccctgacgacgaccccctccataagcagccccgattttgggcttcaatgatggaggcagctagctgtcctcccgactatgttccccctgaaatctttcatttccacaccagaagcgacgtgaggctttacggtatgatctacaaacctcacgctttgcaaccgggaaaaaaacaccccactgtcctgtttgtatatggtggccctcaggttcagttggtcaacaattcatttaagggaatcaagtacctgaggctaaacacactggcaagtctggggtacgccgtcgtggtgattgacggacggggatcctgccaacgtggcctaagatttgagggagcccttaaaaaccagatgggacaggtggaaatcgaggaccaagtggaagggttgcaattcgtagccgagaagtacggcttcatcgacctctccagagtagccattcatggatggtcgtacggaggatttttgtctttaatgggcctgattcacaagccccaggtcttcaaggtggccatagcaggggctcccgtaactgtgtggatggcttacgacaccggttacaccgaacggtatatggatgtaccagagaacaatcagcacggctacgaagccggttcggtggcactgcacgttgagaagctgccgaatgaaccaaatcgcctgctgattttgcacggcttccttgacgagaacgtgcacttctttcatactaattttctggtatcccagctaattcgtgccggaaagccctaccagttgcagatttaccccaacgagcgccactcaatcagatgtccagaatcaggggagcattatgaggtcaccctgctgcactttctgcaggagtatttgtag

SEQ ID NO: 321028 - protein, 351 aa, Artificial Sequence
  derived and/or modified sequence
MVIMGQCYYNETIGFFYNNSGKELSSHWRPKDVVVVALGLTVSVLVLLTNLLVIAAIASNRRFHQPIYYLLGNLAAADLFAGVAYLFLMFHTGPRTARLSLEGWFLRQGLLDTSLTASVATLLAIAVERHRSVMAVQLHSRLPRGRVVMLIVGVWVAALGLGLLPAHSWHCLCALDRCSRMAPLLSRSYLAVWALSSLLVFLLMVAVYTRIFFYVRRRVQRMAEHVSCHPRYRETTLSLVKTVVIILGAFVVCWTPGQVVLLLDGLGCESCNVLAVEKYFLLLAEANSLVNAAVYSCRDAEMRRTFRRLLCCACLRQSTRESVHYTSSAQGGASTRIMLPENGHPLMDSTL

SEQ ID NO: 321029 - DNA, 1056 bp, Artificial Sequence
  derived and/or modified sequence
atggttattatgggccaatgctactacaacgagacgattggcttcttctacaataattccggcaaggaactctcaagtcactggcggcctaaagatgtggtcgttgtcgcgctaggattgaccgtgtccgtgttagtgctcctgaccaatctgcttgttatcgccgcgattgcctccaacaggagattccaccagccgatctactacctactagggaatctggccgctgccgacctgttcgccggggttgcttacctctttctgatgtttcacactgggccccggaccgctcggttaagcctcgagggttggttcctgaggcaaggactacttgacacctcgttaaccgccagtgtcgccaccctgctggcgattgctgtcgaacgtcataggagcgtgatggcagtgcagctgcactcgcggctgccaaggggtagagtcgtgatgctaattgtcggtgtgtgggtcgccgcactgggactcggattactacccgctcacagttggcactgtctttgcgctctggatcgatgtagcagaatggctcccctcttatcccgctcgtacctggctgtgtgggcactgtcgagcctgctggtgttcttactaatggtcgcggtgtacacccgaatcttcttctacgtgagacggagagtgcaaagaatggccgagcacgtgtcttgccacccccgttacagggaaacaaccctgagcctggtgaaaacagtggtcataattctcggagcattcgtagtctgttggacacctggacaggtcgtgctgctgctggatggtttgggctgcgagtcatgcaatgtgctagcagtagagaagtactttctgctgctggcggaggcgaacagcctcgtgaacgccgccgtgtactcctgcagagacgccgagatgcgccgcactttccgacgcctcttgtgttgcgcatgtctgagacaatcaacacgtgagagtgtgcactacacatcctcggcccagggcggtgccagcactcgaattatgctccctgagaacgggcatccactgatggactctaccctgtag

SEQ ID NO: 321030 - DNA, 1056 bp, Artificial Sequence
  derived and/or modified sequence
atggtgattatgggccagtgctactacaatgaaacaatagggtttttttacaacaatagcggaaaggagctgtcttcccattggcgccccaaagacgtcgttgttgtggcgctgggcttgacagtgtccgttctggtgctgctcacaaatcttctcgtcattgccgctattgcctcgaataggaggttccatcagcctatttactacctgctgggtaatctggcagctgccgacctgttcgccggggtcgcctacttatttctcatgtttcacactggccctaggacggcaaggctgtcattggagggatggttcctaaggcagggcttgctcgatacctctttgacggccagcgtggcaacactgctcgctattgccgtcgagagacatagatcagtcatggcggtgcagctgcattccagactgcctcggggccgtgtagtaatgctgatcgttggtgtctgggtagccgccctgggactgggactgctgcctgcccactcatggcattgcctgtgtgccttggatcggtgtagccggatggctcccctgctatcgagatcttaccttgccgtgtgggcactctcctcactcctggtgttcctgctcatggtggccgtttatactaggatattcttttatgtccgtcggagggtgcaacgcatggccgagcacgtgtcatgtcaccctcggtatagagagactaccttatccctggtcaagaccgtcgtcattatcctcggggcgttcgtggtatgttggacccccggacaggttgtcctcctacttgatggactgggttgtgaaagctgtaacgttctcgccgttgagaagtacttcttgctgctcgccgaagcgaattctctcgtcaatgcagctgtctattcatgcagggatgctgaaatgcggcgcacatttcgcagattgctttgctgtgcctgcctgcgccagagtactcgtgagagcgtccactatactagttcggcgcagggcggagccagcacccgtatcatgctccctgaaaatggccaccctctgatggatagcaccttgtag

SEQ ID NO: 321031 - DNA, 1056 bp, Artificial Sequence
  derived and/or modified sequence
atggtgatcatgggccagtgctactacaatgagaccatcggcttcttctacaacaacagcggcaaggagctgagcagccactggaggcccaaggatgtggtggtggtggccctgggcctgactgtgtctgtgctggtgctgctgaccaacctgctggtgattgctgccatcgccagcaacagacgcttccaccagcccatctactacctgctgggcaacctggccgctgctgacctgtttgctggggtggcctacctgttcctgatgttccacacaggccccaggacagcccggctgagcctggagggctggttcctgcggcagggcctgctggacaccagcctgacagcctctgtggccaccctgctggccatcgctgtggagcggcacaggtctgtgatggctgtgcagctgcacagccggctgccccggggccgggtggtgatgctgattgtgggcgtgtgggtggccgccctgggcctgggcctgctgcctgcccacagctggcactgcctgtgtgccctggaccgctgcagcaggatggcccccctgctgagccgcagctacctggccgtgtgggccctgagcagcctgctggtgttcctgctgatggtggccgtgtacacccgcatcttcttctacgtgagaagaagagtgcagaggatggccgagcacgtgtcctgccacccccgctaccgggagaccaccctgagcctggtgaagacagtggtgatcatcctgggcgcctttgtggtgtgctggaccccaggccaggtggtgctgctgctggatggcctgggctgtgagagctgcaatgtgctggccgtggagaagtacttcctgctgctggccgaggccaacagcctggtgaatgctgctgtgtacagctgcagagatgctgagatgaggaggaccttccggcggctgctgtgctgtgcctgcctgcggcagagcacccgggagagcgtgcactacaccagcagcgcccagggcggggccagcacccgcatcatgctgcctgaaaatggccaccccctgatggacagcaccctgtag

SEQ ID NO: 321032 - DNA, 1792 bp, Artificial Sequence
  derived and/or modified sequence
ctcccgcgccctctcagcaacccgcacagggcgcacccggacgctctaccgctcccgccgcagtcgccgggccatgggcctcgagcccgccccgaacccccgcgagcccgccttgtctgcggcgtgactggaggcccagatggtcatcatgggccagtgctactacaacgagaccatcggcttcttctataacaacagtggcaaagagctcagctcccactggcggcccaaggatgtggtcgtggtggcactggggctgaccgtcagcgtgctggtgctgctgaccaatctgctggtcatagcagccatcgcctccaaccgccgcttccaccagcccatctactacctgctcggcaatctggccgcggctgacctcttcgcgggcgtggcctacctcttcctcatgttccacactggtccccgcacagcccgactttcacttgagggctggttcctgcggcagggcttgctggacacaagcctcactgcgtcggtggccacactgctggccatcgccgtggagcggcaccgcagtgtgatggccgtgcagctgcacagccgcctgccccgtggccgcgtggtcatgctcattgtgggcgtgtgggtggctgccctgggcctggggctgctgcctgcccactcctggcactgcctctgtgccctggaccgctgctcacgcatggcacccctgctcagccgctcctatttggccgtctgggctctgtcgagcctgcttgtcttcctgctcatggtggctgtgtacacccgcattttcttctacgtgcggcggcgagtgcagcgcatggcagagcatgtcagctgccacccccgctaccgagagaccacgctcagcctggtcaagactgttgtcatcatcctgggggcgttcgtggtctgctggacaccaggccaggtggtactgctcctggatggtttaggctgtgagtcctgcaatgtcctggctgtagaaaagtacttcctactgttggccgaggccaactccctggtcaatgctgctgtgtactcttgccgagatgctgagatgcgccgcaccttccgccgccttctctgctgcgcgtgcctccgccagtccacccgcgagtctgtccactatacatcctctgcccagggaggtgccagcactcgcatcatgcttcccgagaacggccacccactgatggactccaccctttagctaccttgaacttcagcggtacgcggcaagcaacaaatccacagcccctgatgacttgtgggtgctcctggctcaacccaaccaacaggactgactgactggcaggacaaggtctggcatggcacagcaccactgccaggcctccccaggcacaccactctgcccagggaatgggggctttgggtcatctcccactgcctgggggagtcagatggggtgcaggaatctggctcttcagccatctcaggtttagggggtttgtaacagacattattctgttttcactgcgtatccttggtaagccctgtggactggttcctgctgtgtgatgctgagggttttaaggtggggagagataagggctctctcgggccatgctacccggtatgactgggtaatgaggacagactgtggacaccccatctacctgagtctgattctttagcagcagagactgaggggtgcagagtgtgagctgggaaaggtttgtggctccttgcagcctccagggactggcctgtccccgatagaattgaagcagtccacggggaggggatgatacaaggagtaaacctttctttacactctgaggtctcc

SEQ ID NO: 321033 - DNA, 2546 bp, Artificial Sequence
  derived and/or modified sequence
ataacaaagtaccgataaccgggacaatggggctgtgtgctccggaccgtgggagcccggggccgccgcagggaggccgagggaggaagccacagggcagggcagggcagggccgggctttgcagggggcagcgctgtcccagggtgaggggtacgggggcgggattgcaaaaccctagcgtgcgcccgatgatcagctggggccgcagaggtgggcctcgcacaggaggccgcggctcgctgatactgcgagctggcaaagccgaagctgggcgggggtccgggcggtgggagccaagtcggatcagggagtggcttgtaactcggcggccgattggacacgaagaagagagcggggtggggctgggagggttgggggtccggagcgggggcgcggacccaagaccacctggagctccgcccgggcagcgcggggtcacggcgggaattttcgggtcgccgagtgactcagccccgcaggctcgaaactgcgggcgcatgagtcgccgggccatgggcctcgagcccgccccgaacccccgcgagcccgccttgtctgcggcgtgactggaggcccagtctggagacgcctggaggcccggccatccatcccttccccaaccgctgtctttgtcccggagaccgccagtgtcctccgtcccacccggaacagcctattgccccgcccgcttgggaagcactcgcgcccaaatcccgccgactaacttctggggccgcctctctgtccactccgatcacctccacgcctcggcaccgccccctcgcagggttctagtcttattagtaggtaagaaacagctgctcctccacctccaccccagccccatggagcttgctttttccaggccaccgtagtcctcaccactgccactttgcttcgagatggtcatcatgggccagtgctactacaacgagaccatcggcttcttctataacaacagtggcaaagagctcagctcccactggcggcccaaggatgtggtcgtggtggcactggggctgaccgtcagcgtgctggtgctgctgaccaatctgctggtcatagcagccatcgcctccaaccgccgcttccaccagcccatctactacctgctcggcaatctggccgcggctgacctcttcgcgggcgtggcctacctcttcctcatgttccacactggtccccgcacagcccgactttcacttgagggctggttcctgcggcagggcttgctggacacaagcctcactgcgtcggtggccacactgctggccatcgccgtggagcggcaccgcagtgtgatggccgtgcagctgcacagccgcctgccccgtggccgcgtggtcatgctcattgtgggcgtgtgggtggctgccctgggcctggggctgctgcctgcccactcctggcactgcctctgtgccctggaccgctgctcacgcatggcacccctgctcagccgctcctatttggccgtctgggctctgtcgagcctgcttgtcttcctgctcatggtggctgtgtacacccgcattttcttctacgtgcggcggcgagtgcagcgcatggcagagcatgtcagctgccacccccgctaccgagagaccacgctcagcctggtcaagactgttgtcatcatcctgggggcgttcgtggtctgctggacaccaggccaggtggtactgctcctggatggtttaggctgtgagtcctgcaatgtcctggctgtagaaaagtacttcctactgttggccgaggccaactccctggtcaatgctgctgtgtactcttgccgagatgctgagatgcgccgcaccttccgccgccttctctgctgcgcgtgcctccgccagtccacccgcgagtctgtccactatacatcctctgcccagggaggtgccagcactcgcatcatgcttcccgagaacggccacccactgatggactccaccctttagctaccttgaacttcagcggtacgcggcaagcaacaaatccacagcccctgatgacttgtgggtgctcctggctcaacccaaccaacaggactgactgactggcaggacaaggtctggcatggcacagcaccactgccaggcctccccaggcacaccactctgcccagggaatgggggctttgggtcatctcccactgcctgggggagtcagatggggtgcaggaatctggctcttcagccatctcaggtttagggggtttgtaacagacattattctgttttcactgcgtatccttggtaagccctgtggactggttcctgctgtgtgatgctgagggttttaaggtggggagagataagggctctctcgggccatgctacccggtatgactgggtaatgaggacagactgtggacaccccatctacctgagtctgattctttagcagcagagactgaggggtgcagagtgtgagctgggaaaggtttgtggctccttgcagcctccagggactggcctgtccccgatagaattgaagcagtccacggggaggggatgatacaaggagtaaacctttctttacactc

SEQ ID NO: 321034 - DNA, 1056 bp, Artificial Sequence
  derived and/or modified sequence
atggtgatcatgggccagtgctactacaacgagaccatcggcttcttctacaataacagtggaaaagagctgtcatcacactggcggcctaaggatgtcgtagttgtggctcttggccttacggtgtccgtcttagtgttgctaacgaatctgctggttatcgctgcaatcgctagcaacaggcgtttccatcagccaatctactacttgctcgggaacctggccgccgcagatctgtttgccggggtagcttacctattcctgatgtttcataccgggcctcgcaccgctcgccttagtttagaggggtggtttctcaggcaaggcctcttagatacatctctaaccgcctcagttgccaccctgttagcgatagccgttgagaggcacaggtctgtgatggctgtgcagctgcactccaggctcccccgcggccgggtggtgatgctcatcgtgggcgtgtgggtcgccgccctcgggctgggccttctgccggcacattcttggcactgtctgtgtgccctcgaccggtgctctaggatggcaccgctactctctcggtcctatctcgccgtgtgggccctgtcaagtctcctggtgttcctgctcatggtggctgtgtacacccggatttttttttacgtgcggcggagggtgcagagaatggccgaacacgtgtcttgccatcccagatacagagagacaacactctccctcgtgaagacagttgtgatcatactcggcgctttcgtggtgtgttggacccccggacaggtcgtgctcctcctcgatgggcttggctgtgaaagctgcaatgtcctagcggttgagaagtatttcttgctcctggccgaggcaaattccttggtgaatgccgccgtttactcgtgtcgagacgctgagatgcgtcggacctttcgcagactgctctgctgtgcttgcctccgacagtccaccagggaatcggttcactatacatcttcagcccaggggggcgctagtacccgcattatgctccccgagaatgggcatcctcttatggattcaacactgtag

SEQ ID NO: 321035 - DNA, 1056 bp, Artificial Sequence
  derived and/or modified sequence
atggtgatcatgggccagtgctactacaacgagaccatcggcttcttctataataactccgggaaggagctgtcatcgcattggaggccaaaggatgttgtggttgtcgcgctgggactgactgtgagtgtgctagtcctgcttaccaatcttttagttatcgccgccatcgcatctaatcgtagatttcatcagcccatttattatcttctgggaaacctcgcagccgcagatctgttcgcaggagtggcctacctgttccttatgtttcacacgggacccagaacagcaaggttgagcctcgagggctggttcctccgccaggggctcctcgacacctctctgacagcctcggttgctacgttgttggctattgccgtcgaaagacaccgcagcgtcatggccgtccagctgcatagcagactgcctagggggcgcgttgtgatgctgattgtaggagtgtgggtggctgcacttggcctgggccttctgccagctcactcatggcactgtctgtgcgccctcgatcggtgctcaagaatggccccactactgtcgaggtcgtacttagcagtttgggcacttagctctttactcgtctttctgctgatggttgctgtttacactcgaatatttttctatgttcggcggcgcgttcagcgaatggctgaacacgtcagctgccatcctagatatagggagacaaccttgagcttggttaaaacagtggtgataattcttggcgcctttgtcgtttgctggacgcctggccaggtagtgcttctgttggatggccttggctgtgaatcgtgcaacgttctggcagttgagaagtactttttgctgctcgccgaggctaacagcctcgtgaatgcggcagtgtactcttgcagagacgctgagatgcgccggacatttaggcggctcctatgttgtgcttgcctacggcaatccacccgagagtctgtacattatacctcctccgcccaaggcggtgcatccactcgcatcatgctccccgaaaatgggcatcctcttatggactctacactttag

SEQ ID NO: 321036 - DNA, 1056 bp, Artificial Sequence
  derived and/or modified sequence
atggtgatcatgggtcaatgctattataatgagaccattgggttcttttacaataattctgggaaagaactgagtagccattggcgccctaaggacgtcgttgtggtcgccttaggcctgactgtgtctgttctcgttctgctgacaaacctcctggtgattgcagctatcgcctcaaaccgcaggtttcatcagcctatatattacttgcttggaaatttggctgccgctgatctgtttgccggagttgcttatctgttcttaatgtttcacaccggtccaagaacagcccgactgtccttagagggctggttcctgagacaaggactgttggacacatctttgaccgcctccgtggccaccctgctggccattgcagttgaaaggcaccggtccgtcatggccgtccagttgcacagcaggctcccgcgtggccgtgtagtcatgttgatcgttggagtttgggtggccgctctcggactgggcctgcttcccgcacactcctggcactgtctctgtgccctcgacagatgctcccgcatggctcccctgctgtccaggtcatacttggccgtatgggctctgtccagtcttcttgtgttcctccttatggtggctgtgtacaccagaatatttttttacgtgcggagaagggtacagagaatggctgagcacgtcagttgccacccccgttaccgagagacaaccctgagtctggtgaagaccgttgtgatcatcctgggagcctttgtcgtatgctggacgccgggtcaggtcgtcctcctgttggatggactcggctgcgagagctgcaatgtgctagcggttgaaaaatattttttgctgctcgcagaggccaacagtctggttaatgccgctgtgtactcttgcagggacgccgaaatgcggaggacatttaggcggttactgtgctgcgcttgtctccgccagtcaacgcgcgagagtgtgcattatactagctcagcccaaggcggagcaagtactaggatcatgctgccagagaacgggcatcctctgatggatagcacattgtag

SEQ ID NO: 321037 - DNA, 1056 bp, Artificial Sequence
  derived and/or modified sequence
atggtgatcatgggccaatgctactataatgagaccatagggtttttctacaacaactccggtaaggaactgagttcccactggaggcccaaagatgttgtcgtggtggctctcggcctgaccgtgtccgtgctggtactgttaactaatctattggtgattgccgctatcgcttccaatcggagatttcaccaaccgatatattatctgctgggcaacttggccgctgccgacctgttcgccggtgtggcttatctcttcttaatgttccatacgggaccccgaacagcaagactatccctcgagggatggtttctgaggcagggattgctcgacacctctctcactgcctctgtggctaccctgctcgcgatcgccgtggaacgccatagatcggttatggcagtgcagctccacagtcggttaccaagagggagggtcgtaatgcttatcgtaggcgtgtgggtggcagcccttggtctcggcctcttgccggcacacagctggcactgtctttgtgctcttgatagatgttcgcgaatggcacccctgcttagccgatcatacttagctgtgtgggctctgagctctctcttggtattcttacttatggtggccgtctatacacgtatcttcttctatgtcaggaggcgtgtccagcgtatggcggagcacgtatcatgccatcctcgttatcgggaaactacgttaagtctggttaaaactgtggtgatcattcttggagcctttgtagtgtgttggacccctggccaggtcgtcctactgttagacggcctggggtgcgaatcctgtaatgtgttagctgtggagaagtactttctgctgctagccgaagcaaactcgctcgtcaacgcagctgtctattcatgtagggacgctgaaatgcgcagaacatttagaagactcctgtgctgtgcttgtctgcggcagtccactcgtgaatccgttcactacaccagcagtgcccaaggcggagcctcgactagaattatgctgcccgagaatgggcatcctctgatggattccacactgtag

SEQ ID NO: 321038 - DNA, 1056 bp, Artificial Sequence
  derived and/or modified sequence
atggtgatcatgggccagtgctactacaacgagaccatcggcttcttctacaacaacagcggcaaggagctgagcagccactggagacccaaggacgtggtggtggtggccctgggcctgaccgtgagcgtgctggtgctgctgaccaacctgctggtgatcgccgccatcgccagcaacagaagattccaccagcccatctactacctgctgggcaacctggccgccgccgacctgttcgccggcgtggcctacctgttcctgatgttccacaccggccccagaaccgccagactgagcctggagggctggttcctgagacagggcctgctggacaccagcctgaccgccagcgtggccaccctgctggccatcgccgtggagagacacagaagcgtgatggccgtgcagctgcacagcagactgcccagaggcagagtggtgatgctgatcgtgggcgtgtgggtggccgccctgggcctgggcctgctgcccgcccacagctggcactgcctgtgcgccctggacagatgcagcagaatggcccccctgctgagcagaagctacctggccgtgtgggccctgagcagcctgctggtgttcctgctgatggtggccgtgtacaccagaatcttcttctacgtgagaagaagagtgcagagaatggccgagcacgtgagctgccaccccagatacagagagaccaccctgagcctggtgaagaccgtggtgatcatcctgggcgccttcgtggtgtgctggacccccggccaggtggtgctgctgctggacggcctgggctgcgagagctgcaacgtgctggccgtggagaagtacttcctgctgctggccgaggccaacagcctggtgaacgccgccgtgtacagctgcagagacgccgagatgagaagaaccttcagaagactgctgtgctgcgcctgcctgagacagagcaccagagagagcgtgcactacaccagcagcgcccagggcggcgccagcaccagaatcatgctgcccgagaacggccaccccctgatggacagcaccctgtag

SEQ ID NO: 321039 - DNA, 1269 bp, Artificial Sequence
  derived and/or modified sequence
atgcccgcgggtaggcgcgggcctgccgctcaaagcgcgcgtagacccccaccactgctgcctttattattgcttttatgtgtattgggggccccgcgtgcagggtcaggggctcatacagctgtgatcagtccgcaggatccgacgttactgattgggagcagcctgctggccacatgcagcgtgcacggcgatcctccaggcgccacagctgaaggactctactggactctgaacgggaggcggctgccacccgaactgagcagagtgctgaatgcttccacactggccctggccctagcaaacctcaatggctcccgacagcgaagtggcgacaacttggtttgtcacgctagagatggaagtatcctcgccggatcctgtctctacgtcgggctgccccccgagaaacccgttaatatatcctgttggagtaaaaacatgaaagatctaacttgtcggtggacaccgggagctcatggcgagacgttccttcacaccaactattctctgaagtacaagttgcgttggtatgggcaagacaatacctgtgaggaataccataccgtcggaccccatagttgccatatccctaaagacctcgctctgtttactccctatgagatatgggtggaggcgacgaatcgtttaggctccgcaagatctgacgtactaactctggatattctggacgtagttaccacagatccccccccggatgtgcacgtgagccgagtgggaggcctggaggatcagctgagcgtccgttgggtcagtccgcccgccctgaaggactttctgttccaggccaaataccaaattagataccgcgtcgaagactccgtggactggaaggttgtcgacgacgtctctaatcagaccagctgtaggcttgccgggttgaaacccggcaccgtgtacttcgtgcaggtgcgttgcaatccgttcgggatctatgggagtaaaaaagcaggcatatggagcgagtggtcacacccaacggccgcgtctaccccccgctctgagcgcccagggcccggagggggggcatgtgaaccaagaggtggcgagccaagctctggaccagtgcggagagagctgaaacagttcttgggatggcttaagaagcacgcttactgttccaacctgtccttcaggctgtacgaccagtggcgggcatggatgcagaagtctcacaagaccagaaaccaggatgagggaattctgcctagtgggcggagagggaccgctcgaggccctgctagatag

SEQ ID NO: 321040 - DNA, 1269 bp, Artificial Sequence
  derived and/or modified sequence
atgcctgctggaagaagaggccctgctgcccagagcgcccggcggcccccacccctgctgcccctgctgctgctgctgtgtgtgctgggcgccccccgggccggcagcggggcccacacagctgtgatcagcccccaggaccccaccctgctgattggcagcagcctgctggccacctgcagcgtgcatggagaccccccaggggccacagctgagggcctgtactggaccctgaatggaagaaggctgcccccagagctgagccgggtgctgaatgccagcaccctggccctggccctggccaacctgaatggcagccggcagaggtctggggacaacctggtgtgccacgccagagatggcagcatcctggccggcagctgcctgtatgtgggcctgcccccagagaagcctgtgaacatcagctgctggagcaagaacatgaaggacctgacctgccgctggacccctggggcccacggggagaccttcctgcacaccaactacagcctgaagtacaagctgcgctggtacggccaggacaacacctgtgaggagtaccacacagtgggcccccacagctgccacatccccaaggacctggccctcttcaccccctatgagatctgggtggaggccaccaaccggctgggcagcgcccggagtgatgtgctgaccctggacatcctggatgtggtgaccacagatcctcctccagatgtgcacgtgtcccgggtgggcggcctggaggaccagctgtctgtgcgctgggtgagccccccagccctgaaggacttcctgttccaggccaagtaccagatccgctacagagtggaggacagcgtggactggaaggtggtggatgatgtgagcaaccagaccagctgccgcctggccggcctgaagccaggcaccgtgtactttgtgcaggtgcgctgcaaccccttcggcatctacggcagcaagaaggccggcatctggagcgagtggagccaccccacagctgccagcacccccaggtctgagcggcccggccctgggggcggggcctgtgagccccggggcggggagcccagcagcggccctgtgcggcgggagctgaagcagttcctgggctggctgaagaagcacgcctactgcagcaacctgtccttccggctgtatgaccagtggagggcctggatgcagaagagccacaagaccaggaaccaggatgagggcatcctgcccagcggcagaagaggaacagcccggggccctgccaggtag

SEQ ID NO: 321041 - DNA, 1269 bp, Artificial Sequence
  derived and/or modified sequence
atgcccgccggccggcggggccccgccgcccagagcgcccggcggccaccacctctcctgcctctactgctgttgctgtgtgtacttggggccccaagggcgggcagtggggcgcacaccgcagtcatatcaccacaagatccaacgttgctgattggcagctcactgttggcaacttgctctgtgcatggcgatccacctggcgctaccgccgaaggtctgtattggacattgaacggccggaggttaccacccgaactgtcacgggtgctgaacgcatccacgctcgcactagctctggcgaatctaaatgggtccagacagaggtctggcgacaaccttgtgtgtcacgcccgtgacgggtccatcttggccggcagctgcttgtacgttggactgccacctgaaaagcccgtgaacatcagttgctggtctaagaacatgaaggatttgacgtgtcggtggacaccaggggcccacggggaaacttttctacatactaattactcccttaagtataagctgaggtggtacggacaagataatacctgcgaggagtaccacaccgtgggcccacattcgtgccacattcctaaggatctggctctgtttacaccttacgagatctgggtagaggccaccaatcggctcggaagtgcaaggagcgatgtgctgacactggacatactggatgttgtgaccaccgatccgcccccagatgtgcatgtcagcagggtcggcgggctggaagatcagctttcagtcaggtgggtcagtcctccagccctcaaggattttttattccaggccaaataccagattcggtacagggtggaggactctgtggattggaaggtagtggacgacgtgtcaaatcaaacttcctgcagacttgccgggctgaagccgggcactgtttactttgttcaggttaggtgcaaccccttcgggatttacggctctaagaaagccggcatttggtctgaatggtctcatcccaccgcggccagtactcctagaagtgagcgaccaggacctgggggcggcgcatgtgaaccgcgcggcggagagccctcgagcggacccgtgcggcgtgaacttaaacagttcttagggtggcttaaaaagcatgcctactgttccaatctctcctttcggttgtacgaccaatggcgagcttggatgcagaaatcacacaaaaccagaaatcaagatgaaggaattctccccagtgggcgtaggggaacagcacgcggtcctgcgcgctag

SEQ ID NO: 321042 - DNA, 1269 bp, Artificial Sequence
  derived and/or modified sequence
atgcccgctggaaggaggggtcccgcagcgcagtcagccagacgcccaccccctctccttcctctgctccttctcttatgcgttttaggggcacccagagctggatccggcgctcacactgccgtgatcagcccccaagaccccacattactgatcgggagttccttgctggcaacttgcagtgtgcatggtgaccctccgggtgccacagccgagggcctgtattggacgctgaacgggcgaagattgcccccagagctgagtcgagtgcttaacgcctccactctggctttggcacttgctaacctgaacggctcacgtcaacggtccggcgataatctggtgtgtcacgcccgtgatggaagtattctggccggaagctgtctttacgtggggctgcctccagaaaagccagtgaatattagctgttggagtaaaaatatgaaagacctgacttgcaggtggacccccggtgcccacggtgagactttcttgcatacgaactactccctgaaatacaaactccgatggtacggccaagataatacatgtgaagaataccacaccgtgggcccacacagttgtcatattcccaaagatctggcgctctttactccatatgaaatatgggtggaagcaactaaccgtcttggctctgcaaggtccgacgtgttaactctcgatatactggacgtggtcacaactgaccccccacctgacgtgcatgttagcagagttggcggactggaagaccagctgtcagtgagatgggtttctccgccagcactaaaggattttttgttccaggccaagtatcagatacggtatagagtggaggattcagtagactggaaagttgtagacgatgtgtctaatcagacctcctgtaggcttgcaggacttaagcccggtacagtgtacttcgtgcaggtccgatgtaacccatttgggatctacggatccaaaaaggccggaatctggtctgagtggagtcatcccacggccgcttccacccctcgctcagagagacctgggcctggcggtggcgcttgtgagccacgcggaggtgagccgtccagcggccctgtgcgacgggaactcaagcaatttctagggtggcttaagaaacacgcctattgtagcaatctgtcttttagactgtacgaccagtggagggcctggatgcagaagagtcataagactcgcaaccaagatgaggggatcctgccttccgggaggcggggaacagcaagggggccagcacgctag

SEQ ID NO: 321043 - DNA, 1802 bp, Artificial Sequence
  derived and/or modified sequence
ggggccgggcggggccagcggcgcattagcgccttgtcaattcggctgctcagacttgctccggcctccgcgtccgcgcccagcgacgtgcgggcggcctggcccgcgccctcccgcgcccggcctgcgtcccgcgccctgcgccaccgccgccgagccgcagcccgccgcgcgcccccggcagcgccggccccatgcccgccggccgccggggccccgccgcccaatccgcgcggcggccgccgccgttgctgcccctgctgctgctgctctgcgtcctcggggcgccgcgagccggatcaggagcccacacagctgtgatcagtccccaggatcccacgcttctcatcggctcctccctgctggccacctgctcagtgcacggagacccaccaggagccaccgccgagggcctctactggaccctcaacgggcgccgcctgccccctgagctctcccgtgtactcaacgcctccaccttggctctggccctggccaacctcaatgggtccaggcagcggtcgggggacaacctcgtgtgccacgcccgtgacggcagcatcctggctggctcctgcctctatgttggcctgcccccagagaaacccgtcaacatcagctgctggtccaagaacatgaaggacttgacctgccgctggacgccaggggcccacggggagaccttcctccacaccaactactccctcaagtacaagcttaggtggtatggccaggacaacacatgtgaggagtaccacacagtggggccccactcctgccacatccccaaggacctggctctctttacgccctatgagatctgggtggaggccaccaaccgcctgggctctgcccgctccgatgtactcacgctggatatcctggatgtggtgaccacggaccccccgcccgacgtgcacgtgagccgcgtcgggggcctggaggaccagctgagcgtgcgctgggtgtcgccacccgccctcaaggatttcctctttcaagccaaataccagatccgctaccgagtggaggacagtgtggactggaaggtggtggacgatgtgagcaaccagacctcctgccgcctggccggcctgaaacccggcaccgtgtacttcgtgcaagtgcgctgcaacccctttggcatctatggctccaagaaagccgggatctggagtgagtggagccaccccacagccgcctccactccccgcagtgagcgcccgggcccgggcggcggggcgtgcgaaccgcggggcggagagccgagctcggggccggtgcggcgcgagctcaagcagttcctgggctggctcaagaagcacgcgtactgctccaacctcagcttccgcctctacgaccagtggcgagcctggatgcagaagtcgcacaagacccgcaaccaggacgaggggatcctgccctcgggcagacggggcacggcgagaggtcctgccagataagctgtaggggctcaggccaccctccctgccacgtggagacgcagaggccgaacccaaactggggccacctctgtaccctcacttcagggcacctgagccaccctcagcaggagctggggtggcccctgagctccaacggccataacagctctgactcccacgtgaggccacctttgggtgcaccccagtgggtgtgtgtgtgtgtgtgagggttggttgagttgcctagaacccctgccagggctgggggtgagaaggggagtcattactccccattacctagggcccctccaaaagagtccttttaaataaatgagctatttaggtgctgtgattgtg

SEQ ID NO: 321044 - DNA, 1269 bp, Artificial Sequence
  derived and/or modified sequence
atgcccgccggcagaagaggccccgccgcccagagcgccagaagacccccccccctgctgcccctgctgctgctgctgtgcgtgctgggcgcccccagagccggcagcggcgcccacaccgccgtgatcagcccccaggaccccaccctgctgatcggcagcagcctgctggccacctgcagcgtgcacggcgacccccccggcgccaccgccgagggcctgtactggaccctgaacggcagaagactgccccccgagctgagcagagtgctgaacgccagcaccctggccctggccctggccaacctgaacggcagcagacagagaagcggcgacaacctggtgtgccacgccagagacggcagcatcctggccggcagctgcctgtacgtgggcctgccccccgagaagcccgtgaacatcagctgctggagcaagaacatgaaggacctgacctgcagatggacccccggcgcccacggcgagaccttcctgcacaccaactacagcctgaagtacaagctgagatggtacggccaggacaacacctgcgaggagtaccacaccgtgggcccccacagctgccacatccccaaggacctggccctgttcaccccctacgagatctgggtggaggccaccaacagactgggcagcgccagaagcgacgtgctgaccctggacatcctggacgtggtgaccaccgaccccccccccgacgtgcacgtgagcagagtgggcggcctggaggaccagctgagcgtgagatgggtgagcccccccgccctgaaggacttcctgttccaggccaagtaccagatcagatacagagtggaggacagcgtggactggaaggtggtggacgacgtgagcaaccagaccagctgcagactggccggcctgaagcccggcaccgtgtacttcgtgcaggtgagatgcaaccccttcggcatctacggcagcaagaaggccggcatctggagcgagtggagccaccccaccgccgccagcacccccagaagcgagagacccggccccggcggcggcgcctgcgagcccagaggcggcgagcccagcagcggccccgtgagaagagagctgaagcagttcctgggctggctgaagaagcacgcctactgcagcaacctgagcttcagactgtacgaccagtggagagcctggatgcagaagagccacaagaccagaaaccaggacgagggcatcctgcccagcggcagaagaggcaccgccagaggccccgccagatag

SEQ ID NO: 321045 - protein, 261 aa, Artificial Sequence
  derived and/or modified sequence
MAETLPGSGDSGPGTASLGPGVAETGTRRLSELRVIDLRAELKKRNLDTGGNKSVLMERLKKAVKEEGQDPDEIGIELEATSKKSAKRCVKAPSPEARDSKEDGRKFDFDACNEVPPAPKESSTSEGADQKMSSFKEEKDIKPIIKDEKGRVGSGSGRNLWVSGLSSTTRATDLKNLFSKYGKVVGAKVVTNARSPGARCYGFVTMSTSDEATKCISHLHRTELHGRMISVEKAKNEPAGKKLSDRKECEVKKEKLSSVDR

SEQ ID NO: 321046 - DNA, 1533 bp, Artificial Sequence
  derived and/or modified sequence
atggccgaaacccttcctggcagcggcgacagcggacccgggactgcgtctctcggacccggggtggcggaaaccggcacaaggaggctgagcgaactgcgggtgatagacctgcgcgcagagctgaagaagcggaacctcgacaccggcggtaacaagtccgtgctgatggaacgactgaaaaaggccgtaaaagaagagggccaggatccggacgagatagggattgaattggaggcaacttcgaaaaagagtgccaagcgctgtgtgaaaggacttaagatggaggaggagggcactgaagacaacggactggaggatgactccagagacggccaggaagacatggaagcaagcctagagaacctgcagaacatgggaatgatggatatgagcgtccttgatgaaacggaggtggcaaactcatctgctcccgactttggagaggatggtactgacggcctgctggattctttttgcgacagtaaggagtatgtcgcagctcagctgcggcagttgcctgcccaaccgccggaacacgcagtgggcaatctcgaaactaggcaggacgtgccaacttcttcctcactcagagtttccgtcgctgctgtccctgtcccacatctctctgtcgagaacgaaaaaatattagatattttgggtgaaacgtgtaagtccgaacctgtgaaggaggaaagtagcgaactggaacagccatttgctcaagacactagctctgtgggacccgaccgcaagctggccgaagaggaggatctgtttgactcggctcatcccgaagagggagacctggatttagccagtgagtcaactgcacacgcacagtcatcgaaggctgactcactcctggccgtggtcaagcgggagcccgccgaacagccgggggacggcgaacgaacagactgtgagccagtggggctggagccagctgttgaacaaagctccgccgcctctgagctagccgaagcttctagcgaagaactagctgaagctccgactgaggcacctagtccagaggcgcgtgactctaaggaagacgggcgtaaattcgatttcgacgcgtgtaatgaagtgcccccagcgccaaaagaaagctctaccagcgaaggcgctgatcagaaaatgagctcattcaaagaggagaaggatataaaacccattataaaagatgaaaaaggacgcgttggatctggctctggccggaatttgtgggtgtctgggctgagcagcacaacgcgggctacagatctgaaaaaccttttctctaagtacggcaaggttgtgggagccaaggtcgttactaacgcgagatctccaggcgcacggtgctatggatttgttacaatgagtacctctgacgaggctacaaagtgtatctcacatctgcataggaccgagctccacgggcgcatgatctctgttgagaaagctaaaaatgaacctgctggcaagaagctgtctgatcggaaggaatgcgaggtgaaaaaagagaaactctcctccgtggaccgctag

SEQ ID NO: 321047 - DNA, 786 bp, Artificial Sequence
  derived and/or modified sequence
atggccgaaacactgcccggtagcggcgattctggtcctggcacagcatccctcggacctggggtagccgagacagggacccggcgtctgagcgagctgagggtgatcgatttgagggccgaattgaaaaaacggaacctcgacaccggcgggaataaatcggtactgatggaacgcctaaaaaaagccgtgaaagaagaggggcaggatccagacgaaatcgggatcgagttggaggcaacttctaagaagtccgcgaagcggtgtgtgaaagcccctagcccagaagccagggactccaaggaggacggccggaaattcgactttgatgcttgtaatgaagtgccaccagcccccaaggagagcagtacctcagagggagccgaccagaaaatgtcatctttcaaggaggagaaggacattaagcctattatcaaagacgaaaagggtagggtgggaagtggcagcggccgaaacctgtgggtcagcggcctgtctagcaccaccagagcaactgatctaaagaacctcttcagtaagtatgggaaagtggtcggtgctaaggtggtgaccaatgctcgcagtccaggcgcaaggtgttatggattcgtaacgatgtccacttcagatgaggccactaagtgtatcagtcacctgcaccgtacagaactccatgggcgaatgattagcgtcgaaaaggcaaagaatgaacctgccggcaagaaactgtcagatagaaaagaatgtgaggtgaaaaaagagaagctgtcctctgtcgatcgatag

SEQ ID NO: 321048 - DNA, 606 bp, Artificial Sequence
  derived and/or modified sequence
atggccgaaactgggacacgacgactgtccgagcttagagtgattgatctccgagccgagctgaagaaacggaacctcgacaccggagggaataagagcgtcctgatggagagattgaagaaggcagttaaagaggaagggcaagatcccgacgaaattggcatagaactggaagcgacttctaaaaagtctgccaaacggtgcgtgaaggggttaaagatggaggaagagggcacagaagacaatggtcttgaggatgattcccgcgacggtcaggaagacatggaagcgagtcttgagaatctgcagaatatggggatgatggatatgagcgtactggacgagacagaagtggccaattcctccgcccccgactttggcgaggatgggactgatggcctgctcgacagtttttgcgactctaaagaatacgtcgccgcacagctgagacagcttccagcccaaccaccagaacatgccgtcgacggagagggcttcaagaatacacttgaaacctcctcactcaacttcaaagtgactccagacattgaggaatctcttctggaacccgggacggataaaagaaacaccacagtgatggtctag

SEQ ID NO: 321049 - DNA, 1533 bp, Artificial Sequence
  derived and/or modified sequence
atggccgagaccctgcccggcagcggggacagcggccctggaacagccagcctgggccctggggtggccgagaccggcacccggcggctgtctgagctgcgggtcatcgacctgcgggcagagctgaagaagaggaacctggacacaggaggcaacaagtctgtgctgatggagcggctgaagaaggctgtgaaggaggagggccaggaccctgatgagatcggcatcgagctggaggccaccagcaagaagagcgccaagagatgtgtgaagggcctgaagatggaggaggagggcacagaagataatggcctggaggatgacagcagagatggccaggaggacatggaggccagcctggagaacctgcagaacatgggcatgatggacatgtctgtgctggatgaaacagaggtggccaacagcagcgccccagactttggagaagatggaacagatggcctgctggacagcttctgtgacagcaaggagtatgtggccgcccagctgcggcagctgcctgcccagcccccagagcacgctgtgggcaacctggagacccggcaggatgtgcccaccagcagcagcctgcgggtgtctgtggccgctgtgcctgtgccccacctgtctgtggagaatgagaagatcctggacatcctgggggagacctgcaagtctgagcctgtgaaggaggagagcagcgagctggagcagccctttgcccaggacaccagctctgtgggccctgacaggaagctggccgaggaggaggacctgtttgacagcgcccaccctgaggagggggacctggacctggccagcgagagcacagcccacgcccagagcagcaaggctgacagcctgctggccgtggtgaagcgggagcctgctgagcagcctggagatggagagaggacagactgtgagcctgtgggcctggagcctgctgtggagcagagcagcgctgccagcgagctggccgaggccagcagcgaggagctggccgaggcccccacagaggcccccagccctgaggcccgggacagcaaagaagatggcaggaagtttgattttgatgcctgcaatgaggtgcccccagcccccaaggagagcagcaccagcgagggcgctgaccagaagatgagcagcttcaaggaggagaaggacatcaagcccatcatcaaggatgagaagggccgggtgggcagcggcagcggcaggaacctgtgggtgtctggcctgagcagcaccacccgggccacagacctgaagaacctcttcagcaaatatggcaaggtggtgggcgccaaggtggtgaccaatgcccggagccctggggcccgctgctacggctttgtgaccatgagcaccagtgatgaggccaccaagtgcatcagccacctgcacaggacagagctgcacggccgcatgatctctgtggagaaggccaagaatgaacctgctgggaagaagctgagtgacagaaaagaatgtgaggtgaagaaggagaagctgagctctgtggacagatag

SEQ ID NO: 321050 - DNA, 786 bp, Artificial Sequence
  derived and/or modified sequence
atggccgagaccctgcccggcagcggggacagcggccctggaacagccagcctgggccctggggtggccgagaccggcacccggcggctgtctgagctgcgggtcatcgacctgcgggcagagctgaagaagaggaacctggacacaggaggcaacaagtctgtgctgatggagcggctgaagaaggctgtgaaggaggagggccaggaccctgatgagatcggcatcgagctggaggccaccagcaagaagagcgccaagagatgtgtgaaggcccccagccctgaggcccgggacagcaaggaggatggcaggaagtttgattttgatgcctgcaatgaggtgcccccagcccccaaggagagcagcaccagcgagggcgctgaccagaagatgagcagcttcaaggaggagaaggacatcaagcccatcatcaaggatgagaagggccgggtgggcagcggcagcggcaggaacctgtgggtgtctggcctgagcagcaccacccgggccacagacctgaagaacctcttcagcaaatatggcaaggtggtgggcgccaaggtggtgaccaatgcccggagccctggggcccgctgctacggctttgtgaccatgagcaccagtgatgaggccaccaagtgcatcagccacctgcacaggacagagctgcacggccgcatgatctctgtggagaaggccaagaatgaacctgctgggaagaagctgagtgacagaaaagaatgtgaggtgaagaaggagaagctgagctctgtggacagatag

SEQ ID NO: 321051 - DNA, 606 bp, Artificial Sequence
  derived and/or modified sequence
atggccgagaccggcacccggcggctgtctgagctgcgggtgattgacctgcgggcagagctgaagaagaggaacctggacaccggcggcaacaagtctgtgctgatggagcggctgaagaaggctgtgaaggaggagggccaggaccctgatgaaattggaattgagctggaggccaccagcaagaagagcgccaagagatgtgtgaagggcctgaagatggaggaggagggcacagaggacaatggcctggaggatgacagcagagatggccaggaggacatggaggccagcctggagaacctgcagaacatgggcatgatggacatgtctgtgctggatgaaacagaggtggccaacagcagcgccccagactttggagaagatggaacagatggcctgctggacagcttctgtgacagcaaggagtatgtggccgcccagctgcggcagctgcctgcccagcccccagagcacgctgtggatggagagggcttcaagaacaccctggagaccagcagcctgaacttcaaggtgaccccagacatcgaggagagcctgctggagcccggcacagacaagaggaacaccaccgtgatggtgtag

SEQ ID NO: 321052 - DNA, 1533 bp, Artificial Sequence
  derived and/or modified sequence
atggccgagaccctgcccggcagcggcgacagcggccccggcaccgcttctctcggcccaggtgtggcagagaccggaacccggaggctgagtgagctgagggttatcgacctgcgtgcggagttaaaaaagaggaatcttgacacaggaggtaacaagtcagttctgatggaacgactgaagaaggctgttaaagaagaaggacaagacccagatgagataggcatagaacttgaggcgacttcaaaaaaaagcgccaagagatgcgtgaagggccttaagatggaggaggaaggcacggaggacaatgggctggaagacgactcacgcgacggccaggaggacatggaggcttcccttgagaatctgcaaaacatgggcatgatggatatgtccgtgctggacgaaacagaggtagccaattcctctgctcccgatttcggcgaagacggtactgacgggttgttagactctttttgtgacagcaaggaatatgtggccgctcaactcagacagctcccagcccagccccctgagcacgccgtgggcaacctggagaccaggcaagatgtcccgacgtcttcctcactgagagtgagcgtggcggcggtgccagtgccacacctgtctgtcgagaacgagaaaatcctggatattctgggcgaaacctgtaagtccgagcctgtgaaagaagagagtagcgaactcgaacagccatttgcccaggacacatcctcagtcggcccggaccgtaaactggccgaggaggaggatctatttgactcggcccacccagaagagggggatctggacctcgcatctgagtccaccgcgcacgcacagagctctaaagcagactctttgctagcagtggtaaagcgcgaaccggctgagcaacctggagatggagaaagaactgactgtgaacccgtggggctggagcctgccgtggagcagagttccgcagcctctgagctggcggaggctagctcagaggagttggcagaagccccgactgaggctcccagcccagaggcccgtgactcgaaagaggacgggaggaaatttgattttgacgcatgcaacgaagtgccacccgcccctaaagagtcctctaccagtgagggggctgaccagaagatgtcttcatttaaggaagagaaagatattaagcctattattaaggatgagaaaggacgtgtgggctcgggttccggccgcaacttgtgggtttctggcctgtcatccaccacaagggccaccgacctgaaaaatctgttcagcaagtacggcaaagtggtcggagctaaagttgtgacgaacgctcggtcgcctggagcgaggtgttatggctttgtcaccatgagtaccagtgatgaggccacaaaatgtatatctcatctccacagaactgaactccatggtaggatgatttccgtcgaaaaagccaagaatgaacccgccgggaaaaaactctccgaccgcaaggaatgcgaagtgaagaaagagaaactgtcatctgtggatagatag

SEQ ID NO: 321053 - DNA, 786 bp, Artificial Sequence
  derived and/or modified sequence
atggccgagaccctgcccggcagcggcgacagcggccccggcaccgccagcctgggccctggagtggctgaaaccggcacgaggcggttgagtgagttgagggttattgatctcagagcagaacttaagaagcgaaacttggacactggggggaacaaaagtgtcctgatggaaaggttgaaaaaggctgtgaaggaggaaggtcaagatccagatgagatcgggatagaactggaagcaacatcaaaaaaaagcgccaagcgttgtgtgaaagctccttcccctgaggcacgggactctaaagaagacgggcgcaagttcgacttcgacgcctgcaatgaggtcccccccgctcccaaagaatcaagtaccagtgaaggagccgaccagaaaatgtcttcattcaaagaagagaaggatatcaaacccataataaaagacgaaaaggggcgcgtcggctccgggagcgggcgtaacctctgggtgtctggactgtcttctacaacgagagccaccgacttgaaaaatcttttcagcaaatacggaaaggtggttggggcaaaagtggttactaatgctaggagtccaggcgccagatgttatgggtttgtcacaatgtctactagcgatgaagcgacaaaatgcattagtcacctgcaccgaacagagctccatggcagaatgatcagtgtggaaaaggcgaaaaacgaacccgctggcaagaagctgagcgatcgcaaagagtgcgaggtaaagaaggaaaagctgtcaagtgtcgatagatag

SEQ ID NO: 321054 - DNA, 606 bp, Artificial Sequence
  derived and/or modified sequence
atggccgagaccggcacccggcggctgagcgagctgcgggtgatcgacctccgtgctgagctgaaaaagaggaatctggatacgggcggcaacaaaagcgtacttatggagaggttaaaaaaagcagtgaaagaggagggacaggatccagacgaaatcggcatcgaactggaggctacaagtaaaaaaagcgcgaaacgatgcgtgaagggcctgaagatggaggaagagggtaccgaagacaatggcttggaagacgattcccgagacggacaagaggacatggaagcatccctggagaacttgcagaatatggggatgatggacatgtccgtgctcgacgaaaccgaggtagctaattcttccgcaccagatttcggtgaagacggaactgacggccttctggactctttttgcgactcaaaagagtacgtagctgctcagctgcggcagctgccagcccaaccacccgagcacgctgtagacggcgaagggtttaagaacacgctggagacttcgtccctgaactttaaagtgactcccgacattgaggagtctctgttggagcctggaaccgataaaagaaatacaacagttatggtgtag

SEQ ID NO: 321055 - DNA, 1533 bp, Artificial Sequence
  derived and/or modified sequence
atggccgagactcttcctggttccggagatagtgggcctggcactgcctctctgggccctggagtcgctgagaccggcacacggagattgagtgagctcagagttatcgacctacgcgctgagctgaagaagagaaatctggataccggcggaaataagtccgtgttgatggaacgactgaaaaaagctgtgaaggaggagggccaggatcccgatgagatagggatcgagctggaggctacgagcaagaagtccgcgaagaggtgtgtgaagggcctgaagatggaggaggaaggaaccgaggataatggcctggaggatgactcacgcgatggccaggaagatatggaagcaagcctggagaacctgcagaacatgggcatgatggatatgagcgtgctggatgagacggaagtcgctaactccagtgcccctgactttggcgaggatggcacggacgggctcctcgattcattttgtgacagtaaagagtacgtggcagctcagcttcggcaactccccgctcagccacccgaacatgccgtaggcaatctagaaacccggcaggacgtgccaaccagctcaagtttgagggtttccgtggcagcggtgcctgttccgcatctatctgtcgaaaacgaaaaaatccttgatattctgggtgaaacgtgcaagtctgagccagtaaaggaggagtccagcgaactagaacaacccttcgcccaggatacttcctcagtaggtcctgatagaaagcttgctgaagaggaggaccttttcgacagtgcccatcctgaggagggagatctagacttagccagtgagagcactgcacatgctcagtccagcaaagccgacagcttactagccgtcgtaaaacgggaaccagccgaacaacctggagacggcgaacggacagactgcgaacccgtcggtctggaacccgctgttgaacagtcctcagctgccagtgagctcgctgaggccagctcggaagaactggctgaggctcctactgaggccccttcaccagaagctcgcgatagtaaggaggatgggagaaagtttgactttgatgcgtgcaacgaggtacctccagccccaaaggagtccagcacatcagaaggcgctgaccagaaaatgtcttcattcaaagaagagaaagacatcaaacccattatcaaggatgaaaaggggcgagtaggctctgggtctgggaggaacttgtgggtttctggcctatcttccactactcgggctaccgaccttaagaacctctttagtaaatacggcaaggtcgttggagcgaaggtggttaccaatgctcggtcccccggtgctagatgttacggctttgttaccatgtccactagcgacgaggctaccaagtgtattagtcatttgcatcgcacggaactacatggaaggatgatttcagttgaaaaggccaaaaacgaacccgcaggcaagaagttgtctgacagaaaggaatgtgaggtaaagaaggaaaaactctcttcagtcgatcgttag

SEQ ID NO: 321056 - DNA, 786 bp, Artificial Sequence
  derived and/or modified sequence
atggccgagactcttcccggttcaggcgacagtggacctggaaccgctagcctgggtcctggcgtcgcagagactgggactcgccgactctccgaattgcgggtcatcgacctacgggcagaattaaaaaagcgcaatctggacaccggtggaaacaaaagtgtgttaatggaacgtctgaagaaggcagtcaaagaagagggacaggatccggacgagattggtattgagctagaggccacgtccaaaaagtcggctaagcgatgtgtcaaagcccctagccctgaggcacgagactctaaggaagacggtcgaaaattcgacttcgatgcctgcaatgaggtaccgcctgctcccaaggagtcaagtacctccgagggcgctgaccagaaaatgtccagttttaaagaggaaaaagatattaagcccatcatcaaggatgagaaggggagggtgggcagcggttccgggcgaaacttgtgggtctctgggttgagttctactactcgggcaactgacttgaaaaatctattctcaaaatacggaaaagtcgtcggtgccaaggttgtaactaatgccaggtcacctggggcacgctgctacgggttcgttacaatgtccaccagtgacgaagccaccaaatgcatctcccatctgcacaggacggagctgcatggacgcatgattagcgttgaaaaggctaaaaacgaacctgcgggtaagaagttgtccgatcgcaaggaatgcgaagttaaaaaggagaagctctcttccgtggacagatag

SEQ ID NO: 321057 - DNA, 606 bp, Artificial Sequence
  derived and/or modified sequence
atggctgagactggaaccaggcggctcagcgagctgcgcgtcattgacctgcgcgcagagttaaagaaacgaaatctggataccggaggcaacaaaagtgttctgatggagcgcctgaaaaaggcagtgaaagaggaagggcaggacccagatgagattggtatcgaactggaagccacaagtaaaaaaagtgccaagaggtgcgtaaaggggctgaaaatggaggaggaggggacagaggacaacggccttgaggatgattctcgggatggccaggaagacatggaggctagcctggaaaatctgcagaatatgggaatgatggacatgtcagtgctcgacgaaaccgaggtggcaaacagcagcgcacccgacttcggcgaggacggcacggacggcctcctcgacagcttctgtgacagcaaagagtacgtggccgctcagctgaggcagctcccagctcagcctccagagcacgccgtagacggagagggcttcaagaacacccttgaaacatcttccctgaactttaaggtcactcccgatattgaagaatccctgctggagcctggcacagacaagcgaaataccaccgtaatggtctag

SEQ ID NO: 321058 - DNA, 2570 bp, Artificial Sequence
  derived and/or modified sequence
gttgtgccggggaacccgcggttggtggacgcgcgagcgtccttgctgctaagtacgctagtgggggcggtgcgcgtgcgcgtgcgcggccgcaaagcggggcgggaggaaacgagtgcgttttcctcttaggcggcgccattttgtgttcagagccgctatagctgccggcggtgtgcgactgagtcggtggcgaagacgggaacgcgacgatggcggagactctgcccgggtcgggcgactcgggccctggcacggcttctctcggcccgggcgttgcggagactgggacgaggcggctcagcgagctgcgggtgatcgatctgcgggcggagctgaagaagcggaacctggacacgggcggcaacaagagcgtcctgatggagcggctcaagaaggcggttaaagaagaggggcaagatcctgatgaaattggcatcgagttagaagccaccagcaagaagtcagccaagagatgtgttaaagccccaagcccagaagccagagatagcaaagaagacgggaggaagtttgattttgacgcttgtaatgaagtccctccggctcctaaagagtcctcaaccagtgagggcgctgatcagaaaatgagctcttttaaggaagaaaaagatataaagccaatcattaaagatgaaaaaggtcgggtcggcagcggttctggtcggaacctgtgggtcagcgggctgtcctccacaacacgcgctacggatctcaagaaccttttcagcaagtatgggaaggttgtcggggccaaagtggtaacgaacgcccgcagcccgggggctcgatgctatggattcgtcaccatgtcgacatctgacgaggcgaccaagtgcatcagccatctccacagaactgagctgcatggacgaatgatctccgtagagaaggccaaaaatgagcctgctgggaaaaagctttccgacagaaaagagtgcgaagtgaagaaggaaaaattatcgagtgtcgacagacatcattctgtggagatcaaaattgaaaaaactgtaattaagaaggaagagaagattgagaagaaggaggaaaaaaagcctgaagacattaagaaggaagaaaaagaccaggatgagctgaaacccggacctacaaatcggtctagagtcaccaaatcaggaagcagaggaatggagcggacggtcgtgatggataaatcgaaaggagagcccgtcattagcgtgaaaaccacaagcaggtccaaagagagaagctccaagagtcaggatcgcaagtcagaaagcaaagaaaagagagacatcttgtcgtttgataaaatcaaagaacaaagggagagagagcgccagaggcagcgggaacgggagatccgcgaaacggagaggcggcgggagcgcgagcagcgggagcgggagcaacgcctcgaggccttccatgagcggaaggagaaggcccggctacagcgggaacgcctgcagctcgagtgccagcgccagcggctggagcgggagcgcatggagcgggagcggctggagcgcgagcgcatgcgcgtggagcgtgagcgcaggaaggagcaggagcgcatccaccgcgagcgcgaggagctgcggcgccagcaggagcagctgcgttacgagcaggagcggcggcccgggcggaggccctacgacctggaccgacgagatgatgcctattggccagaaggaaagcgtgtggcaatggaggaccgatatcgtgcagactttccccggccagaccaccgctttcacgacttcgatcatcgagaccggggccagtaccaggaccacgccatcgacaggcgggagggttcgaggccaatgatgggagaccaccgggatgggcagcactatggagatgaccgccatggccacggaggacccccagagcgccacggccgggactcccgtgatggctgggggggctacggctccgacaagaggctgagtgaaggccgggggctgccccctccccccaggggtggccgtgactggggagagcacaaccagcggctagaggagcaccaggcacgcgcctggcagggtgccatggacgcaggcgcggctagccgggagcacgccaggtggcaaggtggcgagaggggcctgtctgggccctcggggccggggcacatggcaagccgcggtggagtggcggggcgaggcggctttgcacaaggtggacattcccagggccacgtggtgccaggtggcggactggaaggtggcggagtggccagccaggaccggggcagcagagtccctcacccacaccctcatccccccccgtacccccacttcacccgccgctactaagtcccactcgctgcgagttttcgggtgggcagacgcactgttgaatctggtagccagggttccctcgaacttgggggatctttttaaaagcaaagtaaatcctgccaccatgttgtagctcaatacaatgtgaactcactttttttttttttttaaataaatgtgttcttgttctgccatttttaaatcaaggtttctgttaacgaggcattccattttccattaataaagtttaccattcgc

SEQ ID NO: 321059 - DNA, 844 bp, Artificial Sequence
  derived and/or modified sequence
gctatagctgccggcggtgtgcgactgagtcggtggcgaagacgggaacgcgacgatggcggagactgggacgaggcggctcagcgagctgcgggtgatcgatctgcgggcggagctgaagaagcggaacctggacacgggcggcaacaagagcgtcctgatggagcggctcaagaaggcggttaaagaagaggggcaagatcctgatgaaattggcatcgagttagaagccaccagcaagaagtcagccaagagatgtgttaaaggactgaagatggaggaggaaggcacagaagataatggcctggaagacgattccagagacgggcaggaggacatggaagcaagtctggagaacctgcagaatatgggcatgatggacatgagtgtgctagacgaaactgaagtggcgaatagcagtgctccagattttggggaggatggcacggacggccttctcgattccttttgtgatagtaaagaatacgtggctgcacagctgagacagctcccggctcagcccccagagcatgctgtggatggggaaggatttaagaacactttggaaacttcatcgttgaacttcaaagtaactccggacattgaagaatcccttttggagccaggtactgataagagaaacacgacagttatggtttgaaagttttcacactattattttaaagctgtctatattttaagctgtgttatgatcttgtaaattgctctaatggtggacaatccagatcatacaaggatcagagattggaaacccattcgtatcaccagatctgtggaagagccattctggcttcttgaggtcaaatacatttggtgcaatgta

SEQ ID NO: 321060 - DNA, 1533 bp, Artificial Sequence
  derived and/or modified sequence
atggccgagaccctgcccggcagcggcgacagcggccccggcaccgccagcctgggccccggcgtggccgagaccggcaccagaagactgagcgagctgagagtgatcgacctgagagccgagctgaagaagagaaacctggacaccggcggcaacaagagcgtgctgatggagagactgaagaaggccgtgaaggaggagggccaggaccccgacgagatcggcatcgagctggaggccaccagcaagaagagcgccaagagatgcgtgaagggcctgaagatggaggaggagggcaccgaggacaacggcctggaggacgacagcagagacggccaggaggacatggaggccagcctggagaacctgcagaacatgggcatgatggacatgagcgtgctggacgagaccgaggtggccaacagcagcgcccccgacttcggcgaggacggcaccgacggcctgctggacagcttctgcgacagcaaggagtacgtggccgcccagctgagacagctgcccgcccagccccccgagcacgccgtgggcaacctggagaccagacaggacgtgcccaccagcagcagcctgagagtgagcgtggccgccgtgcccgtgccccacctgagcgtggagaacgagaagatcctggacatcctgggcgagacctgcaagagcgagcccgtgaaggaggagagcagcgagctggagcagcccttcgcccaggacaccagcagcgtgggccccgacagaaagctggccgaggaggaggacctgttcgacagcgcccaccccgaggagggcgacctggacctggccagcgagagcaccgcccacgcccagagcagcaaggccgacagcctgctggccgtggtgaagagagagcccgccgagcagcccggcgacggcgagagaaccgactgcgagcccgtgggcctggagcccgccgtggagcagagcagcgccgccagcgagctggccgaggccagcagcgaggagctggccgaggcccccaccgaggcccccagccccgaggccagagacagcaaggaggacggcagaaagttcgacttcgacgcctgcaacgaggtgccccccgcccccaaggagagcagcaccagcgagggcgccgaccagaagatgagcagcttcaaggaggagaaggacatcaagcccatcatcaaggacgagaagggcagagtgggcagcggcagcggcagaaacctgtgggtgagcggcctgagcagcaccaccagagccaccgacctgaagaacctgttcagcaagtacggcaaggtggtgggcgccaaggtggtgaccaacgccagaagccccggcgccagatgctacggcttcgtgaccatgagcaccagcgacgaggccaccaagtgcatcagccacctgcacagaaccgagctgcacggcagaatgatcagcgtggagaaggccaagaacgagcccgccggcaagaagctgagcgacagaaaggagtgcgaggtgaagaaggagaagctgagcagcgtggacagatag

SEQ ID NO: 321061 - DNA, 786 bp, Artificial Sequence
  derived and/or modified sequence
atggccgagaccctgcccggcagcggcgacagcggccccggcaccgccagcctgggccccggcgtggccgagaccggcaccagaagactgagcgagctgagagtgatcgacctgagagccgagctgaagaagagaaacctggacaccggcggcaacaagagcgtgctgatggagagactgaagaaggccgtgaaggaggagggccaggaccccgacgagatcggcatcgagctggaggccaccagcaagaagagcgccaagagatgcgtgaaggcccccagccccgaggccagagacagcaaggaggacggcagaaagttcgacttcgacgcctgcaacgaggtgccccccgcccccaaggagagcagcaccagcgagggcgccgaccagaagatgagcagcttcaaggaggagaaggacatcaagcccatcatcaaggacgagaagggcagagtgggcagcggcagcggcagaaacctgtgggtgagcggcctgagcagcaccaccagagccaccgacctgaagaacctgttcagcaagtacggcaaggtggtgggcgccaaggtggtgaccaacgccagaagccccggcgccagatgctacggcttcgtgaccatgagcaccagcgacgaggccaccaagtgcatcagccacctgcacagaaccgagctgcacggcagaatgatcagcgtggagaaggccaagaacgagcccgccggcaagaagctgagcgacagaaaggagtgcgaggtgaagaaggagaagctgagcagcgtggacagatag

SEQ ID NO: 321062 - DNA, 606 bp, Artificial Sequence
  derived and/or modified sequence
atggccgagaccggcaccagaagactgagcgagctgagagtgatcgacctgagagccgagctgaagaagagaaacctggacaccggcggcaacaagagcgtgctgatggagagactgaagaaggccgtgaaggaggagggccaggaccccgacgagatcggcatcgagctggaggccaccagcaagaagagcgccaagagatgcgtgaagggcctgaagatggaggaggagggcaccgaggacaacggcctggaggacgacagcagagacggccaggaggacatggaggccagcctggagaacctgcagaacatgggcatgatggacatgagcgtgctggacgagaccgaggtggccaacagcagcgcccccgacttcggcgaggacggcaccgacggcctgctggacagcttctgcgacagcaaggagtacgtggccgcccagctgagacagctgcccgcccagccccccgagcacgccgtggacggcgagggcttcaagaacaccctggagaccagcagcctgaacttcaaggtgacccccgacatcgaggagagcctgctggagcccggcaccgacaagagaaacaccaccgtgatggtgtag

SEQ ID NO: 321063 - DNA, 1308 bp, Artificial Sequence
  derived and/or modified sequence
atgccagtcgctatcaactccttcaactacaacgacccagtcaacgacgacaccattttgtacatgcagatcccatacgaggagaagtctaagaagtactacaaggctttcgagatcatgagaaacgtctggattatcgagagaaacaccatcggtaccaacccatccgacttcgacccaccagcctctttgaagaacggttcctccgcttactacgacccaaactacttgaccaccgacgccgagaaggacagatacttgaagaccaccatcaagttgttcaagagaattaactctaacccagccggtaaggtcttgttgcaagagatctcctacgctaagccatacctgggtaacgaccacaccccaattgacgagttctccccagtcaccagaaccacctccgtcaacatcaagtctaccaacgttgagtcctccatgttgttgaacttgttggttctgggtgctggtccagacattttcgagtcttgttgttacccagtcagaaagctgatcgacccagacgttgtttacgacccatctaactacggtttcggttccattaacatcgttaccttctctccagagtacgagtacaccttcaacgacatctccggtggtcacaactcctccaccgagtctttcattgctgacccagccatctccctggctcacgagctgattcacgctttgcacggtttgtacggtgctagaggtgtcacctacgaggagaccattgaggtcaagcaagccccattgatgatcgccgagaagccaatcagattggaggagttcttgaccttcggtggtcaggacttgaacatcatcacctccgctatgaaggagaagatctacaacaacctgctggccaactacgagaagattgccaccagattgtccgaggtcaactctgccccaccagagtacgacatcaacgagtacaaggactacttccaatggaagtacggtttggacaagaacgccgacggttcctacaccgtcaacgagaacaagtccaacgagatttacaagaagttgtactctttcaccgagtccgacctggctaacaagttcaaggttaagtgtagaaacacctacttcatcaagtacgagttcttgaaggttccaaacctgttggacgacgacatctacaccgtttctgagggtttcaacatcggtaacttggctgtcaacaacagaggtcagtccattaagctgaacccaaagatcattgactccccagacaagggtctggttgagaagattgtcaagttctgtaagtccgtcatcccaagaaagggtaccaag

SEQ ID NO: 321064 - protein, 217 aa, Artificial Sequence
  derived and/or modified sequence
MPTPHEAEKQITGPEEADRPPSMSSHDTASPAAPSRNPCCLCWCCCCSCSWNQERRRAWQASRESKLQPLPSCEVCATPSPEEVQSWAQSFDKLMHSPAGRSVFRAFLRTEYSEENMLFWLACEELKAEANQHVVDEKARLIYEDYVSILSPKEVSLDSRVREGINKKMQEPSAHTFDDAQLQIYTLMHRDSYPRFLSSPTYRALLLQGPSQSSSEA

SEQ ID NO: 321065 - DNA, 654 bp, Artificial Sequence
  derived and/or modified sequence
atgcccaccccccacgaggccgagaagcagatcaccggccccgaggaggccgacagaccccccagcatgagcagccacgacaccgccagccccgccgcccccagcagaaacccctgctgcctgtgctggtgctgctgctgcagctgcagctggaaccaggagagaagaagagcctggcaggccagcagagagagcaagctgcagcccctgcccagctgcgaggtgtgcgccacccccagccccgaggaggtgcagagctgggcccagagcttcgacaagctgatgcacagccccgccggcagaagcgtgttcagagccttcctgagaaccgagtacagcgaggagaacatgctgttctggctggcctgcgaggagctgaaggccgaggccaaccagcacgtggtggacgagaaggccagactgatctacgaggactacgtgagcatcctgagccccaaggaggtgagcctggacagcagagtgagagagggcatcaacaagaagatgcaggagcccagcgcccacaccttcgacgacgcccagctgcagatctacaccctgatgcacagagacagctaccccagattcctgagcagccccacctacagagccctgctgctgcagggccccagccagagcagcagcgaggcctag

SEQ ID NO: 321066 - DNA, 654 bp, Artificial Sequence
  derived and/or modified sequence
atgccgactccacacgaggccgagaaacagatcaccggacccgaagaagctgaccgacccccctccatgagctcccacgacactgcatctcctgctgccccatcgaggaacccgtgctgtctatgctggtgctgctgttgtagctgttcatggaaccaggagcgaaggagagcctggcaggcctctcgcgagagtaagctgcagcctctgccatcctgtgaagtgtgtgccacgccatcgccagaggaggtgcagagttgggcacagtcatttgataaacttatgcacagccccgccggtcgaagcgtgttccgagctttcctgcgcacagagtactctgaggaaaacatgctgttctggctcgcctgcgaagaattaaaggccgaagccaaccagcacgtagtagatgagaaagctaggcttatttacgaagactacgtgtccatactgtcccccaaggaggtgagcctggactctcgcgtgcgcgaaggcatcaataagaagatgcaggagccgagtgcacacacatttgacgacgctcagcttcagatttatacgctcatgcaccgggactcctacccaagattcttgagctcccctacttatcgagcactattactgcaagggccttctcaaagcagttctgaggcttag

SEQ ID NO: 321067 - DNA, 654 bp, Artificial Sequence
  derived and/or modified sequence
atgcccacaccacatgaggcagagaaacagatcaccggccccgaagaggccgacagaccccccagtatgtcatcacacgataccgcttccccagccgcccctagccggaacccatgctgtttgtgctggtgctgttgttgttcttgctcttggaaccaggaaaggaggcgggcctggcaggccagccgtgaaagcaagcttcaacctttgccctcctgcgaggtttgcgcaaccccgtcgcccgaagaggtccagagctgggcccagagcttcgacaagctcatgcacagtccagccggtcggtccgtctttagagcattcctaagaaccgagtactccgaagagaacatgctgttctggcttgcatgtgaggagctcaaagcagaagccaaccagcatgtggtggacgagaaggctagacttatctacgaggactacgtgtccatcctctcacctaaagaggtgtccctggatagtagagtcagagaagggatcaacaaaaaaatgcaggagccttccgcccacacctttgacgacgcccagctgcagatatacactctgatgcacagagatagctatccccgcttcctgagctcacccacgtatagggctctgctgctacaggggccgtcccagagcagctcagaggcttag

SEQ ID NO: 321068 - DNA, 654 bp, Artificial Sequence
  derived and/or modified sequence
atgcccacccctcatgaagctgagaagcagatcaccggccctgaggaggccgaccggccccccagcatgagcagccatgacacagccagccctgctgcccccagcaggaacccctgctgcctgtgctggtgctgctgctgcagctgctcctggaaccaggagcggcggcgggcctggcaggccagccgggagagcaagctgcagcccctgcccagctgtgaggtgtgtgccacccccagccctgaggaggtgcagagctgggcccagagctttgacaagctgatgcacagccctgctggccgcagcgtcttccgggccttcctgaggacagagtacagcgaggagaacatgctgttctggctggcctgtgaggagctgaaggccgaggccaaccagcacgtggtggatgagaaggcccggctcatctatgaggactatgtgtccatcctgagccccaaggaggtgtccctggacagccgggtgcgggagggcatcaacaagaagatgcaggagcccagcgcccacacctttgatgatgcccagctgcagatctacaccctgatgcaccgggacagctacccccgcttcctgagcagccccacctaccgggccctgctgctgcagggccccagccagagcagcagcgaggcctag

SEQ ID NO: 321069 - DNA, 654 bp, Artificial Sequence
  derived and/or modified sequence
atgcccaccccccacgaggccgagaagcagatcaccggccccgaggaagctgacagacccccatccatgtcctcacacgataccgcaagccccgcagcaccttctaggaatccatgttgcctgtgttggtgttgctgttgctcttgttcctggaatcaagagagacggagagcttggcaggcttctcgggaatctaaacttcaacctctcccttcatgcgaggtgtgcgccacgccatccccagaggaggtccagtcatgggcgcagtccttcgataagctgatgcattctcctgccgggaggagtgtattcagagcctttttaagaacagagtactcggaggaaaacatgctgttctggctggcatgtgaggagttaaaggcagaggccaatcagcacgtggtggacgagaaagcaaggttgatttatgaagactacgtctctatcttatcccccaaagaagtgagtctcgactctcgcgtccgcgagggaattaataaaaaaatgcaggagccttctgcgcacactttcgacgacgcccagctgcagatttatacactaatgcacagggattcttaccctcgctttctttcctcgcccacttacagagcgttgttgcttcaggggccatctcaatcttcctccgaggcctag

SEQ ID NO: 321070 - DNA, 654 bp, Artificial Sequence
  derived and/or modified sequence
atgcccaccccccacgaggccgagaagcagatcaccggccccgaggaggctgacaggcccccatccatgtcgtcacacgacactgcctcccccgcagcccccagcaggaacccctgctgcctgtgctggtgttgctgctgcagttgtagctggaatcaagaaaggagaagagcttggcaagcaagcagggagtctaaacttcagccgctgcccagttgtgaggtttgcgctacacccagcccagaagaggtacagagctgggctcagagcttcgataaactgatgcattctcccgccggcagatccgtatttcgcgccttcctacggaccgagtattcggaggaaaacatgctcttctggctggcctgcgaagagcttaaagcggaggctaatcagcacgtggtcgacgagaaagctagactgatctatgaggattatgtctctatcctctccccgaaggaagttagcttggactctcgtgtccgtgaggggataaacaaaaaaatgcaggagccgtcagcccacacatttgatgatgcccagctgcaaatctataccctgatgcaccgggattcctacccgaggttcctgtcaagccccacttacagagccttgctgctgcaggggccctcacagtcttcttctgaggcctag

SEQ ID NO: 321071 - DNA, 654 bp, Artificial Sequence
  derived and/or modified sequence
atgccgacgccccacgaagccgagaaacagatcaccggacctgaagaagccgatcgtcccccaagcatgagttcacatgacacagcgtccccagcggctcccagtcggaatccctgttgcctatgttggtgctgttgttgctcctgtagctggaaccaggagagacgccgtgcctggcaggcatctagagaaagtaagctccaacctctgccaagttgtgaagtgtgtgctacaccaagtccagaggaggttcagagttgggcccagtcttttgataagttaatgcatagtcctgccggacggtcagtgtttcgcgcttttttgagaacggagtatagcgaggagaacatgttgttttggctggcttgtgaggagttaaaagccgaagcaaatcagcacgtggtggacgagaaggccagactgatttatgaggactacgtttctatcttgtctcctaaggaagtgtccctggacagcagagtgcgagaaggcatcaataaaaaaatgcaagagccttccgcccatacgtttgatgacgctcagcttcaaatctacacgctcatgcaccgcgactcatacccacggtttctgtctagccccacatatcgggcacttttgttgcagggaccatcccaaagctcgagcgaggcatag

SEQ ID NO: 321072 - DNA, 654 bp, Artificial Sequence
  derived and/or modified sequence
atgcccacaccacacgaggctgagaaacagataacaggaccagaagaggcagatcgtcccccatcaatgtctagccatgataccgcatcacctgcagctccatctcggaacccttgttgcttgtgttggtgctgttgttgtagctgctcctggaaccaggagcgtagacgggcatggcaagcctccagagaatccaaactccagcctttgccctcttgtgaagtttgtgccacaccaagcccggaggaggtgcagtcctgggctcagagcttcgacaaactgatgcattcccccgctggtcggagcgtgtttcgcgcttttctgagaacagaatatagcgaagagaatatgctgttctggctggcctgcgaggaactgaaagctgaggctaaccagcacgtagtggacgaaaaggccaggctcatctacgaagactacgtcagcatcctctctccaaaggaagttagccttgactccagagttagggagggaatcaataagaagatgcaggagccctctgcacacactttcgatgacgctcagctacagatttatacactcatgcatagggactcataccccaggtttctgagctctcctacctaccgtgcactcctgttacagggtccgtctcaatcctcatctgaggcatag

SEQ ID NO: 321073 - DNA, 1489 bp, Artificial Sequence
  derived and/or modified sequence
gcctgcgcactgcgcccccgcgccccctccccgactgtcgggccggaccttggagcgcgcgggccggcggcggcgcgagtggctcgggagcgcggctgacccccaggctgtggtgagggtctgagagctggtaccacggagcctgggcaacctcctccgcccacccatgcccaccccgcatgaggctgagaagcagatcacagggccagaggaggcggaccggcccccttcaatgtccagtcatgatacagcctctccagcggcccccagccgcaacccctgctgcctgtgctggtgctgctgctgtagctgctcctggaaccaagagcggcggcgcgcgtggcaggcctcccgggagagcaagctgcagcccctccccagctgtgaagtatgtgccacgccaagtcctgaggaggtgcagagctgggcgcagtcttttgacaagctgatgcacagcccagcgggacgcagcgtgttccgggcgttcctgcggacagagtacagcgaggagaacatgctcttctggttggcctgcgaggagctgaaggccgaggccaaccagcatgtggtagacgagaaggcgaggctcatctacgaggactacgtatccatcctgtcccccaaggaggtgagcctggactcccgtgtgcgggagggcatcaacaagaagatgcaggagccgtccgcacacacgttcgacgacgcgcagctgcagatctacacgctcatgcaccgggactcctacccccgcttcctcagctctcccacctaccgtgccctgctgctgcaggggccatcacagtcctcctccgaggcctaggccgcccccagcagcacagaccccgccgcctcctacggccgactctgggttcccttcaggtgttgttgtcggcagggctgtcagggcacatgcctggccggctggggtccccacccgcggagacggtcctagacccagtggggagtgctgtgtctcctgggtctgcccacccgtggccaagcaggaactccaggtgcagggcgggcctccaggtgcagggcgggccagaagccccctcatcggcccgcagctggctggcccagtgctcctggctgggggctcttgcgtggtgagagtaggggtccccccaggagccatgctggacccatgagcctcgctggggcctcctccccaggcagccaatgggccccagacaagcctttggtggggaacagaacctccgcatcgtgtagttttgtgacataaggagacctcctacttgagctgtctgtaccccagaatcaaacacagaacctcagaaccagatttaggacctcagaatcctgcactcaaggtggcaggacccaatttctgttttatatgttcatgaactttaaacctggaaacatgtccttactaggtgttttatcaaaaaaaagttttcatatttatctctatccctaaccccccaaaaataggatgtcttattattgaagatatttttaaagc

SEQ ID NO: 321074 - DNA, 1593 bp, Artificial Sequence
  derived and/or modified sequence
agctgtaggggaggcgctgcgcccccggccccagccgatcgggggctcctggcgctagcctccctccagagcgccgcaggagtccctcctgccgtctgacttgagtccctgctgctgcagtgcacgccccttcggcagccagggtggggcccagacccaacctggcccctcctgcccccaccccgcctttgggtcgctgacccccaggctgtggtgagggtctgagagctggtaccacggagcctgggcaacctcctccgcccacccatgcccaccccgcatgaggctgagaagcagatcacagggccagaggaggcggaccggcccccttcaatgtccagtcatgatacagcctctccagcggcccccagccgcaacccctgctgcctgtgctggtgctgctgctgtagctgctcctggaaccaagagcggcggcgcgcgtggcaggcctcccgggagagcaagctgcagcccctccccagctgtgaagtatgtgccacgccaagtcctgaggaggtgcagagctgggcgcagtcttttgacaagctgatgcacagcccagcgggacgcagcgtgttccgggcgttcctgcggacagagtacagcgaggagaacatgctcttctggttggcctgcgaggagctgaaggccgaggccaaccagcatgtggtagacgagaaggcgaggctcatctacgaggactacgtatccatcctgtcccccaaggaggtgagcctggactcccgtgtgcgggagggcatcaacaagaagatgcaggagccgtccgcacacacgttcgacgacgcgcagctgcagatctacacgctcatgcaccgggactcctacccccgcttcctcagctctcccacctaccgtgccctgctgctgcaggggccatcacagtcctcctccgaggcctaggccgcccccagcagcacagaccccgccgcctcctacggccgactctgggttcccttcaggtgttgttgtcggcagggctgtcagggcacatgcctggccggctggggtccccacccgcggagacggtcctagacccagtggggagtgctgtgtctcctgggtctgcccacccgtggccaagcaggaactccaggtgcagggcgggcctccaggtgcagggcgggccagaagccccctcatcggcccgcagctggctggcccagtgctcctggctgggggctcttgcgtggtgagagtaggggtccccccaggagccatgctggacccatgagcctcgctggggcctcctccccaggcagccaatgggccccagacaagcctttggtggggaacagaacctccgcatcgtgtagttttgtgacataaggagacctcctacttgagctgtctgtaccccagaatcaaacacagaacctcagaaccagatttaggacctcagaatcctgcactcaaggtggcaggacccaatttctgttttatatgttcatgaactttaaacctggaaacatgtccttactaggtgttttatcaaaaaaaagttttcatatttatctctatccctaaccccccaaaaataggatgtcttattattgaagatatttttaaagcaaa

SEQ ID NO: 321075 - protein, 51 aa, Artificial Sequence
  derived and/or modified sequence
NEKSGSCPDMSMPIPPLGICKTLCNSDSGCPNVQKCCKNGCGFMTCTTPVP

SEQ ID NO: 321076 - protein, 52 aa, Artificial Sequence
  derived and/or modified sequence
QVVRPGSCPNVDVPIPPLGLCRTTCQTDANCQEGRKCCKNGCGFMTCETARF

SEQ ID NO: 321077 - protein, 111 aa, Artificial Sequence
  derived and/or modified sequence
QEPDAAGQNTTAVAEKAGTCPQAELEMPDRNCTEACQSDAGCEENKKCCRTGCGTSCQIPDEKPGSCPNVDTPIPPLGLCKTTCSKDSDCSETKKCCKNGCGFMTCTTARP

SEQ ID NO: 321078 - protein, 52 aa, Artificial Sequence
  derived and/or modified sequence
EQEKPGSCPNVDMPIPPLGLCKTTCSKDSDCSETKKCCKNGCGFMTCTTARP

SEQ ID NO: 321079 - protein, 52 aa, Artificial Sequence
  derived and/or modified sequence
QDGKAGSCPDVNQPIPPLGVCKTTCATDSNCPDIQKCCKNGCGHMSCTRPST

SEQ ID NO: 321080 - protein, 51 aa, Artificial Sequence
  derived and/or modified sequence
ENEKAGSCPDVNQPIPPLGLCRNMCESDSGCPNNEKCCKNGCGFMTCSRPR

SEQ ID NO: 321081 - protein, 124 aa, Artificial Sequence
  derived and/or modified sequence
MPACRLGPLAAALLLSLLLFGFTLVSGTGAEKTGVCPELQADQNCTQECVSDSECADNLKCCSAGCATFCSLPNDKEGSCPQVNINFPQLGLCRDQCQVDSQCPGQMKCCRNGCGKVSCVTPNF

SEQ ID NO: 321082 - protein, 79 aa, Artificial Sequence
  derived and/or modified sequence
MPACRLGPLAAALLLSLLLFGFTLVSGTGAEKTGVCPELQADQNCTQECVSDSECADNLKCCSAGCATFCSLPNGQLAE

SEQ ID NO: 321083 - DNA, 375 bp, Artificial Sequence
  derived and/or modified sequence
atgcctgcatgccgcttgggtccactggctgctgccctgcttctctcccttctgcttttcgggtttacgttagtatccggtactggagctgagaagaccggtgtatgtccagagctgcaggccgatcagaactgcacccaagagtgcgtttcagattctgagtgtgccgacaacctgaaatgttgttcggcaggatgcgccacgttctgttccttgccgaatgataaggaggggtcttgcccccaagtcaatatcaactttcctcaactggggctctgtcgagatcaatgtcaggtggatagtcagtgcccgggacagatgaagtgctgcagaaacggatgcggcaaggtgagctgcgtcacccctaatttctag

SEQ ID NO: 321084 - DNA, 240 bp, Artificial Sequence
  derived and/or modified sequence
atgcctgcctgccggctgggacccctagctgcggcactcctgctgtccctgctgcttttcggtttcaccctggtgtcaggtacgggggctgagaagacaggggtctgtcctgagttgcaagcggaccagaattgtacacaagagtgtgtttccgattccgaatgcgccgacaatctgaaatgctgctccgccggttgcgcaactttctgcagtctgcccaacggacagctggccgagtag

SEQ ID NO: 321085 - DNA, 375 bp, Artificial Sequence
  derived and/or modified sequence
atgcccgcgtgccgccttggcccgctcgccgctgccctgctgctgtccttactgctctttggcttcactttagtgtcaggaacaggagccgagaaaaccggagtgtgtcccgaactgcaggctgatcagaactgcacacaggaatgcgtgagtgacagtgagtgtgcggataatcttaagtgctgcagcgctggttgcgcgacattttgctccctccccaatgacaaggaaggtagttgtcctcaagtgaacatcaatttcccccagttggggctgtgtagagaccagtgccaggtcgattcccagtgtcccggacaaatgaaatgctgtcgtaacggttgcggaaaggtgtcctgtgtcacccccaacttttag

SEQ ID NO: 321086 - DNA, 240 bp, Artificial Sequence
  derived and/or modified sequence
atgccagcatgtcgactgggtccactagctgccgcactgctcctatctctgctgctttttgggttcacactcgtgtcggggaccggggcggaaaaaacaggagtctgcccagaactacaggctgaccagaattgcacacaggaatgcgttagcgatagcgaatgtgcagataatcttaaatgttgttcagctgggtgtgctacattttgctctctgcccaatggtcaactggctgagtag

SEQ ID NO: 321087 - DNA, 692 bp, Artificial Sequence
  derived and/or modified sequence
cctgcaccccgcccgggcatagcaccatgcctgcttgtcgcctaggcccgctagccgccgccctcctcctcagcctgctgctgttcggcttcaccctagtctcaggcacaggagcagagaagactggcgtgtgccccgagctccaggctgaccagaactgcacgcaagagtgcgtctcggacagcgaatgcgccgacaacctcaagtgctgcagcgcgggctgtgccaccttctgctctctgcccaatggccaactggctgagtgattcgaagaaagtgaggaatcctccctggacactgtatcgcccttcgtcgtctttcagtcaatctcttccactctaaggattgagtgagcgcgagctggggactctctcaaagataaggagggttcctgcccccaggtgaacattaactttccccagctcggcctctgtcgggaccagtgccaggtggacagccagtgtcctggccagatgaaatgctgccgcaatggctgtgggaaggtgtcctgtgtcactcccaatttctgagctccagccaccaccaggctgagcagtgaggagagaaagtttctgcctggccctgcatctggttccagcccacctgccctcccctttttcgggactctgtattccctcttgggctgaccacagcttctccctttcccaaccaataaagtaaccactttcagc

SEQ ID NO: 321088 - DNA, 375 bp, Artificial Sequence
  derived and/or modified sequence
atgccagcttgtagattaggacctctggctgcagctttactgctctccctgctcttattcggcttcaccctcgtgtcaggaaccggtgcggaaaaaaccggggtgtgtccagaattacaggctgaccagaactgcacacaggaatgcgtgtcggatagtgagtgcgccgacaacttgaagtgctgctcagcaggatgtgccaccttttgctctctgcccaatgataaggaaggtagctgtcctcaagtaaatattaatttcccacagctcggcttgtgccgtgatcagtgccaggtggattcccaatgccctggccagatgaagtgttgccggaacggatgtggtaaggtctcttgtgtaactcctaatttttag

SEQ ID NO: 321089 - DNA, 375 bp, Artificial Sequence
  derived and/or modified sequence
atgcccgcctgcagactgggccccctggccgccgccctgctgctgagcctgctgctgttcggcttcaccctggtgagcggcaccggcgccgagaagaccggcgtgtgccccgagctgcaggccgaccagaactgcacccaggagtgcgtgagcgacagcgagtgcgccgacaacctgaagtgctgcagcgccggctgcgccaccttctgcagcctgcccaacgacaaggagggcagctgcccccaggtgaacatcaacttcccccagctgggcctgtgcagagaccagtgccaggtggacagccagtgccccggccagatgaagtgctgcagaaacggctgcggcaaggtgagctgcgtgacccccaacttctag

SEQ ID NO: 321090 - DNA, 240 bp, Artificial Sequence
  derived and/or modified sequence
atgcccgcctgcagactgggccccctggccgccgccctgctgctgagcctgctgctgttcggcttcaccctggtgagcggcaccggcgccgagaagaccggcgtgtgccccgagctgcaggccgaccagaactgcacccaggagtgcgtgagcgacagcgagtgcgccgacaacctgaagtgctgcagcgccggctgcgccaccttctgcagcctgcccaacggccagctggccgagtag

SEQ ID NO: 321091 - DNA, 375 bp, Artificial Sequence
  derived and/or modified sequence
atgcccgcctgccgactgggaccactcgccgctgcactgcttctgagtcttctgctgtttggcttcaccctcgtcagcggtaccggagcagagaagactggtgtttgccccgaactccaggcagaccagaattgtacacaggagtgtgtgtcagactccgagtgtgccgataacctgaagtgctgttctgctggttgcgccactttttgcagtctgcccaacgataaggagggcagttgcccacaagtgaatattaatttccctcagctaggcctgtgcagggaccagtgtcaggtagactcccagtgccccggacagatgaagtgttgccgtaacgggtgcggcaaggtttcttgtgtaacaccaaatttttag

SEQ ID NO: 321092 - DNA, 240 bp, Artificial Sequence
  derived and/or modified sequence
atgcccgcttgccgtctgggaccactggcagccgcactcctgcttagtcttctgctgtttgggttcaccctcgtttccgggactggcgcagagaagactggagtgtgtcccgaactgcaggctgatcagaattgcactcaggaatgtgtaagcgacagtgagtgcgcggataacctgaagtgttgtagcgccggatgcgccactttttgtagccttccaaacgggcagctggccgagtag

SEQ ID NO: 321093 - DNA, 375 bp, Artificial Sequence
  derived and/or modified sequence
atgcctgcctgccgcctgggccccctggccgccgccctgctgctgagcctgctgctgtttggcttcaccctggtgtctggcaccggggctgagaagacaggagtgtgcccagagctgcaggccgaccagaactgcacccaggagtgtgtgtctgattctgaatgtgccgacaacctgaagtgctgcagcgctggctgtgccaccttctgcagcctgcccaatgacaaggagggcagctgcccccaggtgaacatcaacttcccccagctgggcctgtgccgggaccagtgccaggtggacagccagtgccccggccagatgaagtgctgcagaaatggctgtgggaaggtgtcctgtgtgacccccaacttctag

SEQ ID NO: 321094 - DNA, 614 bp, Artificial Sequence
  derived and/or modified sequence
ccccctcccgcgcgcgcggttaaatccccgcacctgagcatcggctcacacctgcaccccgcccgggcatagcaccatgcctgcttgtcgcctaggcccgctagccgccgccctcctcctcagcctgctgctgttcggcttcaccctagtctcaggcacaggagcagagaagactggcgtgtgccccgagctccaggctgaccagaactgcacgcaagagtgcgtctcggacagcgaatgcgccgacaacctcaagtgctgcagcgcgggctgtgccaccttctgctctctgcccaatgataaggagggttcctgcccccaggtgaacattaactttccccagctcggcctctgtcgggaccagtgccaggtggacagccagtgtcctggccagatgaaatgctgccgcaatggctgtgggaaggtgtcctgtgtcactcccaatttctgagctccagccaccaccaggctgagcagtgaggagagaaagtttctgcctggccctgcatctggttccagcccacctgccctcccctttttcgggactctgtattccctcttgggctgaccacagcttctccctttcccaaccaataaagtaaccactttcagca

SEQ ID NO: 321095 - DNA, 240 bp, Artificial Sequence
  derived and/or modified sequence
atgcctgcctgccgcctgggccccctggccgccgccctgctgctgagcctgctgctgtttggcttcaccctggtgtctggcaccggggctgagaagacaggagtgtgcccagagctgcaggccgaccagaactgcacccaggagtgtgtgtctgattctgaatgtgccgacaacctgaagtgctgcagcgctggctgtgccaccttctgcagcctgcccaacggccagctggccgagtag

SEQ ID NO: 321096 - DNA, 375 bp, Artificial Sequence
  derived and/or modified sequence
atgcccgcctgccggctgggccccctggccgccgccctgctgctgagcctgctgctttttggctttaccctggtttcgggcaccggtgcggaaaagacaggtgtttgcccggaactgcaggccgatcaaaattgcactcaagaatgcgtgtcggactcagagtgtgccgacaatctcaaatgttgctcagcaggctgcgctactttctgttctctgcctaatgacaaggaagggtcttgtcctcaggtcaacatcaacttcccacaactcgggttgtgtcgtgaccaatgccaagtcgactcccaatgcccaggccagatgaagtgctgcaggaatggatgcggcaaggtctcttgtgttacacctaacttttag

SEQ ID NO: 321097 - DNA, 240 bp, Artificial Sequence
  derived and/or modified sequence
atgcccgcctgccggctgggccccctggccgccgccctgctgctgtcactgttgctttttggattcactctcgtgagtggtactggtgccgaaaagaccggcgtttgtccagaattacaggcagaccagaactgtactcaggaatgtgtgtcagactcagagtgcgctgataaccttaagtgctgcagcgctgggtgcgccacattctgctctttgcctaatggccaactggcagaatag

SEQ ID NO: 321098 - RNA, 375 nt, Artificial Sequence
  derived and/or modified sequence
augcccgcgugccgccuuggcccgcucgccgcugcccugcugcuguccuuacugcucuuuggcuucacuuuagugucaggaacaggagccgagaaaaccggagugugucccgaacugcaggcugaucagaacugcacacaggaaugcgugagugacagugagugugcggauaaucuuaagugcugcagcgcugguugcgcgacauuuugcucccuccccaaugacaaggaagguaguuguccucaagugaacaucaauuucccccaguuggggcuguguagagaccagugccaggucgauucccagugucccggacaaaugaaaugcugucguaacgguugcggaaagguguccugugucacccccaacuuuuag

SEQ ID NO: 321099 - RNA, 240 nt, Artificial Sequence
  derived and/or modified sequence
augccagcaugucgacuggguccacuagcugccgcacugcuccuaucucugcugcuuuuuggguucacacucgugucggggaccggggcggaaaaaacaggagucugcccagaacuacaggcugaccagaauugcacacaggaaugcguuagcgauagcgaaugugcagauaaucuuaaauguuguucagcugggugugcuacauuuugcucucugcccaauggucaacuggcugaguag

SEQ ID NO: 321100 - RNA, 375 nt, Artificial Sequence
  derived and/or modified sequence
augccagcuuguagauuaggaccucuggcugcagcuuuacugcucucccugcucuuauucggcuucacccucgugucaggaaccggugcggaaaaaaccgggguguguccagaauuacaggcugaccagaacugcacacaggaaugcgugucggauagugagugcgccgacaacuugaagugcugcucagcaggaugugccaccuuuugcucucugcccaaugauaaggaagguagcuguccucaaguaaauauuaauuucccacagcucggcuugugccgugaucagugccagguggauucccaaugcccuggccagaugaaguguugccggaacggaugugguaaggucucuuguguaacuccuaauuuuuag

SEQ ID NO: 321101 - protein, 407 aa, Artificial Sequence
  derived and/or modified sequence
MTTSGALFPSLVPGSRGASNKYLVEFRAGKMSLKGTTVTPDKRKGLVYIQQTDDSLIHFCWKDRTSGNVEDDLIIFPDDCEFKRVPQCPSGRVYVLKFKAGSKRLFFWMQEPKTDQDEEHCRKVNEYLNNPPMPGALGASGSSGHELSALGGEGGLQSLLGNMSHSQLMQLIGPAGLGGLGGLGALTGPGLASLLGSSGPPGSSSSSSSRSQSAAVTPSSTTSSTRATPAPSAPAAASATSPSPAPSSGNGASTAASPTQPIQLSDLQSILATMNVPAGPAGGQQVDLASVLTPEIMAPILANADVQERLLPYLPSGESLPQTADEIQNTLTSPQFQQALGMFSAALASGQLGPLMCQFGLPAEAVEAANKGDVEAFAKAMQNNAKPEQKEGDTKDKKDEEEDMSLD

SEQ ID NO: 321102 - protein, 317 aa, Artificial Sequence
  derived and/or modified sequence
MTTSGALFPSLVPGSRGASNKYLVEFRAGKMSLKGTTVTPDKRKGLVYIQQTDDSLIHFCWKDRTSGNVEDDLIIFPDDCEFKRVPQCPSGRVYVLKFKAGSKRLFFWMQEPKTDQDEEHCRKVNEYLNNPPMPGALGASGSSGHELSALGAGGLGALTGPGLASLLGSSGPPGSSSSSSGALSLRSSRSQSAAVTPSSTTSSTRATPAPSAPAAASATSPSPAPSSGNGASTAASPTQPIQLSDLQSILATMNVPAGPAGGQQVDLASVLTPEIMAPILANADVQERLLPYLPSGESLPQTADEIQNTLTSPQFQQ

SEQ ID NO: 321103 - DNA, 1224 bp, Artificial Sequence
  derived and/or modified sequence
atgaccaccagcggcgccctgttccccagcctggtgcccggcagcagaggcgccagcaacaagtacctggtggagttcagagccggcaagatgagcctgaagggcaccaccgtgacccccgacaagagaaagggcctggtgtacatccagcagaccgacgacagcctgatccacttctgctggaaggacagaaccagcggcaacgtggaggacgacctgatcatcttccccgacgactgcgagttcaagagagtgccccagtgccccagcggcagagtgtacgtgctgaagttcaaggccggcagcaagagactgttcttctggatgcaggagcccaagaccgaccaggacgaggagcactgcagaaaggtgaacgagtacctgaacaacccccccatgcccggcgccctgggcgccagcggcagcagcggccacgagctgagcgccctgggcggcgagggcggcctgcagagcctgctgggcaacatgagccacagccagctgatgcagctgatcggccccgccggcctgggcggcctgggcggcctgggcgccctgaccggccccggcctggccagcctgctgggcagcagcggcccccccggcagcagcagcagcagcagcagcagaagccagagcgccgccgtgacccccagcagcaccaccagcagcaccagagccacccccgcccccagcgcccccgccgccgccagcgccaccagccccagccccgcccccagcagcggcaacggcgccagcaccgccgccagccccacccagcccatccagctgagcgacctgcagagcatcctggccaccatgaacgtgcccgccggccccgccggcggccagcaggtggacctggccagcgtgctgacccccgagatcatggcccccatcctggccaacgccgacgtgcaggagagactgctgccctacctgcccagcggcgagagcctgccccagaccgccgacgagatccagaacaccctgaccagcccccagttccagcaggccctgggcatgttcagcgccgccctggccagcggccagctgggccccctgatgtgccagttcggcctgcccgccgaggccgtggaggccgccaacaagggcgacgtggaggccttcgccaaggccatgcagaacaacgccaagcccgagcagaaggagggcgacaccaaggacaagaaggacgaggaggaggacatgagcctggactag

SEQ ID NO: 321104 - DNA, 954 bp, Artificial Sequence
  derived and/or modified sequence
atgaccaccagcggcgccctgttccccagcctggtgcccggcagcagaggcgccagcaacaagtacctggtggagttcagagccggcaagatgagcctgaagggcaccaccgtgacccccgacaagagaaagggcctggtgtacatccagcagaccgacgacagcctgatccacttctgctggaaggacagaaccagcggcaacgtggaggacgacctgatcatcttccccgacgactgcgagttcaagagagtgccccagtgccccagcggcagagtgtacgtgctgaagttcaaggccggcagcaagagactgttcttctggatgcaggagcccaagaccgaccaggacgaggagcactgcagaaaggtgaacgagtacctgaacaacccccccatgcccggcgccctgggcgccagcggcagcagcggccacgagctgagcgccctgggcgccggcggcctgggcgccctgaccggccccggcctggccagcctgctgggcagcagcggcccccccggcagcagcagcagcagcagcggcgccctgagcctgagaagcagcagaagccagagcgccgccgtgacccccagcagcaccaccagcagcaccagagccacccccgcccccagcgcccccgccgccgccagcgccaccagccccagccccgcccccagcagcggcaacggcgccagcaccgccgccagccccacccagcccatccagctgagcgacctgcagagcatcctggccaccatgaacgtgcccgccggccccgccggcggccagcaggtggacctggccagcgtgctgacccccgagatcatggcccccatcctggccaacgccgacgtgcaggagagactgctgccctacctgcccagcggcgagagcctgccccagaccgccgacgagatccagaacaccctgaccagcccccagttccagcagtag

SEQ ID NO: 321105 - DNA, 1224 bp, Artificial Sequence
  derived and/or modified sequence
atgacaacatccggcgccctgtttccttcactggtgcccgggagtagaggagcaagtaataagtacctggtggagttccgggcaggtaaaatgagcctgaagggaaccacagtcactcctgataagaggaagggcctggtttacattcagcaaaccgacgacagtttaatccacttctgttggaaagacaggacctctggaaacgtcgaagacgatttaatcatctttcctgacgattgcgaatttaaaagagtgccgcaatgcccttctgggcgcgtgtacgtgctgaagtttaaagccggctccaaacggttgttcttctggatgcaggaaccgaaaacagaccaagacgaagaacactgccggaaggtgaacgagtaccttaataaccctcccatgccaggggccctgggggcgtctggcagtagcggacacgagttgtctgcactgggcggggagggggggctgcagagccttctcggaaatatgagtcacagccagctgatgcagctcatcgggcctgcaggcctgggcgggcttggggggttaggcgctctgactggccctggtttagcctctctcctaggaagctcaggtcctcctggatcttcgagtagcagcagttccaggtcccagtctgcagccgtgaccccaagctccacgaccagctccaccagggctacacctgcaccgagcgcccctgcagctgccagtgccacgtctcccagcccggcaccatcaagcggtaacggggcatcaaccgccgcttcacccacccagcctatacagctgtcagacttgcaatcaatcctagccacgatgaacgtgcccgccggcccagccggcgggcaacaggtggacctcgccagcgtgctgacccctgaaatcatggccccgatcctggccaatgcggacgtgcaggagaggctgctgccttacctgccgagtggagaatcgctgccacaaacagccgatgaaattcagaatacacttactagccctcagtttcagcaggccctgggaatgttttccgcagccttggcatccggccagttgggacctctgatgtgccagttcggtctaccggctgaagctgtcgaagccgccaacaaaggagacgtcgaagccttcgccaaggctatgcaaaacaatgccaagccagaacagaaagaaggcgacaccaaagacaagaaggacgaggaggaagatatgtcattggactag

SEQ ID NO: 321106 - DNA, 954 bp, Artificial Sequence
  derived and/or modified sequence
atgacaacatccggagccctgtttccgagcctcgtacccggctcacgaggcgcctccaacaagtatctggtcgagttcagggccgggaaaatgtccctcaaaggcaccacagtcaccccagataaacgtaaaggactggtgtacattcaacagactgatgatagcctcatccacttctgctggaaggacagaaccagtggtaatgtcgaagatgacttgatcatctttccagatgattgcgagttcaagcgggtcccgcaatgtccgtctggccgtgtttacgtgctgaagtttaaagctggaagtaagagactttttttttggatgcaggagcccaagacagatcaagatgaagaacattgtcgcaaagtgaatgagtatctcaataacccgcccatgcctggcgccttgggtgcgtctggctcctccggtcacgagctgagcgcacttggcgcagggggcctcggcgcactgacaggtccaggactggcctcactcttggggagttctggccctccgggcagctctagcagttccagcggggctctgtcattgagaagttcccgctcccagagtgctgccgtgactccgtcttccaccaccagctcaacccgggctactcctgcacctagcgcacccgcagccgcttctgcaaccagcccaagcccagcgccttccagtggaaatggagctagcaccgcggcgtcacccactcagcctatacagctgtctgacctccagtctatcctggctactatgaatgtgccagctggtccagctggtggccagcaggtcgacctggcctcagtcctgaccccagagataatggccccaattctggccaacgccgacgtacaggagcgcctgcttccttacctcccttctggcgaatccttaccacagaccgccgatgagatccagaatacactaacatcgccacagttccagcagtag

SEQ ID NO: 321107 - DNA, 1371 bp, Artificial Sequence
  derived and/or modified sequence
gcgagcccggacggcgcctctcgaacgagtgtgggcgcgaggcaggatgacgacctcaggcgcgctctttccaagcctggtgccaggctctcggggcgcctccaacaagtacttggtggagtttcgggcgggaaagatgtccctgaaggggaccaccgtgactccggataagcggaaagggctggtgtacattcagcagacggacgactcgcttattcacttctgctggaaggacaggacgtccgggaacgtggaagacgacttgatcatcttccctgacgactgtgagttcaagcgggtgccgcagtgccccagcgggagggtctacgtgctgaagttcaaggcagggtccaagcggcttttcttctggatgcaggaacccaagacagaccaggatgaggagcattgccggaaagtcaacgagtatctgaacaaccccccgatgcctggggcgctgggggccagcggaagcagcggccacgaactctctgcgctaggcggtgagggtggcctgcagagcctgctgggaaacatgagccacagccagctcatgcagctcatcggaccagccggccttggaggactgggtgggctgggggccctgactggacctggcctggccagcttactggggagcagtgggcctccagggagcagctcctcctccagctcccggagccagtcggcagcggtcaccccgtcatccaccacctcttccacccgtgccaccccagccccttctgctccagcagctgcctcagcaactagcccgagccccgcgcccagttccgggaatggagccagcacagcagccagcccgacccagcccatccagctgagcgacctccagagcatcctggccacgatgaacgtaccagccgggccagcaggcggccagcaagtggacctggccagtgtgctgacgccggagataatggctcccatcctcgccaacgcggatgtccaggagcgcctgcttccctacttgccatctggggagtcgctgccgcagaccgcggatgagatccagaataccctgacctcgccccagttccagcaggccctgggcatgttcagcgcagccttggcctcggggcagctgggccccctcatgtgccagttcggtctgcctgcagaggctgtggaggccgccaacaagggcgatgtggaagcgtttgccaaagccatgcagaacaacgccaagcccgagcagaaagagggcgacacgaaggacaagaaggacgaagaggaggacatgagcctggactgagccacgcgccgtcctccgaggaactgggcgcttgcagtgcgttgcacaccctcacctcccacccactgattattaataaagtcttttcttttacctgccaa

SEQ ID NO: 321108 - DNA, 1311 bp, Artificial Sequence
  derived and/or modified sequence
ggaggaagagcgagcccggacggcgcctctcgaacgagtgtgggcgcgaggatgacgacctcaggcgcgctctttccaagcctggtgccaggctctcggggcgcctccaacaagtacttggtggagtttcgggcgggaaagatgtccctgaaggggaccaccgtgactccggataagcggaaagggctggtgtacattcagcagacggacgactcgcttattcacttctgctggaaggacaggacgtccgggaacgtggaagacgacttgatcatcttccctgacgactgtgagttcaagcgggtgccgcagtgccccagcgggagggtctacgtgctgaagttcaaggcagggtccaagcggcttttcttctggatgcaggaacccaagacagaccaggatgaggagcattgccggaaagtcaacgagtatctgaacaaccccccgatgcctggggcgctgggggccagcggaagcagcggccacgaactctctgcgctaggcgcaggtgggctgggggccctgactggacctggcctggccagcttactggggagcagtgggcctccagggagcagctcctcctccagcggtgccctctctcttcgcagctcccggagccagtcggcagcggtcaccccgtcatccaccacctcttccacccgtgccaccccagccccttctgctccagcagctgcctcagcaactagcccgagccccgcgcccagttccgggaatggagccagcacagcagccagcccgacccagcccatccagctgagcgacctccagagcatcctggccacgatgaacgtaccagccgggccagcaggcggccagcaagtggacctggccagtgtgctgacgccggagataatggctcccatcctcgccaacgcggatgtccaggagcgcctgcttccctacttgccatctggggagtcgctgccgcagaccgcggatgagatccagaataccctgacctcgccccagttccagcaggccctgggcatgttcagcgcagccttggcctcggggcagctgggccccctcatgtgccagttcggtctgcctgcagaggctgtggaggccgccaacaagggcgatgtggaagcgtttgccaaagccatgcagaacaacgccaagcccgagcagaaagagggcgacacgaaggacaagaaggacgaagaggaggacatgagcctggactgagccacgcgccgtcctccgaggaactgggcgcttgcagtgcgttgcacaccctcacctcccacccactgattattaataaagtcttttcttttacctgcc

SEQ ID NO: 321109 - DNA, 1224 bp, Artificial Sequence
  derived and/or modified sequence
atgaccaccagcggggccctcttccccagcctggtgcccggcagcagaggagccagcaacaagtacctggtggagttccgggccggcaagatgagcctgaagggcaccaccgtgaccccagacaagaggaagggcctggtgtacatccagcagacagatgacagcctcatccacttctgctggaaggacaggaccagcggaaatgtggaggatgacctgatcatcttcccagatgactgtgagttcaagagggtgccccagtgccccagcggccgggtgtatgtgctgaagttcaaggccggcagcaagaggctcttcttctggatgcaggagcccaagacagaccaggatgaggagcactgcaggaaggtgaatgagtacctgaacaacccccccatgcctggggccctgggcgccagcggcagcagcggccacgagctgagcgccctgggcggggagggcggcctgcagagcctgctgggcaacatgagccacagccagctgatgcagctgattggccctgctggcctgggcggcctgggcggcctgggcgccctgactggacctggcctggccagcctgctgggcagcagcggccccccaggcagcagcagcagcagcagcagccgcagccagagcgctgctgtgacccccagcagcaccaccagcagcacccgggccaccccagcccccagcgccccagctgctgccagcgccaccagccccagccctgcccccagcagtggaaatggagccagcacagctgccagccccacccagcccatccagctgagtgacctgcagagcatcctggccaccatgaatgtgcctgctggccctgctgggggccagcaggtggacctggcctctgtgctgaccccagagatcatggcccccatcctggccaatgctgatgtgcaggagcggctgctgccctacctgcccagcggggagagcctgccccagacagcagatgagatccagaacaccctgaccagcccccagttccagcaggccctgggcatgttttctgctgccctggccagcggccagctgggccccctgatgtgccagtttggcctgcctgctgaggccgtggaggccgccaacaagggagatgtggaggcctttgccaaggccatgcagaacaatgccaagccagagcagaaggagggggacaccaaggacaagaaggatgaggaggaggacatgagcctggactag

SEQ ID NO: 321110 - DNA, 954 bp, Artificial Sequence
  derived and/or modified sequence
atgaccaccagcggggccctcttccccagcctggtgcccggcagcagaggagccagcaacaagtacctggtggagttccgggccggcaagatgagcctgaagggcaccaccgtgaccccagacaagaggaagggcctggtgtacatccagcagacagatgacagcctcatccacttctgctggaaggacaggaccagcggaaatgtggaggatgacctgatcatcttcccagatgactgtgagttcaagagggtgccccagtgccccagcggccgggtgtatgtgctgaagttcaaggccggcagcaagaggctcttcttctggatgcaggagcccaagacagaccaggatgaggagcactgcaggaaggtgaatgagtacctgaacaacccccccatgcctggggccctgggcgccagcggcagcagcggccacgagctgagcgccctgggcgctgggggcctgggcgccctgactggacctggcctggccagcctgctgggcagcagcggccccccaggcagcagcagcagcagcagcggggccctgagcctgcggagcagccgcagccagagcgctgctgtgacccccagcagcaccaccagcagcacccgggccaccccagcccccagcgccccagctgctgccagcgccaccagccccagccctgcccccagcagtggaaatggagccagcacagctgccagccccacccagcccatccagctgagtgacctgcagagcatcctggccaccatgaatgtgcctgctggccctgctgggggccagcaggtggacctggcctctgtgctgaccccagagatcatggcccccatcctggccaatgctgatgtgcaggagcggctgctgccctacctgcccagcggggagagcctgccccagacagcagatgagatccagaacaccctgaccagcccccagttccagcagtag

SEQ ID NO: 321111 - DNA, 1224 bp, Artificial Sequence
  derived and/or modified sequence
atgaccaccagcggcgccctgttccccagcctggtgcccggcagcagaggcgcctcgaacaaatacctcgtcgagtttcgggcagggaaaatgtccctaaaaggcacaaccgtgacaccagacaagagaaaaggacttgtgtatattcagcagaccgatgactcccttattcacttctgttggaaggatcgaacatccgggaatgtcgaagatgatctcattattttcccagacgactgtgaattcaagcgagtgccgcagtgcccttcagggcgggtctatgttctgaaattcaaggctgggtccaaacgcctgtttttctggatgcaggaacccaagacagaccaagatgaagagcactgtcgaaaggtgaatgaatacctcaataacccaccaatgcctggtgccctcggggcgagcgggagctcagggcacgaattatctgcccttggaggagagggtgggctgcagtccctgctgggcaacatgtctcatagccagctgatgcagctgatcggacctgcaggtctgggtgggttgggcggacttggcgccctgactggaccagggttagcatctctattaggttcctcgggaccccctggtagctcctcttcttcaagctcacggtcccagtccgcggctgtcacccccagtagcaccacttctagtacacgggcgacaccagcgcccagcgcccctgctgccgcgtcggcaaccagtccttctccagcaccaagctctgggaacggcgcgtccacagccgcatcacccactcagccaattcagctttctgatttgcaatcaatcctggctacaatgaacgtgccagccggcccggcaggtggccagcaagtggacctcgcctctgtgctgactcctgaaattatggccccaatcttagccaacgccgacgtgcaggaaaggttgctcccttaccttccttctggggagtcactcccccagacggccgatgagatccagaataccctcacctccccacagttccagcaggccctgggcatgttttctgctgcccttgcctctgggcagctcggaccgctgatgtgtcagtttgggctgccagccgaagctgtagaagcagctaacaagggcgacgtagaggctttcgcaaaggcaatgcaaaacaatgccaaaccagaacagaaggaaggggacacgaaggataaaaaggacgaggaagaagacatgtctctggactag

SEQ ID NO: 321112 - DNA, 954 bp, Artificial Sequence
  derived and/or modified sequence
atgaccaccagcggcgccctgttccccagcctggtgcccggcagcaggggagccagtaataagtaccttgtggaatttagagccggcaaaatgagtctaaaagggacaaccgttacacccgataaacgaaaggggcttgtgtacatccagcaaaccgacgacagtctgattcatttctgctggaaggaccggacatcaggaaacgtagaggatgacctgattattttccctgacgattgtgagttcaagcgcgttcctcagtgtccgtcagggcgggtttatgttcttaagttcaaggccgggtcgaagcggttattcttttggatgcaagaacccaagaccgaccaggacgaagaacattgccgaaaagtgaatgagtaccttaacaatccacccatgcctggagcattaggagccagcggttcgtctggtcacgagctcagcgcccttggcgcgggcggactgggggctttaaccggccctggtctggcaagcttgctcggcagctcagggccgccaggatccagctcttcgtcctcaggcgctctcagcctccggtccagccgatctcagtctgcagctgtcaccccatctagcaccacatcatcaactcgagcaaccccagctcccagtgctcccgcagcggcgtccgccactagccctagcccggccccctcctcaggtaacggtgcctcaaccgccgccagccccacccagccaatccaactcagtgacctgcagagcatcctggctacaatgaatgtccctgcaggacccgctgggggacaacaggtcgatctcgcttccgtgttaacgcccgagattatggcgccaatattagctaacgcagatgtccaagaacgccttctgccttatttgccttccggagagtcacttccgcagactgcagacgagattcagaacaccctcacgagccctcaatttcagcaatag

SEQ ID NO: 321113 - DNA, 1224 bp, Artificial Sequence
  derived and/or modified sequence
atgaccacgagcggagcactttttccttcccttgtgcccggatctcgcggagcaagtaacaagtaccttgttgaattcagggcaggtaaaatgtccctgaaaggcaccacagtgacaccggataaacggaagggacttgtgtacatccagcaaaccgacgattccctgattcacttctgttggaaagaccgcacaagcggcaatgtcgaagatgacctgatcatatttccagatgactgcgaatttaaacgtgtaccacagtgtcccagtgggagagtgtacgttttaaaatttaaggccggaagcaaaagactatttttctggatgcaagaaccgaaaaccgaccaggatgaggagcattgccggaaggttaatgagtacctgaacaacccccctatgccgggagcccttggagcctcaggatcttccggccatgaactttccgccctagggggagagggaggactacagtctctactaggcaacatgtcacattcccagctcatgcagttaatcggtccggcaggtcttggtggtctcggcggactgggggctctcactggcccaggattggcaagtcttctgggcagttctgggccacctggcagctcgagctcatcctcatcccggagtcagtctgcagctgttaccccctcctctacaactagctcaacaagggccacacccgctccatctgctccagctgcagcttccgccacatccccctcccctgcccctagttccggtaacggcgcttccactgctgcctcccctacacagccaatccagttatccgatcttcagagcattctagctaccatgaacgtccccgcaggtcctgccggaggccagcaggtggacttggcgagcgtgctgacaccagagatcatggctcccatcctcgccaatgcagacgtccaagagaggctgctcccttacttacctagcggcgaatccctgcctcagactgccgatgagatacagaataccctcacctctccccagttccagcaggccctgggcatgttctctgcagccctggcttccggacagctcggcccactgatgtgtcagtttggcttacctgccgaggccgttgaggcagccaataaaggtgacgttgaagcattcgccaaggccatgcagaacaatgctaaaccagagcagaaagagggtgataccaaggacaagaaggatgaggaagaagatatgtcccttgactag

SEQ ID NO: 321114 - DNA, 954 bp, Artificial Sequence
  derived and/or modified sequence
atgacaactagcggcgctttgttcccttctttggtccccggtagccgaggcgcaagtaacaaatatctggttgagtttcgcgctggtaaaatgtccctcaagggaactaccgtgacccccgacaaacggaaaggactcgtctacatccagcaaaccgatgattctttgattcacttctgttggaaagacaggactagcggcaatgtggaagacgacctgatcattttcccagacgactgtgaatttaagcgcgtgcctcagtgtccttccggcagggtatatgtgttaaagtttaaggcgggatctaagcgcctgttcttctggatgcaggaaccaaaaactgaccaagacgaagaacattgtagaaaagtcaacgagtatttgaacaatccacctatgcccggtgctctgggcgcttccggttcatctggacatgaactttccgcccttggggcaggaggccttggagctctgacggggccaggattagcctccctactggggtcaagcggaccccctgggagctcctcgagtagcagtggtgcgctgtcactgcgctcttccaggtcacagtcagccgcagtgactcctagtagcaccacatcctcaacgagggccacccccgcaccctcagctcccgctgctgcatctgccacctcaccctcgcccgcaccgtcctcggggaacggagcttccactgcggctagtcccactcagccaatccagcttagcgatctgcagtctatcctggccacaatgaatgttccagccggacctgccggagggcaacaggtggatctcgcctccgtacttacccctgaaattatggccccaatccttgcaaatgccgacgtgcaagagcgcctgttaccatatttacccagcggagaaagcctgccacagacagccgatgaaatccagaatacactcacaagccctcagtttcagcagtag

SEQ ID NO: 321115 - protein, 1451 aa, Artificial Sequence
  derived and/or modified sequence
MASLAALALSLLLRLQLPPLPGARAQSAAGGCSFDEHYSNCGYSVALGTNGFTWEQINTWEKPMLDQAVPTGSFMMVNSSGRASGQKAHLLLPTLKENDTHCIDFHYYFSSRDRSSPGALNVYVKVNGGPQGNPVWNVSGVVTEGWVKAELAISTFWPHFYQVIFESVSLKGHPGYIAVDEVRVLAHPCRKAPHFLRLQNVEVNVGQNATFQCIAGGKWSQHDKLWLQQWNGRDTALMVTRVVNHRRFSATVSVADTAQRSVSKYRCVIRSDGGSGVSNYAELIVKEPPTPIAPPELLAVGATYLWIKPNANSIIGDGPIILKEVEYRTTTGTWAETHIVDSPNYKLWHLDPDVEYEIRVLLTRPGEGGTGPPGPPLTTRTKCADPVHGPQNVEIVDIRARQLTLQWEPFGYAVTRCHSYNLTVQYQYVFNQQQYEAEEVIQTSSHYTLRGLRPFMTIRLRLLLSNPEGRMESEELVVQTEEDVPGAVPLESIQGGPFEEKIYIQWKPPNETNGVITLYEINYKAVGSLDPSADLSSQRGKVFKLRNETHHLFVGLYPGTTYSFTIKASTAKGFGPPVTTRIATKISAPSMPEYDTDTPLNETDTTITVMLKPAQSRGAPVSVYQLVVKEERLQKSRRAADIIECFSVPVSYRNASSLDSLHYFAAELKPANLPVTQPFTVGDNKTYNGYWNPPLSPLKSYSIYFQALSKANGETKINCVRLATKGASTQNSNTVEPEKQVDNTVKMAGVIAGLLMFIIILLGVMLTIKRRKLAKKQKETQSGAQREMGPVASADKPTTKLSASRNDEGFSSSSQDVNGFTDGSRGELSQPTLTIQTHPYRTCDPVEMSYPRDQFQPAIRVADLLQHITQMKRGQGYGFKEEYEALPEGQTASWDTAKEDENRNKNRYGNIISYDHSRVRLLVLDGDPHSDYINANYIDGYHRPRHYIATQGPMQETVKDFWRMIWQENSASIVMVTNLVEVGRHPAEHTVGNATLGRAASPGMVKCVRYWPDDTEVYGDIKVTLIETEPLAEYVIRTFTVQKKGYHEIRELRLFHFTSWPDHGVPCYATGLLGFVRQVKFLNPPEAGPIVVHCSAGAGRTGCFIAIDTMLDMAENEGVVDIFNCVRELRAQRVNLVQTEEQYVFVHDAILEACLCGNTAIPVCEFRSLYYNISRLDPQTNSSQIKDEFQTLNIVTPRVRPEDCSIGLLPRNHDKNRSMDVLPLDRCLPFLISVDGESSNYINAALMDSHKQPAAFVVTQHPLPNTVADFWRLVFDYNCSSVVMLNEMDTAQFCMQYWPEKTSGCYGPIQVEFVSADIDEDIIHRIFRICNMARPQDGYRIVQHLQYIGWPAYRDTPPSKRSLLKVVRRLEKWQEQYDGREGRTVVHCLNGGGRSGTFCAICSVCEMIQQQNIIDVFHIVKTLRNNKSNMVETLEQYKFVYEVALEYLSSF

SEQ ID NO: 321116 - DNA, 4356 bp, Artificial Sequence
  derived and/or modified sequence
atggccagcctggccgccctggccctgagcctgctgctgagactgcagctgccccccctgcccggcgccagagcccagagcgccgccggcggctgcagcttcgacgagcactacagcaactgcggctacagcgtggccctgggcaccaacggcttcacctgggagcagatcaacacctgggagaagcccatgctggaccaggccgtgcccaccggcagcttcatgatggtgaacagcagcggcagagccagcggccagaaggcccacctgctgctgcccaccctgaaggagaacgacacccactgcatcgacttccactactacttcagcagcagagacagaagcagccccggcgccctgaacgtgtacgtgaaggtgaacggcggcccccagggcaaccccgtgtggaacgtgagcggcgtggtgaccgagggctgggtgaaggccgagctggccatcagcaccttctggccccacttctaccaggtgatcttcgagagcgtgagcctgaagggccaccccggctacatcgccgtggacgaggtgagagtgctggcccacccctgcagaaaggccccccacttcctgagactgcagaacgtggaggtgaacgtgggccagaacgccaccttccagtgcatcgccggcggcaagtggagccagcacgacaagctgtggctgcagcagtggaacggcagagacaccgccctgatggtgaccagagtggtgaaccacagaagattcagcgccaccgtgagcgtggccgacaccgcccagagaagcgtgagcaagtacagatgcgtgatcagaagcgacggcggcagcggcgtgagcaactacgccgagctgatcgtgaaggagccccccacccccatcgccccccccgagctgctggccgtgggcgccacctacctgtggatcaagcccaacgccaacagcatcatcggcgacggccccatcatcctgaaggaggtggagtacagaaccaccaccggcacctgggccgagacccacatcgtggacagccccaactacaagctgtggcacctggaccccgacgtggagtacgagatcagagtgctgctgaccagacccggcgagggcggcaccggcccccccggcccccccctgaccaccagaaccaagtgcgccgaccccgtgcacggcccccagaacgtggagatcgtggacatcagagccagacagctgaccctgcagtgggagcccttcggctacgccgtgaccagatgccacagctacaacctgaccgtgcagtaccagtacgtgttcaaccagcagcagtacgaggccgaggaggtgatccagaccagcagccactacaccctgagaggcctgagacccttcatgaccatcagactgagactgctgctgagcaaccccgagggcagaatggagagcgaggagctggtggtgcagaccgaggaggacgtgcccggcgccgtgcccctggagagcatccagggcggccccttcgaggagaagatctacatccagtggaagccccccaacgagaccaacggcgtgatcaccctgtacgagatcaactacaaggccgtgggcagcctggaccccagcgccgacctgagcagccagagaggcaaggtgttcaagctgagaaacgagacccaccacctgttcgtgggcctgtaccccggcaccacctacagcttcaccatcaaggccagcaccgccaagggcttcggcccccccgtgaccaccagaatcgccaccaagatcagcgcccccagcatgcccgagtacgacaccgacacccccctgaacgagaccgacaccaccatcaccgtgatgctgaagcccgcccagagcagaggcgcccccgtgagcgtgtaccagctggtggtgaaggaggagagactgcagaagagcagaagagccgccgacatcatcgagtgcttcagcgtgcccgtgagctacagaaacgccagcagcctggacagcctgcactacttcgccgccgagctgaagcccgccaacctgcccgtgacccagcccttcaccgtgggcgacaacaagacctacaacggctactggaacccccccctgagccccctgaagagctacagcatctacttccaggccctgagcaaggccaacggcgagaccaagatcaactgcgtgagactggccaccaagggcgccagcacccagaacagcaacaccgtggagcccgagaagcaggtggacaacaccgtgaagatggccggcgtgatcgccggcctgctgatgttcatcatcatcctgctgggcgtgatgctgaccatcaagagaagaaagctggccaagaagcagaaggagacccagagcggcgcccagagagagatgggccccgtggccagcgccgacaagcccaccaccaagctgagcgccagcagaaacgacgagggcttcagcagcagcagccaggacgtgaacggcttcaccgacggcagcagaggcgagctgagccagcccaccctgaccatccagacccacccctacagaacctgcgaccccgtggagatgagctaccccagagaccagttccagcccgccatcagagtggccgacctgctgcagcacatcacccagatgaagagaggccagggctacggcttcaaggaggagtacgaggccctgcccgagggccagaccgccagctgggacaccgccaaggaggacgagaacagaaacaagaacagatacggcaacatcatcagctacgaccacagcagagtgagactgctggtgctggacggcgacccccacagcgactacatcaacgccaactacatcgacggctaccacagacccagacactacatcgccacccagggccccatgcaggagaccgtgaaggacttctggagaatgatctggcaggagaacagcgccagcatcgtgatggtgaccaacctggtggaggtgggcagacaccccgccgagcacaccgtgggcaacgccaccctgggcagagccgccagccccggcatggtgaagtgcgtgagatactggcccgacgacaccgaggtgtacggcgacatcaaggtgaccctgatcgagaccgagcccctggccgagtacgtgatcagaaccttcaccgtgcagaagaagggctaccacgagatcagagagctgagactgttccacttcaccagctggcccgaccacggcgtgccctgctacgccaccggcctgctgggcttcgtgagacaggtgaagttcctgaacccccccgaggccggccccatcgtggtgcactgcagcgccggcgccggcagaaccggctgcttcatcgccatcgacaccatgctggacatggccgagaacgagggcgtggtggacatcttcaactgcgtgagagagctgagagcccagagagtgaacctggtgcagaccgaggagcagtacgtgttcgtgcacgacgccatcctggaggcctgcctgtgcggcaacaccgccatccccgtgtgcgagttcagaagcctgtactacaacatcagcagactggacccccagaccaacagcagccagatcaaggacgagttccagaccctgaacatcgtgacccccagagtgagacccgaggactgcagcatcggcctgctgcccagaaaccacgacaagaacagaagcatggacgtgctgcccctggacagatgcctgcccttcctgatcagcgtggacggcgagagcagcaactacatcaacgccgccctgatggacagccacaagcagcccgccgccttcgtggtgacccagcaccccctgcccaacaccgtggccgacttctggagactggtgttcgactacaactgcagcagcgtggtgatgctgaacgagatggacaccgcccagttctgcatgcagtactggcccgagaagaccagcggctgctacggccccatccaggtggagttcgtgagcgccgacatcgacgaggacatcatccacagaatcttcagaatctgcaacatggccagaccccaggacggctacagaatcgtgcagcacctgcagtacatcggctggcccgcctacagagacaccccccccagcaagagaagcctgctgaaggtggtgagaagactggagaagtggcaggagcagtacgacggcagagagggcagaaccgtggtgcactgcctgaacggcggcggcagaagcggcaccttctgcgccatctgcagcgtgtgcgagatgatccagcagcagaacatcatcgacgtgttccacatcgtgaagaccctgagaaacaacaagagcaacatggtggagaccctggagcagtacaagttcgtgtacgaggtggccctggagtacctgagcagcttctag

SEQ ID NO: 321117 - DNA, 4356 bp, Artificial Sequence
  derived and/or modified sequence
atggcttctcttgcagccctggccctctccctgctgctgagactgcaactacctccccttcccggggcgcgggcacagagtgcagctggaggctgttcctttgacgagcattacagtaactgcggatacagcgtcgccttggggacaaatgggttcacctgggagcagatcaatacatgggaaaagcctatgctagatcaggccgtcccgacaggatctttcatgatggtcaactcatcaggccgagcatccgggcaaaaggcccacctgctgcttcctaccctgaaggaaaatgatacgcactgtattgattttcattattacttttcgtcacgagaccggagcagccctggagccctcaatgtgtacgtgaaagtaaacggcggacctcagggcaaccccgtgtggaatgtgagtggagtggtgactgaaggatgggtgaaggcagaacttgccatcagcacattttggcctcatttctatcaggtcatcttcgaatcagtgagtcttaaaggtcatcctggatacattgctgtagacgaagtaagagttctcgcccacccctgcaggaaggctcctcacttcctgcgacttcagaacgtcgaagtgaatgtgggacagaacgccacgtttcagtgtattgcaggaggcaaatggtcacagcacgacaagctctggttgcaacagtggaacggtcgtgacacagctctgatggtcaccagagtagtgaaccataggagattcagtgccactgtatccgtggcagacactgcacaaaggagcgtgtcaaagtatagatgcgttattagatcggacggcggcagtggcgttagcaattacgccgaactgatcgtgaaggagccccctacccccatcgctcccccggaactgctggcagtcggagcgacctacctttggataaagccaaacgcgaattctatcattggggatggtcccataattcttaaggaggtggagtaccggacaaccacaggcacctgggcggagacgcacatcgttgattctccaaactataagctgtggcacctggatcccgacgtggaatacgagatacgcgtgctcctgacacggccaggcgaaggcggcactggaccacccggcccaccattgacaacgcgaacaaagtgtgccgaccctgtccacggccctcagaacgtcgaaattgtcgatatccgagcccggcagctgacacttcagtgggagccttttggttacgctgtcacaaggtgtcatagctacaacctcaccgtgcagtaccagtacgtgtttaaccagcagcaatacgaagcagaggaagtaatccaaaccagcagtcactacacgttacgaggattgagaccattcatgacaatcagacttaggctccttctgagtaacccggagggacggatggagtctgaagagttggtcgtgcaaacagaagaggacgtgcctggcgctgtcccattggagagcattcagggtgggccgttcgaggagaaaatttacattcaatggaaacctccgaacgagacaaatggagtgatcactctctacgaaatcaattataaggccgtaggctccctggaccctagcgccgatctctcatcccagcgcgggaaggtgttcaagctgagaaatgagactcaccatttgtttgtgggcctataccccggtactacctatagcttcaccattaaggcaagcacggccaaaggctttggacctccagttaccaccaggatcgctactaaaatcagcgccccgtcgatgcccgagtatgacacagacacacccctgaatgaaaccgatacaacgatcaccgtcatgcttaagcctgcgcagagtcgcggggccccagtctccgtgtatcagctcgtcgtcaaggaggagaggctgcagaagtcaaggcgagccgccgatatcatcgaatgcttcagtgttcccgtaagctatcgtaatgcctcatctctagactctctgcattatttcgcggccgagctcaaacccgctaacctgccagtgactcagccgttcactgtgggcgacaacaaaacatacaatggatactggaaccccccattgtctccacttaagtcatactccatttatttccaggcattgtctaaagcaaatggggagactaagattaattgtgtgaggctggccacgaagggagctagcacacaaaactcgaatacagtggagcccgagaagcaggtagacaacaccgtgaaaatggcaggagtcatcgcaggtctgctgatgtttattattattttgcttggtgtgatgctgactattaagaggagaaagttagctaaaaaacagaaggagacccagagtggcgcccaaagagagatggggccggtggccagcgccgacaaacccaccacaaagctgtctgctagcagaaacgatgaaggcttcagcagttccagccaggacgtgaacggatttacagacgggtctaggggcgagctgtcccagcctacactaaccatccagactcacccatacagaacctgcgaccccgtagaaatgtcttaccctagggatcagttccaacctgccatccgggtcgccgatctgctgcagcacatcacccagatgaaacgcggccaaggttacggatttaaggaagaatacgaggcactcccagagggacagacagcctcctgggacaccgccaaagaagacgagaatcggaataagaaccggtacggaaacattatttcctatgatcactcgcgcgtacgtttactcgtcctggacggtgacccgcatagcgattacatcaacgccaattacatagatggctatcacaggccaaggcactatatcgcaacacaggggccgatgcaagaaactgtgaaggacttctggaggatgatttggcaggagaacagcgctagcattgtgatggtcactaatctagttgaagtaggacgacatcctgccgaacacacagtcggaaacgccaccttaggtagagccgccagccccggtatggtgaaatgcgtgcgatactggcctgatgatactgaagtgtatggagatattaaggtaactctgatagagacggagcctctggccgaatatgttatccggacgtttacagtccagaaaaagggataccacgaaatccgcgaactgaggttgttccacttcacaagttggccggatcacggcgtaccttgttacgccaccgggctgcttggctttgttcgacaggtgaagtttcttaacccccccgaggctggacctatagtggtgcattgtagcgccggggccggcaggactgggtgcttcatcgcgatcgatacaatgctggatatggccgagaatgagggtgttgttgacattttcaattgcgtccgcgagctgcgcgctcaacgagtcaatctggttcaaaccgaagaacagtacgtctttgtgcatgacgccatccttgaggcatgcctgtgtgggaacacagccatacccgtctgtgaattcaggagtctgtattacaatatatctaggctggacccgcagactaactcatctcagataaaagacgaattccaaacgctgaacatagtcacacctcgggtgcggcctgaggactgcagcatcggactccttccaagaaaccacgacaaaaatcgttccatggatgtacttcctttggaccgctgtctcccctttctgatctctgtggatggggagagcagtaattatattaatgccgctctcatggacagccacaagcagcctgccgcatttgtggtgacccaacacccccttccaaatactgttgctgatttttggagactcgtgtttgactacaactgtagttctgtagtgatgctaaatgagatggacacagcccaattctgcatgcagtattggccagaaaagacgagcggatgctacggacccatccaggttgagttcgtgtccgcagatatagatgaggatataatccacagaatcttccggatctgtaacatggcccgaccccaggatggttacaggattgttcaacacctgcagtatatcggttggcccgcctaccgtgacactcctccttccaagcggtccctgctcaaggtcgttcggaggctggaaaaatggcaagagcagtatgatggtagagaagggcgcaccgtggtccactgcctgaacggagggggccgatccggcaccttttgcgcgatctgtagcgtatgcgagatgatccagcagcagaatattattgacgttttccacattgttaagacgcttcgcaataataagtcgaacatggttgagactctcgagcagtacaaattcgtctacgaggtggcgttggagtacctcagcagcttttag

SEQ ID NO: 321118 - DNA, 4356 bp, Artificial Sequence
  derived and/or modified sequence
atggccagcctggccgccctggccctgagcctgctgctgcggctgcagctgccccccctgcccggggcccgggcccagagcgctgctgggggctgcagctttgatgagcactacagcaactgtggctacagcgtggccctgggcaccaacggcttcacctgggagcagatcaacacctgggagaagcccatgctggaccaggccgtgcccaccggcagcttcatgatggtgaacagcagcggccgggccagcggccagaaggcccacctgctgctgcccaccctgaaggaaaatgacacccactgcatcgacttccactactacttcagcagccgggacaggagcagccctggggccctgaatgtgtatgtgaaggtgaatggaggcccccagggcaaccctgtgtggaatgtgtctggagtggtgacagagggctgggtgaaggccgagctggccatcagcaccttctggccccacttctaccaggtgatctttgaatctgtgtccctgaagggccaccctggctacatcgctgtggatgaggtgcgggtgctggcccacccctgcaggaaggccccccacttcctgcggctgcagaatgtggaggtgaatgtgggccagaatgccaccttccagtgcatcgccggcggcaagtggagccagcacgacaagctgtggctgcagcagtggaatggccgggacacagccctgatggtgaccagggtggtgaaccaccggcgcttcagcgccaccgtgtctgtggccgacacagcccagaggtctgtgtccaagtaccgctgtgtgatccgcagtgatggcggcagcggcgtgagcaactatgcagagctgattgtgaaggagccccccacccccatcgcccctcctgagctgctggccgtgggcgccacctacctgtggatcaagcccaatgccaacagcatcattggagatggccccatcatcctgaaggaggtggagtaccgcaccaccaccggcacctgggccgagacccacatcgtggacagccccaactacaagctgtggcacctggaccctgatgtggagtatgagatccgggtgctgctgaccaggcctggagagggcggcaccggccccccaggcccccccctgaccaccaggaccaagtgtgccgaccctgtgcacggcccccagaatgtggagatcgtggacatccgggcccggcagctgaccctgcagtgggagcccttcggctatgctgtgacccgctgccacagctacaacctgactgtgcagtaccagtatgtgttcaaccagcagcagtatgaagctgaggaggtgatccagaccagcagccactacaccctgcggggcctgcggcccttcatgaccatccggctgcggctgctgctgagcaaccctgagggccgcatggagagcgaggagctggtggtgcagacagaggaggatgtgcctggagctgtgcccctggagagcatccagggcggcccctttgaggagaagatctacatccagtggaagcccccaaatgagaccaatggagtcatcaccctgtatgagatcaactacaaggctgtgggcagcctggaccccagcgctgacctgagcagccagaggggcaaggtgttcaagctgagaaatgagacccaccacctgtttgtgggcctgtacccaggcaccacctacagcttcaccatcaaggccagcacagccaagggcttcggcccccctgtgaccacccgcatcgccaccaagatcagcgcccccagcatgccagaatatgacacagacacccccctgaatgaaacagacaccaccatcaccgtgatgctgaagccagcccagagcagaggagcccctgtgtctgtgtaccagctggtggtgaaggaggagcggctgcagaagagcagaagagctgctgacatcatcgagtgcttctctgtgcctgtgtcctacagaaatgccagcagcctggacagcctgcactactttgctgctgagctgaagccagccaacctgcctgtgacccagcccttcaccgtgggggacaacaagacctacaacggctactggaacccccccctgagccccctgaagagctacagcatctacttccaggccctgagcaaggccaacggggagaccaagatcaactgtgtgcggctggccaccaagggggccagcacccagaacagcaacacagtggagcctgagaagcaggtggacaacacagtgaagatggccggcgtgattgctggcctgctgatgttcatcatcatcctgctgggcgtgatgctgaccatcaagaggaggaagctggccaagaagcagaaggagacccagagcggggcccagcgggagatgggccctgtggccagcgctgacaagcccaccaccaagctgagcgccagcagaaatgatgagggcttcagcagcagcagccaggatgtgaatggcttcacagatggcagcagaggagagctgagccagcccaccctgaccatccagacccacccctaccgcacctgtgaccctgtggagatgagctacccccgggaccagttccagcctgccatccgggtggccgacctgctgcagcacatcacccagatgaagaggggccagggctacggcttcaaggaggagtatgaggccctgcctgagggccagacagcctcctgggacacagccaaggaggatgaaaatagaaacaagaacagatatggcaacatcatctcctatgaccacagccgggtgcggctgctggtgctggatggagacccccacagcgactacatcaatgccaactacattgatggctaccaccggcccaggcactacatcgccacccagggccccatgcaggagaccgtgaaggacttctggaggatgatctggcaggagaacagcgccagcatcgtgatggtgaccaacctggtggaggtgggccgccaccctgctgagcacacagtgggcaatgccaccctgggccgggccgccagccctggcatggtgaagtgtgtgcgctactggccagatgacacagaggtgtatggagacatcaaggtgaccctcatcgagacagagcccctggccgagtatgtgatccgcaccttcaccgtgcagaagaagggctaccacgagatccgggagctgcggctcttccacttcacctcctggccagaccatggagtgccctgctacgccaccggcctgctgggctttgtgcggcaggtgaagttcctgaaccccccagaggccggccccatcgtggtgcactgcagcgctggggccggccgcacaggctgcttcatcgccatcgacaccatgctggacatggctgaaaatgaaggagtggtggacatcttcaactgtgtgcgggagctgcgggcccagagggtgaacctggtgcagacagaggagcagtatgtgtttgtgcatgatgccatcctggaggcctgcctgtgtggcaacacagccatccctgtgtgtgagttccgcagcctgtactacaacatcagccggctggacccccagaccaacagcagccagatcaaggatgagttccagaccctgaacatcgtgaccccccgggtgcggcctgaggactgcagcatcggcctgctgcccagaaatcatgacaagaacagatccatggatgtgctgcccctggaccgctgcctgcccttcctgatctctgtggatggagagagcagcaactacatcaatgctgccctgatggacagccacaagcagcctgctgcctttgtggtgacccagcaccccctgcccaacacagtggccgacttctggaggctggtgtttgactacaactgcagctctgtggtgatgctgaatgagatggacacagcccagttctgcatgcagtactggccagagaagaccagcggctgctacggccccatccaggtggagtttgtgtctgctgacattgatgaggacatcatccaccgcatcttccgcatctgcaacatggcccggccccaggacggctacagaattgtgcagcacctgcagtacatcggctggccagcctacagagacaccccacccagcaagaggagcctgctgaaggtggtgcggcggctggagaagtggcaggagcagtatgatggccgggagggccgcacagtggtgcactgcctgaatggaggcggccgcagcggcaccttctgtgccatctgcagcgtgtgtgagatgatccagcagcagaacatcattgatgtgttccacatcgtgaagaccctgaggaacaacaagagcaacatggtggagaccctggagcagtacaagtttgtgtatgaggtggccctggagtacctgagcagcttctag

SEQ ID NO: 321119 - DNA, 4356 bp, Artificial Sequence
  derived and/or modified sequence
atggccagcctggccgccctggccctgagcctgctgctgcggctgcagcttccaccccttcccggcgcccgcgctcagtccgctgctggcggctgcagttttgacgagcattacagtaactgtggttattcagtggcgctcggcaccaacggcttcacttgggagcagatcaacacttgggagaagccgatgctcgatcaggctgtgccaactggcagttttatgatggtgaactccagcggacgcgcatcaggccagaaggcccatctcctgctgccaacactcaaggagaacgacactcactgcatcgatttccattactatttttcttcccgcgaccggtcgagtcctggagctctgaatgtctatgttaaagtgaatggtggcccacaggggaatccagtctggaacgtctccggggtggtcaccgaaggctgggttaaggcggagctggctatcagcactttttggccacatttttaccaggttatctttgaatccgtcagtttaaagggccacccagggtacatagccgtcgacgaggtacgcgtgctggcacatccttgcaggaaggctccccactttctccgtctgcagaatgtcgaagtgaacgtaggtcagaatgcgacttttcaatgcatagcaggaggtaagtggtcacagcacgacaaattgtggttacagcagtggaacggcagggacacagccttaatggtcacgcgggtagttaaccatcgtcgattttccgctacggtaagtgtcgcagatacggctcaaaggagcgtctcaaaatatagatgtgtcattcgttccgacggggggagtggtgttagcaattatgcagagctgatagtcaaagaacctcccacacctattgcaccccctgagctgctggccgtcggggcaacttacctgtggatcaaaccaaacgccaacagcattattggcgacggacccatcattctcaaagaggtcgaatacagaacgaccaccggcacatgggctgagacccacatcgtcgattcacctaactataagctttggcatttagacccagacgtcgagtatgagatccgagtgctacttacccgacctggggagggaggtaccggcccacccgggcctcctttaactactcgaactaagtgcgccgatccagttcacggcccacagaacgtggaaatcgtcgatatccgtgccaggcagcttacacttcaatgggaaccttttggctacgcagtgaccagatgtcatagctacaacttgacagttcagtaccaatacgtgttcaatcagcagcaatatgaggcagaagaggtgatccagacatcctcgcattatacactgaggggcctgagaccatttatgaccatcagattgagactgctattatccaacccagagggcagaatggagtccgaagaattggtcgttcaaaccgaagaggatgtgccaggcgccgtccctctggagtcgatccagggcggccctttcgaggaaaaaatatatatacagtggaagccccccaatgaaacgaacggcgtgattaccctgtatgaaatcaattacaaggcggttggcagcctagatccttcagcagacctctcgtcccagagagggaaggttttcaagcttagaaatgagactcatcatctgtttgtcggtctgtaccctggtacaacctacagtttcactatcaaggcttcaactgccaaaggctttggcccccccgtgacaactcgtattgccacaaaaatttctgcccccagcatgcccgaatatgataccgatacaccactcaacgagacagatacgactatcacggttatgctaaaaccagcccagagcaggggggcgcctgtcagcgtgtaccagttggttgtgaaggaggagaggctgcagaagtctcgaagggccgccgacataattgaatgcttctcagtaccggtgagctaccgcaatgcttcctctctagacagtctccactactttgcagctgagctcaagcccgcgaacctcccagtgacacaacccttcacggtcggggacaataagacatacaacggttactggaacccacctctgtctccactgaagtcttactcaatctatttccaggcactctccaaggctaacggcgaaaccaaaatcaattgcgtcagactggccactaagggagcctccacccagaattccaacaccgtggagccagaaaagcaagtcgacaacacagttaagatggctggcgtgatcgcaggactgctcatgtttatcataattcttctgggcgtgatgcttaccattaaacggcgcaagttggccaagaaacagaaagagactcagagcggcgcgcagagagaaatggggccagtggcctccgcggacaagcccaccacaaagctgagcgctagccgcaacgatgaagggttctcatcttcatcccaagatgtgaacggcttcactgatgggagccggggcgaactgtcccagcctacattgaccatacagactcacccctatcgcacgtgcgacccggtggaaatgtcctaccccagggaccagtttcagcccgccatccgggtcgccgatctgttgcagcatatcactcagatgaaacggggccagggatacgggtttaaggaagaatatgaggccttgcctgaaggtcaaactgcaagttgggatactgccaaagaggacgaaaatcgtaacaagaatcgatacggcaatatcatcagctatgaccattcaagggtgcgtctactggtgctggacggcgacccgcattccgactacataaacgctaactatatcgacggataccaccggccacgacactatatcgccacacagggccctatgcaagaaacagtcaaagatttctggcgcatgatttggcaggaaaactcagccagtatcgttatggtgaccaacctggtcgaggtgggaagacatccagccgaacatacggtaggaaacgccaccctgggacgggccgcgtcaccagggatggtgaaatgcgtgcggtactggcctgacgacaccgaggtctacggggacataaaagtaacactcatagaaaccgagccactcgccgagtacgtcatccgcacgtttacggttcagaagaaaggctatcatgaaatcagagaattaagactctttcatttcaccagttggcccgatcacggcgtcccctgctacgctaccggccttctgggattcgtccggcaggttaagttcctcaacccacctgaagctgggcctattgtggtacactgctccgcaggagcggggcggaccgggtgcttcatagctattgatacaatgctcgatatggcggagaatgagggtgtagttgatattttcaattgcgtacgcgagctcagagcccaaagggtgaatctcgttcagaccgaggagcagtatgttttcgtgcacgatgctattttagaggcctgcctgtgcggcaacaccgctatccctgtgtgtgaattccgcagtctgtactacaatatatctcgcctcgacccccaaaccaactccagccagattaaagatgagtttcaaacattgaatatcgtcaccccaagagtccgaccggaagattgtagcattggcctgttaccaagaaatcatgataaaaaccgctccatggacgtactccccctagaccgctgcctgccttttctgatctcagtcgacggcgagtcaagcaattacatcaatgccgcgctcatggatagccacaagcagccggccgctttcgtggtcacccagcatccccttcctaatactgtggcggacttttggcgcctcgtgtttgactacaattgttcttccgtggttatgctcaacgagatggacacagcccagttttgcatgcaatattggcctgagaaaacttccggatgctacgggcctattcaagtcgagtttgtgtccgcggacatagacgaggacatcattcatcgcatcttccgcatctgtaatatggcgcggccccaggacgggtatcgcatagttcaacacctgcagtatattggctggcccgcctacagggacaccccccctagtaaacggtctctcttaaaggttgtgagaaggctcgagaagtggcaggaacaatatgatgggcgagagggtcgtacagtcgttcattgcctcaatgggggaggaaggtccgggacgttttgcgctatctgttccgtctgtgagatgatccagcagcagaacattatcgatgtgttccatattgtgaagacactgagaaacaataagtctaacatggtagaaactctggagcaatacaagtttgtgtacgaagtcgccttggagtatttgagttccttctag

SEQ ID NO: 321120 - DNA, 12483 bp, Artificial Sequence
  derived and/or modified sequence
atggcgagcctcgccgcgctcgccctcagcctgctcctgaggctgcagctgccgccactgcccggcgcccgggctcagagcgccgcaggtggctgttcctttgatgagcactacagcaactgtggttatagtgtggctctagggaccaatgggttcacctgggagcagattaacacatgggagaaaccaatgctggaccaggcagtgcccacaggatctttcatgatggtgaacagctctgggagagcctctggccagaaggcccaccttctcctgccaaccctgaaggagaatgacacccactgcatcgacttccattactacttctccagccgtgacaggtccagcccaggggccttgaacgtctacgtgaaggtgaatggtggcccccaagggaaccctgtgtggaatgtgtccggggtcgtcactgagggctgggtgaaggcagagctcgccatcagcactttctggccacatttctatcaggtgatatttgaatccgtctcattgaagggtcatcctggctacatcgccgtggacgaggtccgggtccttgctcatccatgcagaaaagcacctcattttctgcgactccaaaacgtggaggtgaatgtggggcagaatgccacatttcagtgcattgctggtgggaagtggtctcagcatgacaagctttggctccagcaatggaatggcagggacacggccctgatggtcacccgtgtggtcaaccacaggcgcttctcagccacagtcagtgtggcagacactgcccagcggagcgtcagcaagtaccgctgtgtgatccgctctgatggtgggtctggtgtgtccaactacgcggagctgatcgtgaaagagcctcccacgcccattgctcccccagagctgctggctgtgggggccacatacctgtggatcaagccaaatgccaactccatcatcggggatggccccatcatcctgaaggaagtggaatatcgcaccaccacaggcacgtgggcagagacccacatagtcgactctcccaactataagctgtggcatctggaccccgatgttgagtatgagatccgagtgctcctcacacgaccaggtgaggggggtacgggaccgccagggcctcccctcaccaccaggaccaagtgtgcagatccggtacatggcccacagaacgtggaaatcgtagacatcagagcccggcagctgaccctgcagtgggagcccttcggctacgcggtgacccgctgccatagctacaacctcaccgtgcagtaccagtatgtgttcaaccagcagcagtacgaggccgaggaggtcatccagacctcctcccactacaccctgcgaggcctgcgccccttcatgaccatccggctgcgactcttgctgtctaaccccgagggccgaatggagagcgaggagctggtggtgcagactgaggaagacgttccaggagctgttcctctagaatccatccaaggggggccctttgaggagaagatctacatccagtggaaacctcccaatgagaccaatggggtcatcacgctctacgagatcaactacaaggctgtcggctcgctggacccaagtgctgacctctcgagccagagggggaaagtgttcaagctccggaatgaaacccaccacctctttgtgggtctgtacccagggaccacctattccttcaccatcaaggccagcacagcaaagggctttgggccccctgtcaccactcggattgccaccaaaatttcagctccatccatgcctgagtacgacacagacaccccattgaatgagacagacacgaccatcacagtgatgctgaaacccgctcagtcccggggagctcctgtcagtgtttatcagctggttgtcaaggaggagcgacttcagaagtcacggagggcagctgacattattgagtgcttttcggtgcccgtgagctatcggaatgcctccagcctcgattctctacactactttgctgctgagttgaagcctgccaacctgcctgtcacccagccatttacagtgggtgacaataagacatacaatggctactggaaccctcctctctctcccctgaaaagctacagcatctacttccaggcactcagcaaagccaatggagagaccaaaatcaactgtgttcgtctggctacaaaaggtgcctccacccagaattctaacactgtggagccagagaagcaggtggacaacaccgtgaagatggctggcgtgatcgctggcctcctcatgttcatcatcattctcctgggcgtgatgctcaccatcaaaaggaggaagctggccaagaagcagaaggagacccagagtggagcccagagggagatggggcctgtggcctctgccgacaaacccaccaccaagctcagcgccagccgcaatgatgaaggcttctcttctagttctcaggacgtcaacggattcacagatggcagccgcggggagctttcccagcccaccctcacgatccagactcatccctaccgcacctgtgaccctgtggagatgagctacccccgggaccagttccaacccgccatccgggtggctgacttgctgcagcacatcacgcagatgaagagaggccagggctacgggttcaaggaggaatacgaggccttaccagaggggcagacagcttcgtgggacacagccaaggaggatgaaaaccgcaataagaatcgatatgggaacatcatatcctacgaccattcccgggtgaggctgctggtgctggatggagacccgcactctgactacatcaatgccaactacattgacggataccatcgacctcggcactacattgcgactcaaggtccgatgcaggagactgtaaaggacttttggagaatgatctggcaggagaactccgccagcatcgtcatggtcacaaacctggtggaagtgggcaggcacccagcggaacacactgtgggaaatgccactctaggccgtgcggcgtcccccggaatggtgaaatgtgtgcgatactggccagatgacacggaggtctacggagacattaaagtcaccctgattgaaacagagcccctggcagaatacgtcatacgcaccttcacagtccagaagaaaggctaccatgagatccgggagctccgcctcttccacttcaccagctggcctgaccacggcgttccctgctatgccactggccttctgggcttcgtccgccaggtcaagttcctcaaccccccggaagctgggcccatagtggtccactgcagtgctggggctgggcggactggctgcttcattgccattgacaccatgcttgacatggccgagaatgaaggggtggtggacatcttcaactgcgtgcgtgagctccgggcccaaagggtcaacctggtacagacagaggagcaatatgtgtttgtgcacgatgccatcctggaagcgtgcctctgtggcaacactgccatccctgtgtgtgagttccgttctctctactacaatatcagcaggctggacccccagacaaactccagccaaatcaaagatgaatttcagaccctcaacattgtgacaccccgtgtgcggcccgaggactgcagcattgggctcctgccccggaaccatgataagaatcgaagtatggacgtgctgcctctggaccgctgcctgcccttccttatctcagtggacggagaatccagcaattacatcaacgcagcactgatggatagccacaagcagcctgccgccttcgtggtcacccagcaccctctacccaacaccgtggcagacttctggaggctggtgttcgattacaactgctcctctgtggtgatgctgaatgagatggacactgcccagttctgtatgcagtactggcctgagaagacctccgggtgctatgggcccatccaggtggagttcgtctccgcagacatcgacgaggacatcatccacagaatattccgcatctgtaacatggcccggccacaggatggttatcgtatagtccagcacctccagtacattggctggcctgcctaccgggacacgcccccctccaagcgctctctgctcaaagtggtccgacgactggagaagtggcaggagcagtatgacgggagggagggacgtactgtggtccactgcctaaatgggggaggccgtagtggaaccttctgtgccatctgcagtgtgtgtgagatgatccagcagcaaaacatcattgacgtgttccacatcgtgaaaacactgcgtaacaacaaatccaacatggtggagaccctggaacagtataaatttgtatacgaggtggcactggaatatttaagctccttttagctcaatgggatggggaacctgccggagtccagaggctgctgtgaccaagcccccttttgtgtgaatggcagtaactgggctcaggagctctgaggtggcaccctgcctgactccaaggagaagactggtggccctgtgttccacggggggctctgcaccttctgaggggtctcctgttgccgtgggagatgctgctccaaaaggcccaggcttccttttcaacctaaccagccacagccaagggcccaagcagaagtacacccacaagcaaggccttggatttctggctcccagaccacctgcttttgttctgagtttgtggatctcttggcaagccaactgtgcaggtgctggggagtgggaggctcccctgccctccttctccttaggagtggaggagatgtgtgttctgctcctctacgtcatggaaaagattgaggctcttgggggtcactgctctgctgccccctgcaacctccttcaggggcctctggcaccagacatttgcagtctggaccagtgtgaccttacgatgttccctaggccacaagagaggccccccatcctcacacctaacctgcatggggcttcgcccacaaccattctgtaccccttccccagcctgggccttgaccgtccagcattcactggccggccagctgtgtccacagcagtttttgataaaggtgttctttgcttttttgtgtggtcagtgggagggggtggaactgcagggaacttctctgctcctccttgtctttgtaaaaagggaccacctccctggggcagggcttgggctgacctgtaggatgtaacccctgtgtttctttggtggtagctttctttggaagagacaaacaagataagatttgattattttccaaagtgtatgtgaaaagaaactttcttttggagggtgtaaaatcttagtctcttatgtcaaaaagaagggggcgggggagtttgagtatgtacctctaagacaaatctctcgggccttttattttttcctggcaatgtccttaaaagctcccaccctgggacagcatgccactgagcaaggagagatgggtgagcctgaagatggtccctttggtttctggggcaaatagagcaccagctttgtgcataatttggatgtccaaatttgaactccttcctaaagaaacccagcagccaccttgaaaaaggccattgtggagcccattatactttgatttaaaataggccaagagaatcaggcctggagatctagggtcttgtccaaagtgtgagtgagtcaatgagagggaaccaacatttgctaagtctctactgtatgccagggatcatgcttggcactttccataggacatttcacacagtccttagaacccccaggagagagctactgacttgttatcatctccatttgatcatctcctccaatgaggaaacccacgcaccttccttagtaatgaaatcctgggttccaaaggggcaggtaatggcaatgagacttctccgtgctgttttcttcatcttctctaagccaagcaattattttatggagggaaaataaggccagaaacttctgagcagataactccacaaatggaaatttagtactttcttcctgatgccagttcttctgggaagcgcagaatttcagatatattttagtaacacattcccagctccccaggaaagccagtctcatctaatttcttagtcagtaaaaacaattccctgttccttcaggctatgaatggaccagccagggaaactctcgaccttgatctctagccagtgcttaggcccaatatctgacagcctcaggtgggctgggacctaggaagctccatcttgaaggctggtctagccccagacagggcatgaggggcagagaattcaagaaggtacagctttggccctcaagagcccactgtatgctggggaaatggaaccatggtgcagtagtgtggagtggatgagtgttccatgagcctaggagcaagaaagtctcttcggcctcgggcttcctggagaaggggacgtccattcctgctgggtcttaacaagcataaaaaggaaaaaaaggaaactcaggcaaagggatccatatgtgcaatggcaaagaaatgtgaaaaggcattgggagaagcagtctgggggaggccagcccagtgcgggcacagcacaacacggggagcagcaagagatgagccagggtccaggagacagatgcccatcgcgagtacagactttgtcctattggcaacaaggagtccatggagctttagagagatgcactcagcttcgtgttggccaagactccttctgggccaatggggctgcctcttttcctttcatcagacactgtgaaaacattcccttaagcgtgcactttttaatatcacatctatttgtctgtctgctcattgttttgttgctggaactaaatatgcaatggatcatgagactcagattctatgagaaacccagggtctctgctttaccacggagcagggtcaccaacccagatctccaggcccatgaggatggaacatgaaaggagccgacaaaagttgcttccattggcatgggctctggagctgtccagaagtccagggacaccagacttgatcaaggaagggctgtcactttagaggttcaaaaggaagtgcctcaaagcaaaggcaagcaaaggaaccccacgatgaacttgctcttttcctttgatgagcctctccccaggtgtatttcagcagaccccggggacccacccccactgggcctgctggcctccctcggctccagcccaatgccccagctggccttccccagcctgcaaggagcctgtagcatggcaaatctgcctgctgtatgctattttcttagatcttggtacatccagacaggatgagggtggagggagagctatttaacacaaatcctaagatttttttctgctcaggaaggggtgaaatagctggcagatacaaaagacagtggcttttatcattttaaatggtaggaatttaaggtgtgacttcagggagaaacaaacttgcaaaaaaaaaaaatctcaggccatgttggggtaacccagcaagggccagtgatgatttcccccagctcatccccttattttcccacaacccaaccattctctaaagcaggacagtgaataggtcttaggccagtgcacacaggaagaaattgaggcttatggatggggatgacttccctaagatcccatgggacaaggatgtggcaaggcttggatgagatggggcaccagtgcccaggaatttgaacattttcctttacccaggaaatctccggagccaacaccaccacccccagggggtctccccaccccaccccatttacagggtgagctcagcctgtcatgagcagaggaaaatattattaatgctctctgagtctttacaacaggagctcttacctcatagatgtgggctctgtttggggaagatgcaaggaagtaatgagaagcccaggaaatttctccacctgtgtttatggcctaaatagcttcaggatgtatcttagctgcactccaacattgcatcctttctggggtgaagaatctgggccaaccaggggtccttgggcctctagaaggccacagtaggcctctctttgtgggaatggaaggggacagtttgcttttagtgctggccctctctgtgggtgtggcctgcaaaggaaccaacagaccctatgctggggactctaacatgtgagctcattaaattcttccagcattctaaaggagggtttgtgattgtcaccatttactgatgaggaaactaaggctcctaggggagaaatcacttgcccacagttccacagctagtgagtgaatgaaccaggatttaaaccggttttttctcactacagagacaatatttttccaccattgtatctcacatttttcccaggaggttacccataacagaagagactagagtggaacagatacgtcagtggataaagctcaaagcaaacaacagtaagcttaaaattccttcatagtctcatgttttacgttcacaattcatgcaaaatttgcattccactttctgatttagccttgttggttttaatatgactctatgaatatttcaaaaaaaaatgtgctctgttcctcatgttgttctgttctgttcaccccgctatgacggaccctaggtcagctggtcttcagcttgaccctagaattgactctaggagcagtgaccctgctgcctcccagagccagttataggctcaagatcaagaccaactgaccttctcctaggcagctcctttggtgtgtgggtgctctgacctcactgttcatgaggggacctcaactaaggcatcttccagttgggtgctggaaggaacccattaactcacactagaatgatgaggatttgctcatctggcgtggagaaggatgagcccacaaaaccctaaagggaaaagagaagctggacacagctgtactcagcagattcctgaatgctaggctggaaagtggtgcctgttgtccaagtggagtcacatggttgctaatgtgggcaagtctgaggacacacttcatgagcagctggggtctggaaggctcctcactttaccctagccacacataattactgggtgcctacagcacctagcaccttggagggggcactattaggaaatcgagattactatggcacaattaattcctgggtaaggcatggggttgtggtggacagagctcagtctttagtttgaacgaaaacatacatacatgaaaaacatacatgaaaaaaggaccctcatcaacattagaaggggtagatttggagcactttaggcaggaaaacaggaacgcaaggccaggaaactggaacccagtgaatactcagaaccgaggatgcagatgacttatttagcaaaatggtcacttctgtgacatagctggagaaaggatgggtaacagcttgccagagccacttggaacaagggcaaatctcagtgtctggggcaaaagatgatgcatttccctctgacccatcatgtttattcatcctccactccccattgccacactagctcttgctgtaagtcctcaccaggatctacatttcctcgtcgctggtgggaaccccttagagtacatagaggtatcagtccagtaagactgctctacacaacagaagtgaggcccagggagtagcagccaggcccttatcctgttacctctgcaggagtgactgcccaacccagatccagagacattgaaggaaatgataattccttggtacctcactgccttgggacaaaatgaagaaagccacccttccttaggctgcagcttgccactcctgggctgggtaaacaggtcatcagcaccaagctcaaccaggagtaacactctggaagacatgggtgagcccaagaggaagcatgaacaggacgctgttcctaagtcatgtcaacaggttgtgctgggccaggatccccagggaaaaaaatggtcaacccaactggagggtaggttagaagaaaaaaaacataaacgtggatagtcatgtcatctcaaatccctgacttggcttccccattacttaacagtctgagctccttcttagcctgtgaccagcttcaaatcacagccaagtaaaacaaggaaataggaaaagtaaatccaactagaagagacaagctgagattcagatttgtttactcctcccatgcaaagtttccctgttggaggttttccatgtatacatgtctagaagtgatagaatgcaaggccttggctttgtcttgcagggatctgcctttgaggtcatagactgaacagcagggagagaggttagtggtggagtgtggggggagctgttctagctccagtttcttctgacacatttttcaggatcatggatctgatcctccgaagcacagcagagatatctaagccatatttgtgcacatgagcagactcttctagttttttagtaaccagggatgggcttttgcatggcactgactatagagatgtcttgtagagatcaagccagtcttttgcatcccacctgcccacctccagaagagatgggaaaaggtcatcaaagggcattcaccaactgaaatccactcatgaatgttaggtctctaaaaggaggcatcaacactcacaatggtagcctccaaacctagcatcccacctatctaagagctcaggggtggtccactggggcagatacaagggaagtgcaagggctcaggatgaaagaaaatctattgggaagagttttaggggcttgatcattatggggcttccttctatatctgagaactgctctgggtggtgagatgtggactctgatccttaattggaatgttcggagaatgagtgtctggtggccttgaagtgttggacagaaaagtatcagtataaaagcctggagctcagggtaattaatgtagttcatggttccttagtgagcaggactcttggatgtggaggagaaagggtcataggaagtaaaccaccaaaattacaaaattgagtctctgtacaattacttcagtgcctttgggcttatgaatacaaatcagtgggccttctctatgatggtccaacaaactctcagtgtccaccctgtccctgtatctcccatggaagatgaataatgtcaggtgttctttgggtcaaaggccccagggcagtctggaggcttagagggcagagtggtgtcattccatgtaaagttaggcttctgaggggtcaggcagaatatggtgtccatatcttccatagctctgcagattcttggatgaagtcaagcacagtttgctagacccaggtcactcctctgagtataactaggacccatgagtgaaacttaatagctgtaaggaagaacctgctgtctgccagagaggataagctgcccatctcagcagctgtctaaaagaaggcaggtgtctctttaaagggaagagaagcattggtgaaatggatttcaggtcacttccattccagatgggtgagatcttgtggagctgggatcatgtttgaactcattcatacctgtagagcacgaatccaagtagattgtgtttggtctgtacaggctgaagccccctgctctcccacccaagtgcccccactgagcaggccaacatgctgttgtggccacatatactgggctgatccaggctggttatcaccaaacagcaaaccatagggaacagctgctttgccatagacccaatacccatgtagatctctcatgagagcagccataactcagacccactgaccaacagggccatgagtgacagccagaaccagtgaaggtccaagtaggacacagagcagggcttttcttaccatacacattatctccagaggttatttctaccccactccctattcaaggcctgttggagcacactgcaaaagcaaaagcacagtaactcaatttacacatgattataatcatttccagtgcacacatttcatcaccaggtggatcctgagctagcccatgtaaatccgggttaacccatattggtaatcatactcaaaagcacttttcaccctacattctactagccaatcaaagacaaagagttgtggcctctaccattgccttggcttctggacaccctcacaagctatcccaaggttcccgctcaactccagggaggctgacatcttcacatccactgggcatataatattgcatgagaccaaagtctccacactctttgcagcctcctccatgaatcccaatggcctgcacttgtacagtttgggtgtttgatagataaagcacgtatgagaagagaaaacaaaataaatcaactttttaaaaaagccagcactgtgctgtcaatgttttttttttcttttcaattctagctcagaaaagcagaaggtaaataatgtcaggtcaatgaatatcagatatattttttgactgtacattacagtgaagtgtaatctttttacacctgcaagtccatcttatttattcttgtaaatgttccctgacaatgtttgtaacatggctgtgttaaaaaatctatacaataaagctgtgaccctgagattcatgttttcctaagata

SEQ ID NO: 321121 - DNA, 4355 bp, Artificial Sequence
  derived and/or modified sequence
atggccagcctggccgcattggcgctgtccctgctactcaggctccagcttcctcctcttcctggggctagagcacagtcagccgctggtgggtgttcttttgatgaacactatagcaactgcggctacagtgtggcactcgggaccaatggtttcacgtgggagcaaatcaatacttgggagaagccaatgctggaccaagccgtgcctaccggaagctttatgatggtgaactctagcggcagggcgtcaggccagaaagcccaccttctgctgcccactctcaaagaaaacgacacccactgcatagactttcactactactttagtagtagagacagatcctctccgggagccctcaacgtttacgtgaaagtgaatggcggaccgcagggcaacccggtttggaatgtgtcaggggtcgttaccgaaggctgggtcaaagcagagctggctattagtacgttctggccccacttttaccaggttatttttgaatctgtttcactgaaggggcaccctgggtatattgctgtagatgaggttcgcgtcctggctcacccctgcagaaaagcaccacatttcttgcggctgcagaatgtggaagtgaatgtcggacaaaacgcgaccttccagtgtatcgcagggggaaagtggtctcagcacgataagctatggcttcaacagtggaatggacgcgacacagccttaatggtgaccagggtcgtgaaccatagacggttcagcgcaactgtctccgtggccgatactgcgcagcggtccgtgtcaaaatatcgatgtgtaatccgctctgacggcggtagtggagtgtccaattatgctgagctgatagtgaaagaacctccaacaccaatagccccaccagaactgttggcagtgggggcaacatatctgtggatcaaaccaaatgccaatagcatcatcggcgatgggcctattatactgaaagaggttgagtatcgcactacgacgggaacatgggccgagacacacatcgtagactctccgaattacaaactatggcacttggaccctgatgtggagtatgaaatcagggtccttttgaccagaccaggtgaaggaggtacaggcccacctggccctcctctgactactcggaccaaatgcgctgatcccgtccatggaccacagaatgtcgaaatcgttgatatacgagcaagacagctcactctccagtgggaacctttcgggtatgccgtgacacggtgtcattcctacaatctgacagtccagtatcagtatgtgtttaaccagcaacagtatgaggccgaagaggtgatccagacaagtagccattatactctgcggggacttagaccgttcatgacaatcaggttgcggttactgctttccaatccagaaggccgtatggagtcagaggaactggtagtccagacggaagaggacgtgccaggggctgtgcctcttgaatccattcagggcggaccttttgaggagaaaatctacattcaatggaaaccccctaatgagactaacggtgtcatcacattgtacgaaataaactacaaagctgtgggttcccttgatccaagcgccgatcttagctcgcaacgagggaaggtctttaagctgcgcaatgagactcaccacctgttcgtaggactgtatcctggtacgacgtattcatttactattaaggcgtcgacagcgaaggggttcggaccacccgtgaccactagaattgccaccaaaatttcagctccgtcaatgccggagtatgacaccgatacaccgctgaatgaaacagacacaacgatcacagtcatgctgaaaccggcacaatctcggggagcgcctgtctctgtgtaccaacttgttgtgaaagaggaacggttacagaaatctagacgggctgctgatattatcgaatgctttagcgtcccagtgtcatataggaacgctagctctctcgatagtctgcactacttcgccgcagagctaaagcctgcaaacctgcctgtgacacagccgtttacagtcggggataacaaaacatacaatggctattggaatcccccactgagtccactaaagtcttactcgatttattttcaagctctctccaaggccaacggcgagacaaagatcaattgcgtaagactcgcaactaagggagcctcgacgcaaaactcgaacaccgtcgagcctgagaagcaagtggacaacacagtgaaaatggctggtgttattgcaggcctgctaatgtttatcatcatactgcttggcgttatgctgactataaagaggaggaaactggcaaagaaacaaaaagagactcagtcaggtgcacagagagagatggggccagttgcctctgccgacaagccaacgaccaagttgagtgcctccaggaacgatgagggattttcctcatcttcccaagacgtaaacgggttcacggacggatcacgtggtgagctgtcacagccgacccttaccattcagacacacccatatcgcacatgcgacccagtcgaaatgtcctacccccgagaccagttccagcccgctatccgagttgcggaccttttgcagcatattacccaaatgaaacgaggccaggggtatggtttcaaggaagagtatgaagcactgccagagggacagacagcttcctgggatactgcaaaggaggatgagaataggaacaaaaacagatacgggaatatcatctcatacgaccactctagggttcggcttcttgtactggatggcgacccacacagtgactacattaacgccaactacattgacgggtaccaccgccctcggcactatatagctacccagggacctatgcaggaaaccgtgaaagatttttggcgaatgatttggcaggaaaatagtgcatccatagtgatggtgaccaatctcgtcgaagtgggtagacatcccgcagagcataccgtaggcaacgccactctggggagggccgctagcccgggaatggtaaaatgcgtccggtactggcctgatgacaccgaggtctatggggacattaaagtgacgctaatcgagaccgaacccctcgctgagtatgtcattcgtactttcacggtccagaagaagggataccacgaaatccgagaacttcgcttattccatttcacatcatggcctgatcatggcgttccctgctacgccacaggcctgctgggatttgtgcgtcaggttaagtttctgaatccaccagaggcgggacctattgtggttcactgctctgcgggagctggcaggacaggctgtttcatagcgatcgatacaatgctcgatatggctgagaacgaaggagttgtggacatcttcaattgcgtacgcgagctaagagctcagcgtgtaaacctcgtccagacagaagagcaatacgtgtttgtacacgacgcgatccttgaggcttgcctgtgtggtaacactgcaattcccgtttgcgagttcagaagcctctactacaacatatcccggctggatccacagacaaactcatcacagatcaaggacgaatttcagaccctcaacatagtaactcccagggtgcgacccgaggactgctctattgggttgttacctagaaatcatgataaaaacaggtctatggatgtcttgccgttagaccggtgcctacccttcctgattagcgtcgacggcgaatcctccaattatattaatgcagctctgatggattctcacaaacagccagcggcatttgttgtgacccagcacccgctccccaataccgtagcagatttttggcgcctggtcttcgactataactgctcatcagtcgtaatgttaaacgagatggacactgcccagttctgtatgcagtattggcccgagaagactagcggatgttacggccctatacaggtggagttcgtctccgccgacattgacgaggacatcatccaccgtatctttcgaatttgcaatatggccaggccacaagacgggtatcggattgtccagcaccttcaatacatcgggtggccggcttatagggacactccaccatctaagagatctctcctaaaggttgttagacggctggaaaaatggcaggaacagtacgatgggcgagaaggcagaaccgtggttcactgtcttaacggaggaggaaggagtggcactttttgtgccatctgtagtgtgtgcgagatgatccagcagcagaatatcatcgacgtgttccatattgttaaaacacttcgaaataacaagtccaacatggtggagacactagagcagtataaatttgtttacgaggtcgccctggaatacctcagcagtttcta

SEQ ID NO: 321122 - protein, 1440 aa, Artificial Sequence
  derived and/or modified sequence
MASLAALALSLLLRLQLPPLPGARAQSAAGGCSFDEHYSNCGYSVALGTNGFTWEQINTWEKPMLDQAVPTGSFMMVNSSGRASGQKAHLLLPTLKENDTHCIDFHYYFSSRDRSSPGALNVYVKVNGGPQGNPVWNVSGVVTEGWVKAELAISTFWPHFYQVIFESVSLKGHPGYIAVDEVRVLAHPCRKAPHFLRLQNVEVNVGQNATFQCIAGGKWSQHDKLWLQQWNGRDTALMVTRVVNHRRFSATVSVADTAQRSVSKYRCVIRSDGGSGVSNYAELIVKEPPTPIAPPELLAVGATYLWIKPNANSIIGDGPIILKEVEYRTTTGTWAETHIVDSPNYKLWHLDPDVEYEIRVLLTRPGEGGTGPPGPPLTTRTKCADPVHGPQNVEIVDIRARQLTLQWEPFGYAVTRCHSYNLTVQYQYVFNQQQYEAEEVIQTSSHYTLRGLRPFMTIRLRLLLSNPEGRMESEELVVQTEEDVPGAVPLESIQGGPFEEKIYIQWKPPNETNGVITLYEINYKAVGSLDPSADLSSQRGKVFKLRNETHHLFVGLYPGTTYSFTIKASTAKGFGPPVTTRIATKISAPSMPEYDTDTPLNETDTTITVMLKPAQSRGAPVSVYQLVVKEERLQKSRRAADIIECFSVPVSYRNASSLDSLHYFAAELKPANLPVTQPFTVGDNKTYNGYWNPPLSPLKSYSIYFQALSKANGETKINCVRLATKGASTQNSNTVEPEKQVDNTVKMAGVIAGLLMFIIILLGVMLTIKRRRNAYSYSYYLKLAKKQKETQSGAQREMGPVASADKPTTKLSASRNDEGFSSSSQDVNGFNGSRGELSQPTLTIQTHPYRTCDPVEMSYPRDQFQPAIRVADLLQHITQMKRGQGYGFKEEYEALPEGQTASWDTAKEDENRNKNRYGNIISYDHSRVRLLVLDGDPHSDYINANYIDGYHRPRHYIATQGPMQETVKDFWRMIWQENSASIVMVTNLVEVGRVKCVRYWPDDTEVYGDIKVTLIETEPLAEYVIRTFTVQKKGYHEIRELRLFHFTSWPDHGVPCYATGLLGFVRQVKFLNPPEAGPIVVHCSAGAGRTGCFIAIDTMLDMAENEGVVDIFNCVRELRAQRVNLVQTEEQYVFVHDAILEACLCGNTAIPVCEFRSLYYNISRLDPQTNSSQIKDEFQTLNIVTPRVRPEDCSIGLLPRNHDKNRSMDVLPLDRCLPFLISVDGESSNYINAALMDSHKQPAAFVVTQHPLPNTVADFWRLVFDYNCSSVVMLNEMDTAQFCMQYWPEKTSGCYGPIQVEFVSADIDEDIIHRIFRICNMARPQDGYRIVQHLQYIGWPAYRDTPPSKRSLLKVVRRLEKWQEQYDGREGRTVVHCLNGGGRSGTFCAICSVCEMIQQQNIIDVFHIVKTLRNNKSNMVETLEQYKFVYEVALEYLSSF

SEQ ID NO: 321123 - DNA, 4323 bp, Artificial Sequence
  derived and/or modified sequence
atggccagcctggccgccctggccctgagcctgctgctgagactgcagctgccccccctgcccggcgccagagcccagagcgccgccggcggctgcagcttcgacgagcactacagcaactgcggctacagcgtggccctgggcaccaacggcttcacctgggagcagatcaacacctgggagaagcccatgctggaccaggccgtgcccaccggcagcttcatgatggtgaacagcagcggcagagccagcggccagaaggcccacctgctgctgcccaccctgaaggagaacgacacccactgcatcgacttccactactacttcagcagcagagacagaagcagccccggcgccctgaacgtgtacgtgaaggtgaacggcggcccccagggcaaccccgtgtggaacgtgagcggcgtggtgaccgagggctgggtgaaggccgagctggccatcagcaccttctggccccacttctaccaggtgatcttcgagagcgtgagcctgaagggccaccccggctacatcgccgtggacgaggtgagagtgctggcccacccctgcagaaaggccccccacttcctgagactgcagaacgtggaggtgaacgtgggccagaacgccaccttccagtgcatcgccggcggcaagtggagccagcacgacaagctgtggctgcagcagtggaacggcagagacaccgccctgatggtgaccagagtggtgaaccacagaagattcagcgccaccgtgagcgtggccgacaccgcccagagaagcgtgagcaagtacagatgcgtgatcagaagcgacggcggcagcggcgtgagcaactacgccgagctgatcgtgaaggagccccccacccccatcgccccccccgagctgctggccgtgggcgccacctacctgtggatcaagcccaacgccaacagcatcatcggcgacggccccatcatcctgaaggaggtggagtacagaaccaccaccggcacctgggccgagacccacatcgtggacagccccaactacaagctgtggcacctggaccccgacgtggagtacgagatcagagtgctgctgaccagacccggcgagggcggcaccggcccccccggcccccccctgaccaccagaaccaagtgcgccgaccccgtgcacggcccccagaacgtggagatcgtggacatcagagccagacagctgaccctgcagtgggagcccttcggctacgccgtgaccagatgccacagctacaacctgaccgtgcagtaccagtacgtgttcaaccagcagcagtacgaggccgaggaggtgatccagaccagcagccactacaccctgagaggcctgagacccttcatgaccatcagactgagactgctgctgagcaaccccgagggcagaatggagagcgaggagctggtggtgcagaccgaggaggacgtgcccggcgccgtgcccctggagagcatccagggcggccccttcgaggagaagatctacatccagtggaagccccccaacgagaccaacggcgtgatcaccctgtacgagatcaactacaaggccgtgggcagcctggaccccagcgccgacctgagcagccagagaggcaaggtgttcaagctgagaaacgagacccaccacctgttcgtgggcctgtaccccggcaccacctacagcttcaccatcaaggccagcaccgccaagggcttcggcccccccgtgaccaccagaatcgccaccaagatcagcgcccccagcatgcccgagtacgacaccgacacccccctgaacgagaccgacaccaccatcaccgtgatgctgaagcccgcccagagcagaggcgcccccgtgagcgtgtaccagctggtggtgaaggaggagagactgcagaagagcagaagagccgccgacatcatcgagtgcttcagcgtgcccgtgagctacagaaacgccagcagcctggacagcctgcactacttcgccgccgagctgaagcccgccaacctgcccgtgacccagcccttcaccgtgggcgacaacaagacctacaacggctactggaacccccccctgagccccctgaagagctacagcatctacttccaggccctgagcaaggccaacggcgagaccaagatcaactgcgtgagactggccaccaagggcgccagcacccagaacagcaacaccgtggagcccgagaagcaggtggacaacaccgtgaagatggccggcgtgatcgccggcctgctgatgttcatcatcatcctgctgggcgtgatgctgaccatcaagagaagaagaaacgcctacagctacagctactacctgaagctggccaagaagcagaaggagacccagagcggcgcccagagagagatgggccccgtggccagcgccgacaagcccaccaccaagctgagcgccagcagaaacgacgagggcttcagcagcagcagccaggacgtgaacggcttcaacggcagcagaggcgagctgagccagcccaccctgaccatccagacccacccctacagaacctgcgaccccgtggagatgagctaccccagagaccagttccagcccgccatcagagtggccgacctgctgcagcacatcacccagatgaagagaggccagggctacggcttcaaggaggagtacgaggccctgcccgagggccagaccgccagctgggacaccgccaaggaggacgagaacagaaacaagaacagatacggcaacatcatcagctacgaccacagcagagtgagactgctggtgctggacggcgacccccacagcgactacatcaacgccaactacatcgacggctaccacagacccagacactacatcgccacccagggccccatgcaggagaccgtgaaggacttctggagaatgatctggcaggagaacagcgccagcatcgtgatggtgaccaacctggtggaggtgggcagagtgaagtgcgtgagatactggcccgacgacaccgaggtgtacggcgacatcaaggtgaccctgatcgagaccgagcccctggccgagtacgtgatcagaaccttcaccgtgcagaagaagggctaccacgagatcagagagctgagactgttccacttcaccagctggcccgaccacggcgtgccctgctacgccaccggcctgctgggcttcgtgagacaggtgaagttcctgaacccccccgaggccggccccatcgtggtgcactgcagcgccggcgccggcagaaccggctgcttcatcgccatcgacaccatgctggacatggccgagaacgagggcgtggtggacatcttcaactgcgtgagagagctgagagcccagagagtgaacctggtgcagaccgaggagcagtacgtgttcgtgcacgacgccatcctggaggcctgcctgtgcggcaacaccgccatccccgtgtgcgagttcagaagcctgtactacaacatcagcagactggacccccagaccaacagcagccagatcaaggacgagttccagaccctgaacatcgtgacccccagagtgagacccgaggactgcagcatcggcctgctgcccagaaaccacgacaagaacagaagcatggacgtgctgcccctggacagatgcctgcccttcctgatcagcgtggacggcgagagcagcaactacatcaacgccgccctgatggacagccacaagcagcccgccgccttcgtggtgacccagcaccccctgcccaacaccgtggccgacttctggagactggtgttcgactacaactgcagcagcgtggtgatgctgaacgagatggacaccgcccagttctgcatgcagtactggcccgagaagaccagcggctgctacggccccatccaggtggagttcgtgagcgccgacatcgacgaggacatcatccacagaatcttcagaatctgcaacatggccagaccccaggacggctacagaatcgtgcagcacctgcagtacatcggctggcccgcctacagagacaccccccccagcaagagaagcctgctgaaggtggtgagaagactggagaagtggcaggagcagtacgacggcagagagggcagaaccgtggtgcactgcctgaacggcggcggcagaagcggcaccttctgcgccatctgcagcgtgtgcgagatgatccagcagcagaacatcatcgacgtgttccacatcgtgaagaccctgagaaacaacaagagcaacatggtggagaccctggagcagtacaagttcgtgtacgaggtggccctggagtacctgagcagcttctag

SEQ ID NO: 321124 - DNA, 4323 bp, Artificial Sequence
  derived and/or modified sequence
atggctagcctggctgctctagctctaagcctgcttctgaggttgcaactgcctccattacccggagcacgggcacaaagcgcagcagggggttgttcctttgatgagcactattcaaattgcgggtactctgtagcgttaggaactaatggttttacttgggagcagataaatacttgggagaaacctatgctcgaccaggccgtaccgaccggctctttcatgatggtgaactcttccggtcgggcctcaggacagaaggcccatctgctcctaccaaccctgaaggagaacgatacgcactgtatagacttccactattatttttctagtcgcgatagaagctctcccggcgcattaaacgtctatgttaaggtcaatggtggtcctcagggaaaccccgtttggaacgtttccggagtcgtgacagaaggatgggtgaaggccgagctcgcgatctctaccttttggccccacttctaccaggtaatttttgaatccgtgagtttgaaaggacatccaggttatattgctgttgatgaagtccgagttcttgcgcatccttgtagaaaagcacctcatttccttcgcctgcagaatgtagaggtgaatgtgggccaaaatgcgacattccagtgcatagccgggggtaagtggagtcagcacgacaagttatggcttcagcagtggaacggaagagacacagccctgatggtcactcgtgtggttaatcatcggagattttcagcaactgtgagtgtcgccgacacagctcagcggagcgtttccaagtaccgatgtgttattcgttcagacggaggctctggtgtatccaattacgcagaactaattgtgaaagaaccccctacacccatcgccccacctgagctgctggcagtaggggcgacctacctgtggattaaaccaaatgccaacagtatcattggtgatggcccaatcattctgaaggaagttgaatatagaaccaccactggaacctgggccgagacccacatcgtggattcaccgaactacaagttgtggcatttggatcccgacgtggagtacgagattcgggtacttctgacaagaccaggcgaaggcggcaccggtcctcccgggcccccactgacaaccaggaccaagtgcgcggacccggttcacggcccgcagaacgtggaaattgttgacatccgagcccggcagttaacattgcagtgggagccctttgggtatgccgttacgcgctgccactcgtataacctcactgtgcaataccagtacgtgttcaatcagcagcagtacgaagccgaagaggttatccagacgagttcgcactatacactgagaggtctccgacctttcatgaccatccgactcaggttattacttagcaatccagaagggcggatggagtccgaagagctggtcgtacagaccgaggaggacgtaccaggggctgtaccgctggaatcaattcagggcggaccattcgaggagaagatctacattcagtggaaaccccccaacgagaccaatggcgttatcaccttatatgagatcaattacaaagctgttggatccctggacccaagcgccgacctttcttcgcagaggggcaaggtcttcaaacttcgaaatgagacgcaccacctatttgtggggctttatcccggcacaacatactcgttcaccataaaggcttccaccgccaagggtttcgggccaccagtcaccacccggatcgcaaccaaaattagcgctccttcgatgccggagtatgacactgatacacctttaaacgagaccgacaccaccatcacagtaatgctgaaacccgcccaatcacgcggcgctcccgttagcgtgtaccagcttgttgtcaaggaggagaggttgcagaagagccggagggctgccgatatcatcgagtgcttcagcgtgcctgtgagctaccgcaatgcctcctctctggacagtttgcattatttcgcggcagaattgaaacccgcaaatctaccagtcacacagccgttcacggttggggacaataagacgtacaatgggtactggaatccacctctgagcccattgaagtcttactctatttatttccaggcgctttccaaagccaatggagagaccaaaatcaattgcgtgagactggctacaaaaggagcatccactcagaatagcaataccgtcgagccagaaaagcaagtggataacaccgtgaagatggccggtgtcatcgccggcctcctgatgttcattattattctgttgggagttatgctgactattaagcgaaggcgtaacgcctatagctattcatactaccttaaattggcgaagaaacagaaggagacccagtccggcgctcaacgagaaatgggaccagtcgcatccgctgataagccgactaccaaactcagtgcttcccggaatgatgaagggttttcaagctcaagtcaagatgtgaacggctttaacggttcacgaggcgaactgagtcagcccaccttgactatccaaacacacccataccggacctgcgatcccgtggagatgtcatatccccgtgaccagtttcaacccgctatcagagtagcagatcttcttcagcatattacgcagatgaaaaggggccagggctatggattcaaagaggagtacgaagccttgccagagggacaaaccgcatcgtgggacacagctaaggaagatgagaacagaaataagaaccggtacggaaatattatcagttatgaccattccagggtgcgcctcctggtgcttgacggagatccacactcagactacattaatgctaactacatcgacggctaccaccggccccgtcactacatcgccacccagggtcccatgcaagagacagtgaaggacttttggaggatgatttggcaagagaacagtgcaagcattgtcatggtgacaaatctcgtggaggtggggagagttaagtgcgtcagatattggcctgacgacacggaagtctacggagacatcaaagtgactctgatagaaacagagcccctggccgagtacgtcattaggaccttcaccgttcaaaagaaaggctatcatgagatacgcgaacttcggctcttccatttcacctcttggcccgatcatggtgtcccttgctacgctacaggactcctgggctttgtcagacaggtcaagtttctcaatccacccgaagcagggccaattgtcgtgcactgctctgcaggggctggcaggaccggttgcttcatagccatcgacaccatgcttgatatggccgaaaatgaaggggtcgtggacatttttaattgcgtccgcgagctaagagctcagagggtaaacctggtgcagaccgaggaacagtacgtctttgtgcacgacgcaatcctcgaggcttgtttgtgtgggaacactgccattcccgtttgcgagttccggagtttatattacaatatatcaaggctggacccgcagactaatagttcacagatcaaggacgaatttcagacccttaacatcgtgacaccacgcgttcgtccagaagactgctctatcggactcctgccccggaatcacgacaagaataggagcatggacgtgcttcctctggatcgatgcctgccattcctgattagcgtggacggagaatctagcaattacataaacgcggccctgatggactcccacaagcagccagctgcttttgtcgtgacccagcaccccctcccgaacactgtcgccgatttttggagactggtttttgactacaactgttcttctgttgtcatgctaaatgagatggacactgctcagttttgcatgcagtactggcctgaaaagactagcgggtgctacggccctatacaggtggagttcgtcagtgctgatatcgacgaagatataatacaccgcatattccggatctgcaacatggccaggcctcaggatgggtatcgcatagtgcagcacctgcagtacattggctggccggcctatagggacaccccgccctccaagcggtctctgctgaaggtagtgcgaagattagagaagtggcaggaacagtatgacggacgtgagggaagaactgttgtacattgcctgaacggaggcggaagatccggaactttttgcgccatctgttccgtatgtgagatgatccaacagcagaacatcatcgatgtgttccacatcgtgaaaacgctcaggaataacaagtccaatatggtggaaaccctcgaacagtacaaattcgtgtacgaagtggccctcgagtacctttcttctttctag

SEQ ID NO: 321125 - DNA, 4323 bp, Artificial Sequence
  derived and/or modified sequence
atggccagcctggccgccctggccctgagcctgctgctgcggctgcagctgccccccctgcccggggcccgggcccagagcgctgctgggggctgcagctttgatgagcactacagcaactgtggctacagcgtggccctgggcaccaacggcttcacctgggagcagatcaacacctgggagaagcccatgctggaccaggccgtgcccaccggcagcttcatgatggtgaacagcagcggccgggccagcggccagaaggcccacctgctgctgcccaccctgaaggaaaatgacacccactgcatcgacttccactactacttcagcagccgggacaggagcagccctggggccctgaatgtgtatgtgaaggtgaatggaggcccccagggcaaccctgtgtggaatgtgtctggagtggtgacagagggctgggtgaaggccgagctggccatcagcaccttctggccccacttctaccaggtgatctttgaatctgtgtccctgaagggccaccctggctacatcgctgtggatgaggtgcgggtgctggcccacccctgcaggaaggccccccacttcctgcggctgcagaatgtggaggtgaatgtgggccagaatgccaccttccagtgcatcgccggcggcaagtggagccagcacgacaagctgtggctgcagcagtggaatggccgggacacagccctgatggtgaccagggtggtgaaccaccggcgcttcagcgccaccgtgtctgtggccgacacagcccagaggtctgtgtccaagtaccgctgtgtgatccgcagtgatggcggcagcggcgtgagcaactatgcagagctgattgtgaaggagccccccacccccatcgcccctcctgagctgctggccgtgggcgccacctacctgtggatcaagcccaatgccaacagcatcattggagatggccccatcatcctgaaggaggtggagtaccgcaccaccaccggcacctgggccgagacccacatcgtggacagccccaactacaagctgtggcacctggaccctgatgtggagtatgagatccgggtgctgctgaccaggcctggagagggcggcaccggccccccaggcccccccctgaccaccaggaccaagtgtgccgaccctgtgcacggcccccagaatgtggagatcgtggacatccgggcccggcagctgaccctgcagtgggagcccttcggctatgctgtgacccgctgccacagctacaacctgactgtgcagtaccagtatgtgttcaaccagcagcagtatgaagctgaggaggtgatccagaccagcagccactacaccctgcggggcctgcggcccttcatgaccatccggctgcggctgctgctgagcaaccctgagggccgcatggagagcgaggagctggtggtgcagacagaggaggatgtgcctggagctgtgcccctggagagcatccagggcggcccctttgaggagaagatctacatccagtggaagcccccaaatgagaccaatggagtcatcaccctgtatgagatcaactacaaggctgtgggcagcctggaccccagcgctgacctgagcagccagaggggcaaggtgttcaagctgagaaatgagacccaccacctgtttgtgggcctgtacccaggcaccacctacagcttcaccatcaaggccagcacagccaagggcttcggcccccctgtgaccacccgcatcgccaccaagatcagcgcccccagcatgccagaatatgacacagacacccccctgaatgaaacagacaccaccatcaccgtgatgctgaagccagcccagagcagaggagcccctgtgtctgtgtaccagctggtggtgaaggaggagcggctgcagaagagcagaagagctgctgacatcatcgagtgcttctctgtgcctgtgtcctacagaaatgccagcagcctggacagcctgcactactttgctgctgagctgaagccagccaacctgcctgtgacccagcccttcaccgtgggggacaacaagacctacaacggctactggaacccccccctgagccccctgaagagctacagcatctacttccaggccctgagcaaggccaacggggagaccaagatcaactgtgtgcggctggccaccaagggggccagcacccagaacagcaacacagtggagcctgagaagcaggtggacaacacagtgaagatggccggcgtgattgctggcctgctgatgttcatcatcatcctgctgggcgtgatgctgaccatcaagagaagaagaaatgcctacagctacagctactacctgaagctggccaagaagcagaaggagacccagagcggggcccagcgggagatgggccctgtggccagcgctgacaagcccaccaccaagctgagcgccagcagaaatgatgagggcttcagcagcagcagccaggatgtgaatggcttcaacggcagcagaggagagctgagccagcccaccctgaccatccagacccacccctaccgcacctgtgaccctgtggagatgagctacccccgggaccagttccagcctgccatccgggtggccgacctgctgcagcacatcacccagatgaagaggggccagggctacggcttcaaggaggagtatgaggccctgcctgagggccagacagcctcctgggacacagccaaggaggatgagaacagaaacaagaacagatatggcaacatcatctcctatgaccacagccgggtgcggctgctggtgctggatggagacccccacagcgactacatcaatgccaactacattgatggctaccaccggcccaggcactacatcgccacccagggccccatgcaggagaccgtgaaggacttctggaggatgatctggcaggagaacagcgccagcatcgtgatggtgaccaacctggtggaggtgggccgggtgaagtgtgtgcgctactggccagatgacacagaggtgtatggagacatcaaggtgaccctgattgaaacagagcccctggccgagtatgtgatccgcaccttcaccgtgcagaagaagggctaccacgagatccgggagctgcggctcttccacttcacctcctggccagaccacggcgtgccctgctacgccaccggcctgctgggctttgtgcggcaggtgaagttcctgaaccccccagaggccggccccatcgtggtgcactgcagcgctggagctggccgcacaggctgcttcatcgccatcgacaccatgctggacatggccgagaatgaaggagtggtggacatcttcaactgtgtgcgggagctgcgggcccagagggtgaacctggtgcagacagaggagcagtatgtgtttgtgcatgatgccatcctggaggcctgcctgtgtggcaacacagccatccctgtgtgtgagttccgcagcctgtactacaacatcagccggctggacccccagaccaacagcagccagatcaaggatgagttccagaccctgaacatcgtgaccccccgggtgcggcctgaggactgcagcatcggcctgctgcccaggaaccacgacaagaacagatccatggatgtgctgcccctggaccgctgcctgcccttcctgatctctgtggatggagagagcagcaactacatcaatgctgccctgatggacagccacaagcagcctgctgcctttgtggtgacccagcaccccctgcccaacacagtggccgacttctggaggctggtgtttgactacaactgcagctctgtggtgatgctgaatgagatggacacagcccagttctgcatgcagtactggccagagaagaccagcggctgctacggccccatccaggtggagtttgtgtctgctgacattgatgaggacatcatccaccgcatcttccgcatctgcaacatggcccggccccaggacggctaccgcatcgtgcagcacctgcagtacatcggctggccagcctacagagacaccccacccagcaagaggagcctgctgaaggtggtgcggcggctggagaagtggcaggagcagtatgatggccgggagggccgcacagtggtgcactgcctgaatggaggcggccgcagcggcaccttctgtgccatctgcagcgtgtgtgagatgatccagcagcagaacatcattgatgtgttccacatcgtgaagaccctgaggaacaacaagagcaacatggtggagaccctggagcagtacaagtttgtgtatgaggtggccctggagtacctgagcagcttctag

SEQ ID NO: 321126 - DNA, 4323 bp, Artificial Sequence
  derived and/or modified sequence
atggccagcctggccgccctggccctgagcctgctgctgcggctgcagttacctcctctgcccggggcccgggcccagtccgccgcaggcggttgctcattcgatgagcactactcaaactgcggatactctgtcgctctagggactaatggtttcacctgggagcagataaacacgtgggagaagccgatgttagaccaggccgtgcccactggaagttttatgatggtgaacagttctggccgggctagcggccaaaaagcacaccttctgctcccaactctgaaggaaaatgatacccattgcatcgacttccactactacttttcctccagagatagatcttcgcctggcgccctaaacgtctatgtgaaggtgaacggggggcctcagggtaatccggtttggaatgtgagcggagtcgtgaccgaggggtgggtgaaggctgaactggctatctccaccttttggccgcatttctaccaggtgatctttgagtcggtgtctcttaaaggccatcccggctacatcgcggttgacgaggtcagggtgctggctcacccctgccgaaaggccccacattttttgcgactgcagaatgtcgaggttaacgtggggcagaatgcaacgttccagtgtatcgctggtggaaaatggtcccagcatgacaagctgtggttacagcagtggaatggacgggataccgctctgatggtgacacgtgtagtcaatcacaggcggtttagtgcaactgtcagtgttgctgataccgcacaacgtagcgtgtctaagtaccgatgcgtgatcaggtccgacggaggatccggtgtcagtaactatgccgagttaatcgttaaggagcctcccactcctatcgcacccccggagttactggccgttggcgctacgtacctatggattaaacctaacgccaattccattataggcgatggccccatcatccttaaagaggtggaatacagaaccacaactggcacatgggccgaaacgcacatagtggactctccaaactacaagctgtggcacctggatcctgatgtggaatacgagattagggtcctcttgactcggcctggcgagggaggcaccggccccccaggaccccccctcactacccgcacgaaatgcgccgacccagtgcatgggccccagaacgtggagatagtggacattagggcccggcaactaaccctgcagtgggagccatttggatacgcagtgaccagatgtcactcctacaatctcacagtacaatatcaatacgtctttaatcagcagcagtacgaagccgaagaagtgattcaaacttcctcgcattacactttgaggggcctgaggccttttatgactattcgcttgcgcctgctcctgtcaaatcccgaaggacggatggagtccgaggagttggtggtacaaaccgaagaagacgttccaggagccgtgcccctggagagtattcagggaggtcccttcgaggaaaagatatatatccagtggaaacctcctaacgaaaccaacggcgtcattacactgtacgagatcaactataaggccgtgggaagtctggacccttcagcagacttgagcagccagcgcggaaaagtcttcaagctaaggaacgaaacacaccacctgttcgttggactgtaccccggaaccacctactcttttacaattaaagcctctaccgcgaaagggttcggcccaccagtgacgacccgcatcgctactaagatctccgcccccagcatgcctgagtacgatacagacactcctctaaatgaaacagacaccacgataacggtcatgctgaaaccagcccaatcaagaggcgctcccgtttccgtgtaccagctggtcgttaaggaggagaggcttcagaagagtagacgtgctgcagacattattgagtgtttctcggtccccgtgagctaccgaaatgcatcatcactcgattctctccattacttcgcggccgagcttaaaccagccaacctacctgtgacccagcccttcactgtgggtgacaataaaacatacaatggttattggaaccctcccctgtcaccactcaaatcatactccatctattttcaagcgttgtcaaaggcaaatggtgagacgaagataaattgtgttagactggcgaccaagggcgctagcacccagaattcgaacaccgtagagcccgagaagcaggtggataacaccgtgaaaatggccggggtgatagccggccttttgatgtttattattatattactgggggttatgctgaccatcaaacggagacgcaacgcctattcatactcctattacctgaagcttgcaaagaaacaaaaggaaactcagtccggagctcaaagggagatgggacccgttgcttctgccgacaagccaactactaagctttctgcaagtcgcaacgatgaaggcttcagttcaagctcacaggatgtaaacgggtttaacggatctaggggagagttgtctcaaccgacccttacgattcagactcacccctatagaacatgtgatccggtggaaatgtcatacccacgcgatcagttccagccggctattagggttgcagacctgctccagcacattacacagatgaaacggggccagggctatggattcaaggaagagtacgaggcgcttcccgaggggcagaccgctagttgggacactgcaaaagaagatgagaacagaaataagaatcgttatggtaatatcatctcttacgatcatagcagggtcagacttctggtgttggacggtgatccacactctgattacataaacgccaattatattgatgggtatcacagacctagacactacattgctacccagggacccatgcaggaaaccgtgaaggacttctggagaatgatctggcaagagaattcagcttccatcgtgatggtaacgaacctggttgaggtaggcagagttaaatgtgtgcggtactggcccgacgatacagaagtgtacggcgatattaaggtcactttgatagagaccgagcctttagctgagtatgttattcggactttcacagttcagaaaaagggctatcacgagattagagagctgaggctcttccactttacaagctggcccgaccacggggtcccatgctacgccacaggactacttggctttgtcaggcaagttaaatttctcaacccacccgaagccggccctattgtggtgcattgttccgcgggtgctggcaggactggatgttttatagccatcgacactatgctggatatggccgagaacgagggagtcgtcgacatatttaactgcgtcagggagcttcgtgcccagagagtgaacctggttcagaccgaagagcagtatgtgtttgtccatgacgcaatcctcgaggcctgcctctgtggaaacaccgccatccccgtgtgtgagttccggtccttatattacaacattagtcggctagatcctcagaccaattcttctcaaattaaagatgagtttcagacgctgaatatcgtcactccccgcgtgcgcccagaagactgctctattggtctgctgccccgcaatcacgacaagaacaggtctatggacgtgctgcccctggacagatgcttgcctttcctcattagtgtggacggtgagtcgagtaactacattaacgccgcccttatggacagtcacaagcagcccgccgcctttgtggtcacccagcatccattaccaaataccgtcgccgatttttggcgcctggtctttgattataactgctcttccgttgtaatgctaaacgagatggacaccgcgcaattctgcatgcaatattggcctgagaagacttccggatgctacggcccaattcaagtggaatttgtttcagccgacatcgatgaggacattattcacagaatttttcgcatctgtaatatggccagaccccaggacggttatcgcatcgttcagcacctgcaatatataggctggcccgcgtaccgggacactcctccttcaaagcggagcctcctgaaagttgtacgccggctggaaaagtggcaagaacaatatgacgggcgggaaggcaggaccgtcgtgcattgccttaacggcggaggtaggtctggtactttttgcgctatctgctctgtgtgcgagatgattcagcaacagaacatcattgatgttttccacatcgtcaaaacattacggaacaacaagagcaacatggtggaaacgcttgagcaatataaattcgtctatgaagtggcactggagtatctgtcttccttttag

SEQ ID NO: 321127 - DNA, 12559 bp, Artificial Sequence
  derived and/or modified sequence
ccgcgcgcacagccagcggccgcgccggcgatgcggggccaccccgcgcccgccccagtcccggccccggcccccgcgggaaggggctgagctgcccgccgccgcccggatggcgagcctcgccgcgctcgccctcagcctgctcctgaggctgcagctgccgccactgcccggcgcccgggctcagagcgccgcaggtggctgttcctttgatgagcactacagcaactgtggttatagtgtggctctagggaccaatgggttcacctgggagcagattaacacatgggagaaaccaatgctggaccaggcagtgcccacaggatctttcatgatggtgaacagctctgggagagcctctggccagaaggcccaccttctcctgccaaccctgaaggagaatgacacccactgcatcgacttccattactacttctccagccgtgacaggtccagcccaggggccttgaacgtctacgtgaaggtgaatggtggcccccaagggaaccctgtgtggaatgtgtccggggtcgtcactgagggctgggtgaaggcagagctcgccatcagcactttctggccacatttctatcaggtgatatttgaatccgtctcattgaagggtcatcctggctacatcgccgtggacgaggtccgggtccttgctcatccatgcagaaaagcacctcattttctgcgactccaaaacgtggaggtgaatgtggggcagaatgccacatttcagtgcattgctggtgggaagtggtctcagcatgacaagctttggctccagcaatggaatggcagggacacggccctgatggtcacccgtgtggtcaaccacaggcgcttctcagccacagtcagtgtggcagacactgcccagcggagcgtcagcaagtaccgctgtgtgatccgctctgatggtgggtctggtgtgtccaactacgcggagctgatcgtgaaagagcctcccacgcccattgctcccccagagctgctggctgtgggggccacatacctgtggatcaagccaaatgccaactccatcatcggggatggccccatcatcctgaaggaagtggaatatcgcaccaccacaggcacgtgggcagagacccacatagtcgactctcccaactataagctgtggcatctggaccccgatgttgagtatgagatccgagtgctcctcacacgaccaggtgaggggggtacgggaccgccagggcctcccctcaccaccaggaccaagtgtgcagatccggtacatggcccacagaacgtggaaatcgtagacatcagagcccggcagctgaccctgcagtgggagcccttcggctacgcggtgacccgctgccatagctacaacctcaccgtgcagtaccagtatgtgttcaaccagcagcagtacgaggccgaggaggtcatccagacctcctcccactacaccctgcgaggcctgcgccccttcatgaccatccggctgcgactcttgctgtctaaccccgagggccgaatggagagcgaggagctggtggtgcagactgaggaagacgttccaggagctgttcctctagaatccatccaaggggggccctttgaggagaagatctacatccagtggaaacctcccaatgagaccaatggggtcatcacgctctacgagatcaactacaaggctgtcggctcgctggacccaagtgctgacctctcgagccagagggggaaagtgttcaagctccggaatgaaacccaccacctctttgtgggtctgtacccagggaccacctattccttcaccatcaaggccagcacagcaaagggctttgggccccctgtcaccactcggattgccaccaaaatttcagctccatccatgcctgagtacgacacagacaccccattgaatgagacagacacgaccatcacagtgatgctgaaacccgctcagtcccggggagctcctgtcagtgtttatcagctggttgtcaaggaggagcgacttcagaagtcacggagggcagctgacattattgagtgcttttcggtgcccgtgagctatcggaatgcctccagcctcgattctctacactactttgctgctgagttgaagcctgccaacctgcctgtcacccagccatttacagtgggtgacaataagacatacaatggctactggaaccctcctctctctcccctgaaaagctacagcatctacttccaggcactcagcaaagccaatggagagaccaaaatcaactgtgttcgtctggctacaaaaggtgcctccacccagaattctaacactgtggagccagagaagcaggtggacaacaccgtgaagatggctggcgtgatcgctggcctcctcatgttcatcatcattctcctgggcgtgatgctcaccatcaaaaggagaagaaatgcttattcctactcctattacttgaagctggccaagaagcagaaggagacccagagtggagcccagagggagatggggcctgtggcctctgccgacaaacccaccaccaagctcagcgccagccgcaatgatgaaggcttctcttctagttctcaggacgtcaacggattcaatggcagccgcggggagctttcccagcccaccctcacgatccagactcatccctaccgcacctgtgaccctgtggagatgagctacccccgggaccagttccaacccgccatccgggtggctgacttgctgcagcacatcacgcagatgaagagaggccagggctacgggttcaaggaggaatacgaggccttaccagaggggcagacagcttcgtgggacacagccaaggaggatgaaaaccgcaataagaatcgatatgggaacatcatatcctacgaccattcccgggtgaggctgctggtgctggatggagacccgcactctgactacatcaatgccaactacattgacggataccatcgacctcggcactacattgcgactcaaggtccgatgcaggagactgtaaaggacttttggagaatgatctggcaggagaactccgccagcatcgtcatggtcacaaacctggtggaagtgggcagggtgaaatgtgtgcgatactggccagatgacacggaggtctacggagacattaaagtcaccctgattgaaacagagcccctggcagaatacgtcatacgcaccttcacagtccagaagaaaggctaccatgagatccgggagctccgcctcttccacttcaccagctggcctgaccacggcgttccctgctatgccactggccttctgggcttcgtccgccaggtcaagttcctcaaccccccggaagctgggcccatagtggtccactgcagtgctggggctgggcggactggctgcttcattgccattgacaccatgcttgacatggccgagaatgaaggggtggtggacatcttcaactgcgtgcgtgagctccgggcccaaagggtcaacctggtacagacagaggagcaatatgtgtttgtgcacgatgccatcctggaagcgtgcctctgtggcaacactgccatccctgtgtgtgagttccgttctctctactacaatatcagcaggctggacccccagacaaactccagccaaatcaaagatgaatttcagaccctcaacattgtgacaccccgtgtgcggcccgaggactgcagcattgggctcctgccccggaaccatgataagaatcgaagtatggacgtgctgcctctggaccgctgcctgcccttccttatctcagtggacggagaatccagcaattacatcaacgcagcactgatggatagccacaagcagcctgccgccttcgtggtcacccagcaccctctacccaacaccgtggcagacttctggaggctggtgttcgattacaactgctcctctgtggtgatgctgaatgagatggacactgcccagttctgtatgcagtactggcctgagaagacctccgggtgctatgggcccatccaggtggagttcgtctccgcagacatcgacgaggacatcatccacagaatattccgcatctgtaacatggcccggccacaggatggttatcgtatagtccagcacctccagtacattggctggcctgcctaccgggacacgcccccctccaagcgctctctgctcaaagtggtccgacgactggagaagtggcaggagcagtatgacgggagggagggacgtactgtggtccactgcctaaatgggggaggccgtagtggaaccttctgtgccatctgcagtgtgtgtgagatgatccagcagcaaaacatcattgacgtgttccacatcgtgaaaacactgcgtaacaacaaatccaacatggtggagaccctggaacagtataaatttgtatacgaggtggcactggaatatttaagctccttttagctcaatgggatggggaacctgccggagtccagaggctgctgtgaccaagcccccttttgtgtgaatggcagtaactgggctcaggagctctgaggtggcaccctgcctgactccaaggagaagactggtggccctgtgttccacggggggctctgcaccttctgaggggtctcctgttgccgtgggagatgctgctccaaaaggcccaggcttccttttcaacctaaccagccacagccaagggcccaagcagaagtacacccacaagcaaggccttggatttctggctcccagaccacctgcttttgttctgagtttgtggatctcttggcaagccaactgtgcaggtgctggggagtgggaggctcccctgccctccttctccttaggagtggaggagatgtgtgttctgctcctctacgtcatggaaaagattgaggctcttgggggtcactgctctgctgccccctgcaacctccttcaggggcctctggcaccagacatttgcagtctggaccagtgtgaccttacgatgttccctaggccacaagagaggccccccatcctcacacctaacctgcatggggcttcgcccacaaccattctgtaccccttccccagcctgggccttgaccgtccagcattcactggccggccagctgtgtccacagcagtttttgataaaggtgttctttgcttttttgtgtggtcagtgggagggggtggaactgcagggaacttctctgctcctccttgtctttgtaaaaagggaccacctccctggggcagggcttgggctgacctgtaggatgtaacccctgtgtttctttggtggtagctttctttggaagagacaaacaagataagatttgattattttccaaagtgtatgtgaaaagaaactttcttttggagggtgtaaaatcttagtctcttatgtcaaaaagaagggggcgggggagtttgagtatgtacctctaagacaaatctctcgggccttttattttttcctggcaatgtccttaaaagctcccaccctgggacagcatgccactgagcaaggagagatgggtgagcctgaagatggtccctttggtttctggggcaaatagagcaccagctttgtgcataatttggatgtccaaatttgaactccttcctaaagaaacccagcagccaccttgaaaaaggccattgtggagcccattatactttgatttaaaataggccaagagaatcaggcctggagatctagggtcttgtccaaagtgtgagtgagtcaatgagagggaaccaacatttgctaagtctctactgtatgccagggatcatgcttggcactttccataggacatttcacacagtccttagaacccccaggagagagctactgacttgttatcatctccatttgatcatctcctccaatgaggaaacccacgcaccttccttagtaatgaaatcctgggttccaaaggggcaggtaatggcaatgagacttctccgtgctgttttcttcatcttctctaagccaagcaattattttatggagggaaaataaggccagaaacttctgagcagataactccacaaatggaaatttagtactttcttcctgatgccagttcttctgggaagcgcagaatttcagatatattttagtaacacattcccagctccccaggaaagccagtctcatctaatttcttagtcagtaaaaacaattccctgttccttcaggctatgaatggaccagccagggaaactctcgaccttgatctctagccagtgcttaggcccaatatctgacagcctcaggtgggctgggacctaggaagctccatcttgaaggctggtctagccccagacagggcatgaggggcagagaattcaagaaggtacagctttggccctcaagagcccactgtatgctggggaaatggaaccatggtgcagtagtgtggagtggatgagtgttccatgagcctaggagcaagaaagtctcttcggcctcgggcttcctggagaaggggacgtccattcctgctgggtcttaacaagcataaaaaggaaaaaaaggaaactcaggcaaagggatccatatgtgcaatggcaaagaaatgtgaaaaggcattgggagaagcagtctgggggaggccagcccagtgcgggcacagcacaacacggggagcagcaagagatgagccagggtccaggagacagatgcccatcgcgagtacagactttgtcctattggcaacaaggagtccatggagctttagagagatgcactcagcttcgtgttggccaagactccttctgggccaatggggctgcctcttttcctttcatcagacactgtgaaaacattcccttaagcgtgcactttttaatatcacatctatttgtctgtctgctcattgttttgttgctggaactaaatatgcaatggatcatgagactcagattctatgagaaacccagggtctctgctttaccacggagcagggtcaccaacccagatctccaggcccatgaggatggaacatgaaaggagccgacaaaagttgcttccattggcatgggctctggagctgtccagaagtccagggacaccagacttgatcaaggaagggctgtcactttagaggttcaaaaggaagtgcctcaaagcaaaggcaagcaaaggaaccccacgatgaacttgctcttttcctttgatgagcctctccccaggtgtatttcagcagaccccggggacccacccccactgggcctgctggcctccctcggctccagcccaatgccccagctggccttccccagcctgcaaggagcctgtagcatggcaaatctgcctgctgtatgctattttcttagatcttggtacatccagacaggatgagggtggagggagagctatttaacacaaatcctaagatttttttctgctcaggaaggggtgaaatagctggcagatacaaaagacagtggcttttatcattttaaatggtaggaatttaaggtgtgacttcagggagaaacaaacttgcaaaaaaaaaaaatctcaggccatgttggggtaacccagcaagggccagtgatgatttcccccagctcatccccttattttcccacaacccaaccattctctaaagcaggacagtgaataggtcttaggccagtgcacacaggaagaaattgaggcttatggatggggatgacttccctaagatcccatgggacaaggatgtggcaaggcttggatgagatggggcaccagtgcccaggaatttgaacattttcctttacccaggaaatctccggagccaacaccaccacccccagggggtctccccaccccaccccatttacagggtgagctcagcctgtcatgagcagaggaaaatattattaatgctctctgagtctttacaacaggagctcttacctcatagatgtgggctctgtttggggaagatgcaaggaagtaatgagaagcccaggaaatttctccacctgtgtttatggcctaaatagcttcaggatgtatcttagctgcactccaacattgcatcctttctggggtgaagaatctgggccaaccaggggtccttgggcctctagaaggccacagtaggcctctctttgtgggaatggaaggggacagtttgcttttagtgctggccctctctgtgggtgtggcctgcaaaggaaccaacagaccctatgctggggactctaacatgtgagctcattaaattcttccagcattctaaaggagggtttgtgattgtcaccatttactgatgaggaaactaaggctcctaggggagaaatcacttgcccacagttccacagctagtgagtgaatgaaccaggatttaaaccggttttttctcactacagagacaatatttttccaccattgtatctcacatttttcccaggaggttacccataacagaagagactagagtggaacagatacgtcagtggataaagctcaaagcaaacaacagtaagcttaaaattccttcatagtctcatgttttacgttcacaattcatgcaaaatttgcattccactttctgatttagccttgttggttttaatatgactctatgaatatttcaaaaaaaaatgtgctctgttcctcatgttgttctgttctgttcaccccgctatgacggaccctaggtcagctggtcttcagcttgaccctagaattgactctaggagcagtgaccctgctgcctcccagagccagttataggctcaagatcaagaccaactgaccttctcctaggcagctcctttggtgtgtgggtgctctgacctcactgttcatgaggggacctcaactaaggcatcttccagttgggtgctggaaggaacccattaactcacactagaatgatgaggatttgctcatctggcgtggagaaggatgagcccacaaaaccctaaagggaaaagagaagctggacacagctgtactcagcagattcctgaatgctaggctggaaagtggtgcctgttgtccaagtggagtcacatggttgctaatgtgggcaagtctgaggacacacttcatgagcagctggggtctggaaggctcctcactttaccctagccacacataattactgggtgcctacagcacctagcaccttggagggggcactattaggaaatcgagattactatggcacaattaattcctgggtaaggcatggggttgtggtggacagagctcagtctttagtttgaacgaaaacatacatacatgaaaaacatacatgaaaaaaggaccctcatcaacattagaaggggtagatttggagcactttaggcaggaaaacaggaacgcaaggccaggaaactggaacccagtgaatactcagaaccgaggatgcagatgacttatttagcaaaatggtcacttctgtgacatagctggagaaaggatgggtaacagcttgccagagccacttggaacaagggcaaatctcagtgtctggggcaaaagatgatgcatttccctctgacccatcatgtttattcatcctccactccccattgccacactagctcttgctgtaagtcctcaccaggatctacatttcctcgtcgctggtgggaaccccttagagtacatagaggtatcagtccagtaagactgctctacacaacagaagtgaggcccagggagtagcagccaggcccttatcctgttacctctgcaggagtgactgcccaacccagatccagagacattgaaggaaatgataattccttggtacctcactgccttgggacaaaatgaagaaagccacccttccttaggctgcagcttgccactcctgggctgggtaaacaggtcatcagcaccaagctcaaccaggagtaacactctggaagacatgggtgagcccaagaggaagcatgaacaggacgctgttcctaagtcatgtcaacaggttgtgctgggccaggatccccagggaaaaaaatggtcaacccaactggagggtaggttagaagaaaaaaaacataaacgtggatagtcatgtcatctcaaatccctgacttggcttccccattacttaacagtctgagctccttcttagcctgtgaccagcttcaaatcacagccaagtaaaacaaggaaataggaaaagtaaatccaactagaagagacaagctgagattcagatttgtttactcctcccatgcaaagtttccctgttggaggttttccatgtatacatgtctagaagtgatagaatgcaaggccttggctttgtcttgcagggatctgcctttgaggtcatagactgaacagcagggagagaggttagtggtggagtgtggggggagctgttctagctccagtttcttctgacacatttttcaggatcatggatctgatcctccgaagcacagcagagatatctaagccatatttgtgcacatgagcagactcttctagttttttagtaaccagggatgggcttttgcatggcactgactatagagatgtcttgtagagatcaagccagtcttttgcatcccacctgcccacctccagaagagatgggaaaaggtcatcaaagggcattcaccaactgaaatccactcatgaatgttaggtctctaaaaggaggcatcaacactcacaatggtagcctccaaacctagcatcccacctatctaagagctcaggggtggtccactggggcagatacaagggaagtgcaagggctcaggatgaaagaaaatctattgggaagagttttaggggcttgatcattatggggcttccttctatatctgagaactgctctgggtggtgagatgtggactctgatccttaattggaatgttcggagaatgagtgtctggtggccttgaagtgttggacagaaaagtatcagtataaaagcctggagctcagggtaattaatgtagttcatggttccttagtgagcaggactcttggatgtggaggagaaagggtcataggaagtaaaccaccaaaattacaaaattgagtctctgtacaattacttcagtgcctttgggcttatgaatacaaatcagtgggccttctctatgatggtccaacaaactctcagtgtccaccctgtccctgtatctcccatggaagatgaataatgtcaggtgttctttgggtcaaaggccccagggcagtctggaggcttagagggcagagtggtgtcattccatgtaaagttaggcttctgaggggtcaggcagaatatggtgtccatatcttccatagctctgcagattcttggatgaagtcaagcacagtttgctagacccaggtcactcctctgagtataactaggacccatgagtgaaacttaatagctgtaaggaagaacctgctgtctgccagagaggataagctgcccatctcagcagctgtctaaaagaaggcaggtgtctctttaaagggaagagaagcattggtgaaatggatttcaggtcacttccattccagatgggtgagatcttgtggagctgggatcatgtttgaactcattcatacctgtagagcacgaatccaagtagattgtgtttggtctgtacaggctgaagccccctgctctcccacccaagtgcccccactgagcaggccaacatgctgttgtggccacatatactgggctgatccaggctggttatcaccaaacagcaaaccatagggaacagctgctttgccatagacccaatacccatgtagatctctcatgagagcagccataactcagacccactgaccaacagggccatgagtgacagccagaaccagtgaaggtccaagtaggacacagagcagggcttttcttaccatacacattatctccagaggttatttctaccccactccctattcaaggcctgttggagcacactgcaaaagcaaaagcacagtaactcaatttacacatgattataatcatttccagtgcacacatttcatcaccaggtggatcctgagctagcccatgtaaatccgggttaacccatattggtaatcatactcaaaagcacttttcaccctacattctactagccaatcaaagacaaagagttgtggcctctaccattgccttggcttctggacaccctcacaagctatcccaaggttcccgctcaactccagggaggctgacatcttcacatccactgggcatataatattgcatgagaccaaagtctccacactctttgcagcctcctccatgaatcccaatggcctgcacttgtacagtttgggtgtttgatagataaagcacgtatgagaagagaaaacaaaataaatcaactttttaaaaaagccagcactgtgctgtcaatgttttttttttcttttcaattctagctcagaaaagcagaaggtaaataatgtcaggtcaatgaatatcagatatattttttgactgtacattacagtgaagtgtaatctttttacacctgcaagtccatcttatttattcttgtaaatgttccctgacaatgtttgtaacatggctgtgttaaaaaatctatacaataaagctgtgaccctgagattcatgttttcctaagata

SEQ ID NO: 321128 - DNA, 4322 bp, Artificial Sequence
  derived and/or modified sequence
atggcttcccttgctgccctcgcacttagcctgctgctccggttacagttgccgccactcccaggcgcaagggcacagagcgccgcaggtggatgctcgtttgatgaacactatagtaactgcgggtattcagttgccctgggtacaaatggatttacgtgggaacagatcaacacttgggagaagcctatgcttgaccaggccgtcccaactggtagctttatgatggttaactcgtcgggtcgagcgtctggccagaaagcccatctcttactgccaacacttaaggagaatgatacccactgcatcgactttcactactactttagctcacgcgacagatccagtcctggggcactgaacgtgtacgtgaaggttaatggcggaccacagggaaaccctgtgtggaatgtgtccggcgtcgttactgagggctgggtcaaagcagaactggctatctccacattttggccccacttctaccaggttattttcgagtctgttagcctgaagggtcatccaggctatattgctgtggacgaagtgcgagtcctggcccacccttgccggaaggcccctcatttccttagactgcagaatgtggaagttaacgtaggacagaatgccaccttccagtgtatagccggaggtaagtggagccaacacgataaactatggcttcaacagtggaatggtagagatactgccctgatggtaacacgggtcgtgaaccacaggagattcagtgccacggtgagtgtggctgacacagcccagagaagtgtcagcaagtatcgctgcgttattaggtcagatggtggatcgggtgtttcaaattacgctgagctgatcgtgaaggaacctcccacacccatagcacctcccgaacttctggcagtaggcgctacatacctgtggataaagcccaacgcaaactctatcatcggggacggcccaatcattctcaaggaggttgaatacagaaccacaactggcacttgggctgagacccacattgtggactctccaaattataaactgtggcacctcgacccagatgttgaatacgagatacgagtactgcttaccagacctggagagggtggcaccggaccacctggaccacctttgactaccagaaccaagtgtgctgatcctgttcacggaccccagaacgtggagattgtcgatataagggcccgtcagctgacacttcagtgggaaccattcgggtatgccgtcactcgctgtcacagctacaatctgaccgttcagtaccagtacgtgtttaatcagcagcaatatgaagcagaggaggtgatccaaacctcaagccattacacattaaggggcctccgaccttttatgactatcaggttgcgcttactactgagcaatcctgagggtagaatggaatcagaagaactggtagttcagactgaggaagacgtgcctggggcagtgcccctagagagcatccagggtggaccctttgaggagaagatctatattcagtggaagcctccaaacgagactaatggtgttattacactttatgaaataaattacaaagccgtggggtccctcgacccgtctgccgacctgtctagtcagcgcggaaaggtattcaagcttagaaatgagacacaccatttgtttgtggggctgtatcctggaacgacctacagctttactatcaaagcaagcacggcgaaagggtttggacccccagtgacaactcggatcgccaccaagatctccgcaccatccatgccggaatatgatactgacacccctctaaacgagaccgatacgaccattacggtaatgctgaaaccagctcaatcgagaggcgcacccgtttctgtgtaccagctcgtcgtcaaggaggagaggctgcagaaatcacgacgtgccgctgatataattgagtgtttctccgttcctgtgtcttatagaaatgcgtcctcattggactccttgcactattttgcggcagagctaaaacctgcgaacctgccggttacacagccgttcactgtcggggataacaagacatacaatggctattggaacccgcctctgtcccctctgaagtcttattccatctacttccaggccctctcaaaggccaatggcgaaacaaaaatcaattgcgtcaggctggcgaccaagggggcttcaactcaaaacagtaacacagtggaacccgagaaacaggtggataacacagtcaaaatggccggtgtaattgcgggactgctcatgttcatcatcatactgttgggcgttatgctgactattaaaagaaggcgaaacgcctactcctacagctactatcttaagctggctaaaaaacaaaaagagacgcaatctggggcacagagggaaatgggcccagtcgcgtccgccgacaagccgactacaaaactctccgccagcaggaacgacgagggctttagcagctctagtcaggacgtgaacggctttaacggatcccgcggtgagctttcccagcccaccctgacaatccaaacccacccttaccgaacttgtgatcccgtggagatgtcgtaccctcgagaccagtttcaaccggcaatcagggtggcggacttgctccagcatattacacaaatgaagaggggacaggggtatggctttaaggaggagtacgaggccttaccggaggggcaaacggcctcatgggataccgcaaaagaggatgagaatcgcaacaaaaatcgttacgggaatattatctcgtatgatcattcacgagtgagactgctggtacttgacggagatcctcacagcgactacatcaacgctaactatatcgatgggtatcatcgaccacgtcattatattgccacccagggacccatgcaggagaccgtaaaggatttttggaggatgatctggcaggagaacagcgcttcaattgtgatggtgaccaatctagtggaagtgggacgggttaagtgcgtgcgctattggcccgatgataccgaggtgtatggcgacattaaggtgaccctgatcgagacagagcccctagccgagtatgtgatcagaacattcaccgttcagaagaaaggatatcatgagatccgtgaactccgcctatttcatttcacaagctggcctgaccatggggtaccttgctatgctactggactactgggcttcgtgaggcaggtaaaattcttgaaccctcccgaagccggtccaattgtcgtgcactgttccgccggtgccggacgcaccggctgtttcatcgctatcgacaccatgctggacatggcggaaaacgaaggcgtggtggacattttcaactgtgtaagggaacttcgagcacaaagagtgaacttagttcaaaccgaagaacaatatgtgtttgttcatgacgcgatccttgaagcctgtctgtgcggcaacacagctatccccgtctgtgagttccggtcactgtactataacatctctcgactcgatccccagacaaactcttcccagatcaaagatgagttccagaccctgaacatcgtcacgcctcgggtaaggccagaggattgttcgattggattgttgccacgcaatcatgataagaatcggagcatggacgttctcccactcgacaggtgcctgccttttcttatctctgttgatggggagagcagcaattacatcaacgccgctctgatggactcacataaacagcccgctgcctttgtcgtaacccagcacccgctgcctaatacagtggccgacttttggagactggtcttcgactacaattgctcgagcgtcgttatgctcaacgagatggacacagctcagttctgtatgcagtactggcccgagaagactagtggctgttacggacctattcaggtggaattcgtgtccgccgacatagacgaggatatcatacaccgaattttccggatatgtaacatggcccgacctcaggatgggtaccgaattgtacagcatctgcagtatattggctggcccgcatacagagacacacctccatctaaacggtcactgctgaaggtggtgaggcgacttgaaaagtggcaggaacagtacgacggcagggagggcagaacggttgtgcactgccttaacggcggtggtcgctccgggacgttttgtgctatctgctctgtatgtgagatgattcagcagcaaaacatcatcgacgttttccacattgtgaagactctgcgaaataacaagagcaacatggttgagacattggaacaatacaaattcgtgtatgaggtcgctcttgagtatctgtcaagctttta

SEQ ID NO: 321129 - protein, 1431 aa, Artificial Sequence
  derived and/or modified sequence
MASLAALALSLLLRLQLPPLPGARAQSAAGGCSFDEHYSNCGYSVALGTNGFTWEQINTWEKPMLDQAVPTGSFMMVNSSGRASGQKAHLLLPTLKENDTHCIDFHYYFSSRDRSSPGALNVYVKVNGGPQGNPVWNVSGVVTEGWVKAELAISTFWPHFYQVIFESVSLKGHPGYIAVDEVRVLAHPCRKAPHFLRLQNVEVNVGQNATFQCIAGGKWSQHDKLWLQQWNGRDTALMVTRVVNHRRFSATVSVADTAQRSVSKYRCVIRSDGGSGVSNYAELIVKEPPTPIAPPELLAVGATYLWIKPNANSIIGDGPIILKEVEYRTTTGTWAETHIVDSPNYKLWHLDPDVEYEIRVLLTRPGEGGTGPPGPPLTTRTKCADPVHGPQNVEIVDIRARQLTLQWEPFGYAVTRCHSYNLTVQYQYVFNQQQYEAEEVIQTSSHYTLRGLRPFMTIRLRLLLSNPEGRMESEELVVQTEEDVPGAVPLESIQGGPFEEKIYIQWKPPNETNGVITLYEINYKAVGSLDPSADLSSQRGKVFKLRNETHHLFVGLYPGTTYSFTIKASTAKGFGPPVTTRIATKISAPSMPEYDTDTPLNETDTTITVMLKPAQSRGAPVSVYQLVVKEERLQKSRRAADIIECFSVPVSYRNASSLDSLHYFAAELKPANLPVTQPFTVGDNKTYNGYWNPPLSPLKSYSIYFQALSKANGETKINCVRLATKGASTQNSNTVEPEKQVDNTVKMAGVIAGLLMFIIILLGVMLTIKRRKLAKKQKETQSGAQREMGPVASADKPTTKLSASRNDEGFSSSSQDVNGFTDGSRGELSQPTLTIQTHPYRTCDPVEMSYPRDQFQPAIRVADLLQHITQMKRGQGYGFKEEYEALPEGQTASWDTAKEDENRNKNRYGNIISYDHSRVRLLVLDGDPHSDYINANYIDGYHRPRHYIATQGPMQETVKDFWRMIWQENSASIVMVTNLVEVGRVKCVRYWPDDTEVYGDIKVTLIETEPLAEYVIRTFTVQKKGYHEIRELRLFHFTSWPDHGVPCYATGLLGFVRQVKFLNPPEAGPIVVHCSAGAGRTGCFIAIDTMLDMAENEGVVDIFNCVRELRAQRVNLVQTEEQYVFVHDAILEACLCGNTAIPVCEFRSLYYNISRLDPQTNSSQIKDEFQTLNIVTPRVRPEDCSIGLLPRNHDKNRSMDVLPLDRCLPFLISVDGESSNYINAALMDSHKQPAAFVVTQHPLPNTVADFWRLVFDYNCSSVVMLNEMDTAQFCMQYWPEKTSGCYGPIQVEFVSADIDEDIIHRIFRICNMARPQDGYRIVQHLQYIGWPAYRDTPPSKRSLLKVVRRLEKWQEQYDGREGRTVVHCLNGGGRSGTFCAICSVCEMIQQQNIIDVFHIVKTLRNNKSNMVETLEQYKFVYEVALEYLSSF

SEQ ID NO: 321130 - DNA, 4296 bp, Artificial Sequence
  derived and/or modified sequence
atggccagcctggccgccctggccctgagcctgctgctgagactgcagctgccccccctgcccggcgccagagcccagagcgccgccggcggctgcagcttcgacgagcactacagcaactgcggctacagcgtggccctgggcaccaacggcttcacctgggagcagatcaacacctgggagaagcccatgctggaccaggccgtgcccaccggcagcttcatgatggtgaacagcagcggcagagccagcggccagaaggcccacctgctgctgcccaccctgaaggagaacgacacccactgcatcgacttccactactacttcagcagcagagacagaagcagccccggcgccctgaacgtgtacgtgaaggtgaacggcggcccccagggcaaccccgtgtggaacgtgagcggcgtggtgaccgagggctgggtgaaggccgagctggccatcagcaccttctggccccacttctaccaggtgatcttcgagagcgtgagcctgaagggccaccccggctacatcgccgtggacgaggtgagagtgctggcccacccctgcagaaaggccccccacttcctgagactgcagaacgtggaggtgaacgtgggccagaacgccaccttccagtgcatcgccggcggcaagtggagccagcacgacaagctgtggctgcagcagtggaacggcagagacaccgccctgatggtgaccagagtggtgaaccacagaagattcagcgccaccgtgagcgtggccgacaccgcccagagaagcgtgagcaagtacagatgcgtgatcagaagcgacggcggcagcggcgtgagcaactacgccgagctgatcgtgaaggagccccccacccccatcgccccccccgagctgctggccgtgggcgccacctacctgtggatcaagcccaacgccaacagcatcatcggcgacggccccatcatcctgaaggaggtggagtacagaaccaccaccggcacctgggccgagacccacatcgtggacagccccaactacaagctgtggcacctggaccccgacgtggagtacgagatcagagtgctgctgaccagacccggcgagggcggcaccggcccccccggcccccccctgaccaccagaaccaagtgcgccgaccccgtgcacggcccccagaacgtggagatcgtggacatcagagccagacagctgaccctgcagtgggagcccttcggctacgccgtgaccagatgccacagctacaacctgaccgtgcagtaccagtacgtgttcaaccagcagcagtacgaggccgaggaggtgatccagaccagcagccactacaccctgagaggcctgagacccttcatgaccatcagactgagactgctgctgagcaaccccgagggcagaatggagagcgaggagctggtggtgcagaccgaggaggacgtgcccggcgccgtgcccctggagagcatccagggcggccccttcgaggagaagatctacatccagtggaagccccccaacgagaccaacggcgtgatcaccctgtacgagatcaactacaaggccgtgggcagcctggaccccagcgccgacctgagcagccagagaggcaaggtgttcaagctgagaaacgagacccaccacctgttcgtgggcctgtaccccggcaccacctacagcttcaccatcaaggccagcaccgccaagggcttcggcccccccgtgaccaccagaatcgccaccaagatcagcgcccccagcatgcccgagtacgacaccgacacccccctgaacgagaccgacaccaccatcaccgtgatgctgaagcccgcccagagcagaggcgcccccgtgagcgtgtaccagctggtggtgaaggaggagagactgcagaagagcagaagagccgccgacatcatcgagtgcttcagcgtgcccgtgagctacagaaacgccagcagcctggacagcctgcactacttcgccgccgagctgaagcccgccaacctgcccgtgacccagcccttcaccgtgggcgacaacaagacctacaacggctactggaacccccccctgagccccctgaagagctacagcatctacttccaggccctgagcaaggccaacggcgagaccaagatcaactgcgtgagactggccaccaagggcgccagcacccagaacagcaacaccgtggagcccgagaagcaggtggacaacaccgtgaagatggccggcgtgatcgccggcctgctgatgttcatcatcatcctgctgggcgtgatgctgaccatcaagagaagaaagctggccaagaagcagaaggagacccagagcggcgcccagagagagatgggccccgtggccagcgccgacaagcccaccaccaagctgagcgccagcagaaacgacgagggcttcagcagcagcagccaggacgtgaacggcttcaccgacggcagcagaggcgagctgagccagcccaccctgaccatccagacccacccctacagaacctgcgaccccgtggagatgagctaccccagagaccagttccagcccgccatcagagtggccgacctgctgcagcacatcacccagatgaagagaggccagggctacggcttcaaggaggagtacgaggccctgcccgagggccagaccgccagctgggacaccgccaaggaggacgagaacagaaacaagaacagatacggcaacatcatcagctacgaccacagcagagtgagactgctggtgctggacggcgacccccacagcgactacatcaacgccaactacatcgacggctaccacagacccagacactacatcgccacccagggccccatgcaggagaccgtgaaggacttctggagaatgatctggcaggagaacagcgccagcatcgtgatggtgaccaacctggtggaggtgggcagagtgaagtgcgtgagatactggcccgacgacaccgaggtgtacggcgacatcaaggtgaccctgatcgagaccgagcccctggccgagtacgtgatcagaaccttcaccgtgcagaagaagggctaccacgagatcagagagctgagactgttccacttcaccagctggcccgaccacggcgtgccctgctacgccaccggcctgctgggcttcgtgagacaggtgaagttcctgaacccccccgaggccggccccatcgtggtgcactgcagcgccggcgccggcagaaccggctgcttcatcgccatcgacaccatgctggacatggccgagaacgagggcgtggtggacatcttcaactgcgtgagagagctgagagcccagagagtgaacctggtgcagaccgaggagcagtacgtgttcgtgcacgacgccatcctggaggcctgcctgtgcggcaacaccgccatccccgtgtgcgagttcagaagcctgtactacaacatcagcagactggacccccagaccaacagcagccagatcaaggacgagttccagaccctgaacatcgtgacccccagagtgagacccgaggactgcagcatcggcctgctgcccagaaaccacgacaagaacagaagcatggacgtgctgcccctggacagatgcctgcccttcctgatcagcgtggacggcgagagcagcaactacatcaacgccgccctgatggacagccacaagcagcccgccgccttcgtggtgacccagcaccccctgcccaacaccgtggccgacttctggagactggtgttcgactacaactgcagcagcgtggtgatgctgaacgagatggacaccgcccagttctgcatgcagtactggcccgagaagaccagcggctgctacggccccatccaggtggagttcgtgagcgccgacatcgacgaggacatcatccacagaatcttcagaatctgcaacatggccagaccccaggacggctacagaatcgtgcagcacctgcagtacatcggctggcccgcctacagagacaccccccccagcaagagaagcctgctgaaggtggtgagaagactggagaagtggcaggagcagtacgacggcagagagggcagaaccgtggtgcactgcctgaacggcggcggcagaagcggcaccttctgcgccatctgcagcgtgtgcgagatgatccagcagcagaacatcatcgacgtgttccacatcgtgaagaccctgagaaacaacaagagcaacatggtggagaccctggagcagtacaagttcgtgtacgaggtggccctggagtacctgagcagcttctag

SEQ ID NO: 321131 - DNA, 4296 bp, Artificial Sequence
  derived and/or modified sequence
atggcctctctcgcagcactagcattgtccctgctgctcagacttcagttaccccctttgcctggcgcacgggcccagtccgcggcgggggggtgttctttcgacgagcattattctaactgtggttactccgtcgctcttggaactaacggattcacatgggaacagatcaatacctgggagaaacctatgctcgatcaggctgtgcctactggcagcttcatgatggttaattctagtgggcgggcgtccggtcagaaggcacacctcttgctgccaacactgaaggagaacgacacgcactgtattgactttcactactacttttcatccagagacagaagttcacccggtgctctgaatgtttacgtgaaagtgaatggaggcccccaaggcaatccggtgtggaatgtttctggcgtggtgactgaaggatgggtgaaagcggaactggctatctctacattctggcctcatttttaccaagttatctttgaatccgtgtccctgaagggtcaccccggatacatcgctgtggatgaggtgcgagtgctggctcacccatgccggaaggcccctcattttcttcggctgcagaacgttgaggtgaatgttgggcaaaacgccacatttcagtgtattgctggggggaaatggagccagcacgacaaactgtggctgcaacagtggaatggccgggacaccgcacttatggtgacaagagtggtcaatcaccgacgtttttccgccacggtttcggtagctgacactgctcagagatccgtttcgaaatataggtgtgttatccgaagtgacggagggagcggcgtatcaaactacgctgaactgatagtgaaggaacctccaactccaattgctcctccagagctactcgctgtcggtgccacatatttgtggattaaaccaaatgccaattctatcattggagatggtcccatcatcctgaaggaagtggaatacagaacaaccacggggacctgggccgagacccacatcgtggattccccaaattacaaattatggcatctggaccctgacgtggagtacgaaattcgggtacttctcaccagaccaggggagggagggacaggccctcccggaccacccctgaccacacggacgaaatgtgccgatcccgtgcatggcccccagaacgtggagatcgtggatattcgggcccgccagctgactctgcagtgggaacctttcgggtatgccgtgacacggtgtcattcttataatctcaccgtacagtaccagtacgtcttcaatcaacagcagtacgaggcggaggaagtgattcagactagttctcattatacactgcgaggactgagacctttcatgactatccggctgcgtctcctgctctcaaacccagaggggcgcatggaaagtgaggaacttgtagtccagacagaagaagacgtgccgggggccgttcccctagaaagcatccaggggggaccctttgaggaaaagatttacatccagtggaagccaccgaacgaaactaatggcgttattactctgtatgaaatcaattacaaggcggtcggctcattggacccaagtgcggatctttcaagccaacggggcaaggtgttcaaactgagaaacgagacccaccatctcttcgtgggcctgtaccccgggacaacctactcgtttactatcaaggcaagcactgcaaaaggttttgggccacctgttactacccgtatcgctaccaaaatctcagcaccgagtatgcctgaatacgacaccgacacgccactgaacgagaccgacacgacaatcactgtgatgttaaaacctgctcagagtagaggggcacccgtgtcggtataccagctggttgtcaaagaggaaagactgcagaagagtcggcgagctgctgatatcatcgaatgcttttctgtgcctgttagctaccgcaacgcctcctctctggattccctgcattacttcgctgcggaactgaagcctgccaacctacccgtgactcagccatttacagtgggggacaacaaaacttacaacggttattggaatccaccactgtctccccttaagagttatagtatctatttccaagccttgtccaaagctaacggagagactaagataaactgcgttcgactcgcgacgaaaggagcaagcacccagaactcaaataccgttgagccggagaagcaggtcgataatacagtgaagatggccggggtcattgccggtctgctgatgtttatcattatcctactaggtgtgatgcttaccattaagcgtcgcaaactggcaaagaagcagaaggagacacagagcggtgcccagagggaaatgggccccgtcgcatctgccgataaaccaacaacaaaattgtcagcgagcaggaacgacgagggcttcagttcctcctcccaggacgtgaatggctttacagacggatctcgcggggagctttcccagcctacattaactatccagacgcacccataccgtacctgcgatcccgtggaaatgtcgtacccgcgggaccagttccaaccagcgatcagagtggccgatcttctccagcacattacccagatgaaacgcggtcaaggatacggttttaaggaggagtacgaggccctgccagaagggcagacggccagttgggacacagccaaagaggacgaaaaccgaaacaaaaataggtacgggaatatcatctcatatgaccacagcagagtccggctgctggtgctggatggggacccccattcagattatattaacgccaattatattgatggataccaccgccctcgacattacatcgcgacgcagggccctatgcaggaaaccgtcaaggatttttggaggatgatatggcaggagaacagtgcgtcaatagtgatggttaccaacttagtggaggtcggccgagtgaaatgcgttcggtactggcctgacgacacggaggtgtatggcgatatcaaagtgacacttatagagactgagcccttggccgagtatgtcatccgcacctttacagtgcagaagaagggataccacgaaatacgggagttgcgcttattccatttcaccagctggcccgaccacggcgtgccatgctacgctactggtctgctggggtttgttcgccaggtgaaattcttaaaccctccagaggctggcccaattgtagtgcactgctcagctggcgctggcagaactgggtgctttatcgctatcgatactatgttggacatggctgaaaacgagggggttgtggacatctttaactgtgtgagggagctgcgagcacaacgggttaacctggtacagaccgaggagcagtatgtttttgtgcatgatgccatcctggaggcatgtctctgtggcaataccgctatcccggtttgtgagttccgaagcttatattacaacattagcaggctggatccacaaacaaatagttcccagataaaagacgagtttcagacccttaacatcgttactccccgcgtgaggcccgaagattgttcgatagggctgctgcccaggaaccacgacaaaaacagatccatggacgtcttacctttggataggtgtttgccttttttaattagcgtggacggggaatcatccaactatatcaacgcagccctgatggatagtcacaagcagcctgctgccttcgtagtcacccagcatccactacccaacacagtagcagatttttggcggttagtcttcgattataattgttcctctgttgttatgcttaatgagatggatacagctcagttctgcatgcaatattggcctgagaagacgagtgggtgctatgggcccatccaagtcgagttcgtatcggccgatatcgacgaggacattattcatagaatcttccggatctgcaacatggctcgtcctcaggacggctaccggatcgtgcagcatctccagtacataggctggccggcctatagggacacaccccctagcaagagatctctcctaaaagtcgtgcgccggctcgagaaatggcaggaacagtacgatggtagagaggggaggactgtagtgcattgcctgaacggaggtggacgctctggcactttctgcgcaatttgtagcgtgtgtgaaatgatacagcagcagaatattattgacgtgttccacatagtgaagacacttagaaataacaaatctaatatggtggagactcttgaacagtataagttcgtctatgaggttgccctcgagtacctctcctccttctag

SEQ ID NO: 321132 - DNA, 4296 bp, Artificial Sequence
  derived and/or modified sequence
atggccagcctggccgccctggccctgagcctgctgctgcggctgcagctgccccccctgcccggggcccgggcccagagcgctgctgggggctgcagctttgatgagcactacagcaactgtggctacagcgtggccctgggcaccaacggcttcacctgggagcagatcaacacctgggagaagcccatgctggaccaggccgtgcccaccggcagcttcatgatggtgaacagcagcggccgggccagcggccagaaggcccacctgctgctgcccaccctgaaggaaaatgacacccactgcatcgacttccactactacttcagcagccgggacaggagcagccctggggccctgaatgtgtatgtgaaggtgaatggaggcccccagggcaaccctgtgtggaatgtgtctggagtggtgacagagggctgggtgaaggccgagctggccatcagcaccttctggccccacttctaccaggtgatctttgaatctgtgtccctgaagggccaccctggctacatcgctgtggatgaggtgcgggtgctggcccacccctgcaggaaggccccccacttcctgcggctgcagaatgtggaggtgaatgtgggccagaatgccaccttccagtgcatcgccggcggcaagtggagccagcacgacaagctgtggctgcagcagtggaatggccgggacacagccctgatggtgaccagggtggtgaaccaccggcgcttcagcgccaccgtgtctgtggccgacacagcccagaggtctgtgtccaagtaccgctgtgtgatccgcagtgatggcggcagcggcgtgagcaactatgcagagctgattgtgaaggagccccccacccccatcgcccctcctgagctgctggccgtgggcgccacctacctgtggatcaagcccaatgccaacagcatcattggagatggccccatcatcctgaaggaggtggagtaccgcaccaccaccggcacctgggccgagacccacatcgtggacagccccaactacaagctgtggcacctggaccctgatgtggagtatgagatccgggtgctgctgaccaggcctggagagggcggcaccggccccccaggcccccccctgaccaccaggaccaagtgtgccgaccctgtgcacggcccccagaatgtggagatcgtggacatccgggcccggcagctgaccctgcagtgggagcccttcggctatgctgtgacccgctgccacagctacaacctgactgtgcagtaccagtatgtgttcaaccagcagcagtatgaagctgaggaggtgatccagaccagcagccactacaccctgcggggcctgcggcccttcatgaccatccggctgcggctgctgctgagcaaccctgagggccgcatggagagcgaggagctggtggtgcagacagaggaggatgtgcctggagctgtgcccctggagagcatccagggcggcccctttgaggagaagatctacatccagtggaagcccccaaatgagaccaatggagtcatcaccctgtatgagatcaactacaaggctgtgggcagcctggaccccagcgctgacctgagcagccagaggggcaaggtgttcaagctgagaaatgagacccaccacctgtttgtgggcctgtacccaggcaccacctacagcttcaccatcaaggccagcacagccaagggcttcggcccccctgtgaccacccgcatcgccaccaagatcagcgcccccagcatgccagaatatgacacagacacccccctgaatgaaacagacaccaccatcaccgtgatgctgaagccagcccagagcagaggagcccctgtgtctgtgtaccagctggtggtgaaggaggagcggctgcagaagagcagaagagctgctgacatcatcgagtgcttctctgtgcctgtgtcctacagaaatgccagcagcctggacagcctgcactactttgctgctgagctgaagccagccaacctgcctgtgacccagcccttcaccgtgggggacaacaagacctacaacggctactggaacccccccctgagccccctgaagagctacagcatctacttccaggccctgagcaaggccaacggggagaccaagatcaactgtgtgcggctggccaccaagggggccagcacccagaacagcaacacagtggagcctgagaagcaggtggacaacacagtgaagatggccggcgtgattgctggcctgctgatgttcatcatcatcctgctgggcgtgatgctgaccatcaagaggaggaagctggccaagaagcagaaggagacccagagcggggcccagcgggagatgggccctgtggccagcgctgacaagcccaccaccaagctgagcgccagcagaaatgatgagggcttcagcagcagcagccaggatgtgaatggcttcacagatggcagcagaggagagctgagccagcccaccctgaccatccagacccacccctaccgcacctgtgaccctgtggagatgagctacccccgggaccagttccagcctgccatccgggtggccgacctgctgcagcacatcacccagatgaagaggggccagggctacggcttcaaggaggagtatgaggccctgcctgagggccagacagcctcctgggacacagccaaggaggatgaaaatagaaacaagaacagatatggcaacatcatctcctatgaccacagccgggtgcggctgctggtgctggatggagacccccacagcgactacatcaatgccaactacattgatggctaccaccggcccaggcactacatcgccacccagggccccatgcaggagaccgtgaaggacttctggaggatgatctggcaggagaacagcgccagcatcgtgatggtgaccaacctggtggaggtgggccgggtgaagtgtgtgcgctactggccagatgacacagaggtgtatggagacatcaaggtgaccctcatcgagacagagcccctggccgagtatgtgatccgcaccttcaccgtgcagaagaagggctaccacgagatccgggagctgcggctcttccacttcacctcctggccagaccatggagtgccctgctacgccaccggcctgctgggctttgtgcggcaggtgaagttcctgaaccccccagaggccggccccatcgtggtgcactgcagcgctggggccggccgcacaggctgcttcatcgccatcgacaccatgctggacatggctgaaaatgaaggagtggtggacatcttcaactgtgtgcgggagctgcgggcccagagggtgaacctggtgcagacagaggagcagtatgtgtttgtgcatgatgccatcctggaggcctgcctgtgtggcaacacagccatccctgtgtgtgagttccgcagcctgtactacaacatcagccggctggacccccagaccaacagcagccagatcaaggatgagttccagaccctgaacatcgtgaccccccgggtgcggcctgaggactgcagcatcggcctgctgcccagaaatcatgacaagaacagatccatggatgtgctgcccctggaccgctgcctgcccttcctgatctctgtggatggagagagcagcaactacatcaatgctgccctgatggacagccacaagcagcctgctgcctttgtggtgacccagcaccccctgcccaacacagtggccgacttctggaggctggtgtttgactacaactgcagctctgtggtgatgctgaatgagatggacacagcccagttctgcatgcagtactggccagagaagaccagcggctgctacggccccatccaggtggagtttgtgtctgctgacattgatgaggacatcatccaccgcatcttccgcatctgcaacatggcccggccccaggacggctacagaattgtgcagcacctgcagtacatcggctggccagcctacagagacaccccacccagcaagaggagcctgctgaaggtggtgcggcggctggagaagtggcaggagcagtatgatggccgggagggccgcacagtggtgcactgcctgaatggaggcggccgcagcggcaccttctgtgccatctgcagcgtgtgtgagatgatccagcagcagaacatcattgatgtgttccacatcgtgaagaccctgaggaacaacaagagcaacatggtggagaccctggagcagtacaagtttgtgtatgaggtggccctggagtacctgagcagcttctag

SEQ ID NO: 321133 - DNA, 4296 bp, Artificial Sequence
  derived and/or modified sequence
atggccagcctggccgccctggccctgagcctgctgctgcggctgcagctgccgccactgcccggagctagagctcagtccgctgctggcggttgctctttcgacgaacattactcaaactgcgggtacagcgttgctctgggtaccaatgggtttacctgggagcagattaatacgtgggagaagccaatgttagatcaggccgttccgaccggatcattcatgatggtgaattcttccggaagggcgagcggccagaaggctcacctgctcctcccaaccctgaaggaaaacgatacgcactgtatcgattttcactactacttctcctcccgcgatcggtccagtcctggcgcactcaacgtttacgtgaaagttaatggcggtccacagggcaacccagtttggaatgtatcaggcgttgtcacagaaggatgggtgaaggcagaactcgcgatcagtaccttctggccccatttctaccaggtgatttttgaatccgtatcgctaaaaggtcatcctggttacatcgctgtggatgaagtcagggtactagctcacccatgtcgcaaggccccacacttcctccgattacaaaacgtagaggtaaatgttggccagaacgctactttccagtgcattgccggcggaaagtggtcccagcatgataaactatggttgcagcagtggaatggtcgagacacagcgctcatggtcacacgggtcgtcaatcaccggcgattctcggctactgtgtctgtggcagacacagcacagcgatccgtgtcaaaatataggtgtgttatcaggagtgacggcggaagcggagtcagtaactacgccgagcttattgtgaaggagccacctactccaattgcccccccggagttactcgccgtaggagccacctatctctggattaaaccaaacgccaattccattattggcgatggaccgatcatcctcaaggaagtagaatatagaactactacaggtacctgggccgaaactcacattgttgattcgcccaattacaagttatggcatctggaccccgacgtggagtacgagattcgtgttctccttaccagacctggcgagggaggcactggtcctcctgggcccccacttactactcgtacaaaatgtgctgacccagtccacgggccacagaatgtcgaaatagtggatatcagggcaaggcagctcactctgcagtgggaaccgtttgggtacgcggtgactcgctgtcattcctataacttaaccgtgcaataccagtacgtttttaaccaacagcagtacgaggccgaggaggttatccagacatctagtcattataccttgagaggcttgcgcccattcatgaccatccggctgcgtctgcttttatccaatccggagggacgcatggaatcagaggagcttgtagtgcagaccgaggaggacgtgcccggggctgtgccactcgaaagtatacagggagggccttttgaagagaagatttatatccagtggaagcctccaaatgaaactaacggagtcattaccttatacgaaattaattataaagcagtcggtagtctggatccaagtgcggatctgtcctcacaaagaggcaaggtatttaagttacgtaatgaaacacaccacttgtttgtgggcttgtaccccggaacaacctatagcttcaccattaaggctagcaccgcaaaggggtttggaccacctgtaactacgaggatagccactaagattagcgcacccagtatgcccgaatacgacaccgatacacctctgaatgagactgacacaacaatcacagttatgctcaagcccgcccagtcccgtggggctcctgtttctgtgtaccaactagtggttaaagaggagagactgcagaagagccggagggcggccgacataatcgagtgctttagcgtcccggtctcttatcgcaacgccagcagtctagatagtcttcactatttcgctgctgaattaaaacccgccaaccttccggtaacccagccgtttaccgtgggggacaataagacttacaatggatactggaatccccctctgtcaccactcaagtcgtatagcatctattttcaggcactgagtaaagccaacggggagacaaagatcaactgtgtgcggctagctacgaagggagcctctactcaaaattccaataccgtggaacccgaaaagcaggtcgacaacaccgtgaagatggcgggagtcatagccggcctgctgatgttcattataatccttctcggggtgatgttaacaatcaaacggcgcaaattggctaagaagcagaaggaaacgcagtcgggcgcacaacgcgagatgggccccgtcgccagcgcagacaaaccaacaacaaagctgtccgcaagtagaaatgatgaaggtttcagtagcagctcccaagacgttaacggattcacagatgggagtagaggcgagttgagtcagcccactctgacaattcaaacccacccataccgcacatgtgaccccgttgagatgtcttatcctagggaccagttccagccagccattagggtggccgatcttctgcagcacataactcagatgaagaggggtcaggggtacggattcaaggaggagtatgaagcactgcccgagggccaaaccgcaagttgggacacagccaaagaggatgaaaatcggaataaaaatcgttacggaaatataatatcgtacgatcattccagagtgcgattgcttgttttggacggagacccccatagtgactatataaatgccaattacatcgacggctaccaccgcccaagacattatattgccacacagggacccatgcaggagaccgtgaaagatttttggagaatgatttggcaggaaaatagcgcatccatcgtaatggtcacaaatctggtagaagttggccgggtgaagtgtgttcggtactggccagacgataccgaggtctatggagacataaaggtgacactgatcgaaacagagcccctggcagagtacgtgatacgaactttcactgtacagaagaagggttaccatgaaattcgtgagcttcgtctgttccattttacaagctggcctgaccacggagtaccatgttatgccacaggtctgctcggtttcgtccgccaggtgaaattcctgaatcccccagaggctgggccaatcgtggttcactgcagtgcaggcgctggccggacgggatgcttcatcgccatcgacacgatgcttgatatggccgaaaacgagggggtcgtggatattttcaactgtgttcgagaactgcgcgcacagagggtgaacctcgtccagacggaggaacagtacgtgtttgtacatgacgctatcttggaggcctgcctctgcggtaacacagccatccctgtttgtgagtttcggtctctgtattataatatctcacgcctcgacccccagaccaactcttcccagatcaaagacgaattccagaccctcaatattgttacccccagggtgcggccagaggattgttccattggcttactgcctaggaaccatgataagaacagaagcatggacgtgctcccacttgataggtgcctgccatttctaatttctgtagacggcgaaagctctaattatataaacgccgccctgatggatagccacaaacagccggccgccttcgtggtgactcaacaccccctgcctaacactgtcgccgacttttggcgacttgtttttgactataattgttcttccgtggtgatgctgaacgaaatggatacggcacagttctgcatgcagtattggcccgagaagacctcgggttgctacggccccattcaggtggaatttgttagtgctgacatcgatgaggacatcatccataggattttccgaatctgcaatatggctcgcccacaggacggctataggatcgtgcaacacctgcagtacatcggctggcctgcctatagggatactcccccctcaaagaggtcattgttaaaggtggtgcggcgtttggagaagtggcaggagcaatacgacggccgggaaggtagaaccgtggtccactgcctgaacggaggcgggcggagtggtacattttgtgccatttgttccgtttgtgaaatgatccagcagcaaaacatcatcgacgtgtttcacatagttaaaaccctgcggaataataagagcaacatggtggaaactctcgaacaatacaaattcgtgtacgaggttgccttggagtatttgagttcgttctag

SEQ ID NO: 321134 - DNA, 12660 bp, Artificial Sequence
  derived and/or modified sequence
gttaggactcgggggacaccgccccccgccccccgcgtcccgcccccgcccagcctcccgcctcagttcgcgccgcgcctcggcttggaacgcaggagcgccggctccgggagcccgagcggagccagccgcgcgcacagccagcggccgcgccggcgatgcggggccaccccgcgcccgccccagtcccggccccggcccccgcgggaaggggctgagctgcccgccgccgcccggatggcgagcctcgccgcgctcgccctcagcctgctcctgaggctgcagctgccgccactgcccggcgcccgggctcagagcgccgcaggtggctgttcctttgatgagcactacagcaactgtggttatagtgtggctctagggaccaatgggttcacctgggagcagattaacacatgggagaaaccaatgctggaccaggcagtgcccacaggatctttcatgatggtgaacagctctgggagagcctctggccagaaggcccaccttctcctgccaaccctgaaggagaatgacacccactgcatcgacttccattactacttctccagccgtgacaggtccagcccaggggccttgaacgtctacgtgaaggtgaatggtggcccccaagggaaccctgtgtggaatgtgtccggggtcgtcactgagggctgggtgaaggcagagctcgccatcagcactttctggccacatttctatcaggtgatatttgaatccgtctcattgaagggtcatcctggctacatcgccgtggacgaggtccgggtccttgctcatccatgcagaaaagcacctcattttctgcgactccaaaacgtggaggtgaatgtggggcagaatgccacatttcagtgcattgctggtgggaagtggtctcagcatgacaagctttggctccagcaatggaatggcagggacacggccctgatggtcacccgtgtggtcaaccacaggcgcttctcagccacagtcagtgtggcagacactgcccagcggagcgtcagcaagtaccgctgtgtgatccgctctgatggtgggtctggtgtgtccaactacgcggagctgatcgtgaaagagcctcccacgcccattgctcccccagagctgctggctgtgggggccacatacctgtggatcaagccaaatgccaactccatcatcggggatggccccatcatcctgaaggaagtggaatatcgcaccaccacaggcacgtgggcagagacccacatagtcgactctcccaactataagctgtggcatctggaccccgatgttgagtatgagatccgagtgctcctcacacgaccaggtgaggggggtacgggaccgccagggcctcccctcaccaccaggaccaagtgtgcagatccggtacatggcccacagaacgtggaaatcgtagacatcagagcccggcagctgaccctgcagtgggagcccttcggctacgcggtgacccgctgccatagctacaacctcaccgtgcagtaccagtatgtgttcaaccagcagcagtacgaggccgaggaggtcatccagacctcctcccactacaccctgcgaggcctgcgccccttcatgaccatccggctgcgactcttgctgtctaaccccgagggccgaatggagagcgaggagctggtggtgcagactgaggaagacgttccaggagctgttcctctagaatccatccaaggggggccctttgaggagaagatctacatccagtggaaacctcccaatgagaccaatggggtcatcacgctctacgagatcaactacaaggctgtcggctcgctggacccaagtgctgacctctcgagccagagggggaaagtgttcaagctccggaatgaaacccaccacctctttgtgggtctgtacccagggaccacctattccttcaccatcaaggccagcacagcaaagggctttgggccccctgtcaccactcggattgccaccaaaatttcagctccatccatgcctgagtacgacacagacaccccattgaatgagacagacacgaccatcacagtgatgctgaaacccgctcagtcccggggagctcctgtcagtgtttatcagctggttgtcaaggaggagcgacttcagaagtcacggagggcagctgacattattgagtgcttttcggtgcccgtgagctatcggaatgcctccagcctcgattctctacactactttgctgctgagttgaagcctgccaacctgcctgtcacccagccatttacagtgggtgacaataagacatacaatggctactggaaccctcctctctctcccctgaaaagctacagcatctacttccaggcactcagcaaagccaatggagagaccaaaatcaactgtgttcgtctggctacaaaaggtgcctccacccagaattctaacactgtggagccagagaagcaggtggacaacaccgtgaagatggctggcgtgatcgctggcctcctcatgttcatcatcattctcctgggcgtgatgctcaccatcaaaaggaggaagctggccaagaagcagaaggagacccagagtggagcccagagggagatggggcctgtggcctctgccgacaaacccaccaccaagctcagcgccagccgcaatgatgaaggcttctcttctagttctcaggacgtcaacggattcacagatggcagccgcggggagctttcccagcccaccctcacgatccagactcatccctaccgcacctgtgaccctgtggagatgagctacccccgggaccagttccaacccgccatccgggtggctgacttgctgcagcacatcacgcagatgaagagaggccagggctacgggttcaaggaggaatacgaggccttaccagaggggcagacagcttcgtgggacacagccaaggaggatgaaaaccgcaataagaatcgatatgggaacatcatatcctacgaccattcccgggtgaggctgctggtgctggatggagacccgcactctgactacatcaatgccaactacattgacggataccatcgacctcggcactacattgcgactcaaggtccgatgcaggagactgtaaaggacttttggagaatgatctggcaggagaactccgccagcatcgtcatggtcacaaacctggtggaagtgggcagggtgaaatgtgtgcgatactggccagatgacacggaggtctacggagacattaaagtcaccctgattgaaacagagcccctggcagaatacgtcatacgcaccttcacagtccagaagaaaggctaccatgagatccgggagctccgcctcttccacttcaccagctggcctgaccacggcgttccctgctatgccactggccttctgggcttcgtccgccaggtcaagttcctcaaccccccggaagctgggcccatagtggtccactgcagtgctggggctgggcggactggctgcttcattgccattgacaccatgcttgacatggccgagaatgaaggggtggtggacatcttcaactgcgtgcgtgagctccgggcccaaagggtcaacctggtacagacagaggagcaatatgtgtttgtgcacgatgccatcctggaagcgtgcctctgtggcaacactgccatccctgtgtgtgagttccgttctctctactacaatatcagcaggctggacccccagacaaactccagccaaatcaaagatgaatttcagaccctcaacattgtgacaccccgtgtgcggcccgaggactgcagcattgggctcctgccccggaaccatgataagaatcgaagtatggacgtgctgcctctggaccgctgcctgcccttccttatctcagtggacggagaatccagcaattacatcaacgcagcactgatggatagccacaagcagcctgccgccttcgtggtcacccagcaccctctacccaacaccgtggcagacttctggaggctggtgttcgattacaactgctcctctgtggtgatgctgaatgagatggacactgcccagttctgtatgcagtactggcctgagaagacctccgggtgctatgggcccatccaggtggagttcgtctccgcagacatcgacgaggacatcatccacagaatattccgcatctgtaacatggcccggccacaggatggttatcgtatagtccagcacctccagtacattggctggcctgcctaccgggacacgcccccctccaagcgctctctgctcaaagtggtccgacgactggagaagtggcaggagcagtatgacgggagggagggacgtactgtggtccactgcctaaatgggggaggccgtagtggaaccttctgtgccatctgcagtgtgtgtgagatgatccagcagcaaaacatcattgacgtgttccacatcgtgaaaacactgcgtaacaacaaatccaacatggtggagaccctggaacagtataaatttgtatacgaggtggcactggaatatttaagctccttttagctcaatgggatggggaacctgccggagtccagaggctgctgtgaccaagcccccttttgtgtgaatggcagtaactgggctcaggagctctgaggtggcaccctgcctgactccaaggagaagactggtggccctgtgttccacggggggctctgcaccttctgaggggtctcctgttgccgtgggagatgctgctccaaaaggcccaggcttccttttcaacctaaccagccacagccaagggcccaagcagaagtacacccacaagcaaggccttggatttctggctcccagaccacctgcttttgttctgagtttgtggatctcttggcaagccaactgtgcaggtgctggggagtgggaggctcccctgccctccttctccttaggagtggaggagatgtgtgttctgctcctctacgtcatggaaaagattgaggctcttgggggtcactgctctgctgccccctgcaacctccttcaggggcctctggcaccagacatttgcagtctggaccagtgtgaccttacgatgttccctaggccacaagagaggccccccatcctcacacctaacctgcatggggcttcgcccacaaccattctgtaccccttccccagcctgggccttgaccgtccagcattcactggccggccagctgtgtccacagcagtttttgataaaggtgttctttgcttttttgtgtggtcagtgggagggggtggaactgcagggaacttctctgctcctccttgtctttgtaaaaagggaccacctccctggggcagggcttgggctgacctgtaggatgtaacccctgtgtttctttggtggtagctttctttggaagagacaaacaagataagatttgattattttccaaagtgtatgtgaaaagaaactttcttttggagggtgtaaaatcttagtctcttatgtcaaaaagaagggggcgggggagtttgagtatgtacctctaagacaaatctctcgggccttttattttttcctggcaatgtccttaaaagctcccaccctgggacagcatgccactgagcaaggagagatgggtgagcctgaagatggtccctttggtttctggggcaaatagagcaccagctttgtgcataatttggatgtccaaatttgaactccttcctaaagaaacccagcagccaccttgaaaaaggccattgtggagcccattatactttgatttaaaataggccaagagaatcaggcctggagatctagggtcttgtccaaagtgtgagtgagtcaatgagagggaaccaacatttgctaagtctctactgtatgccagggatcatgcttggcactttccataggacatttcacacagtccttagaacccccaggagagagctactgacttgttatcatctccatttgatcatctcctccaatgaggaaacccacgcaccttccttagtaatgaaatcctgggttccaaaggggcaggtaatggcaatgagacttctccgtgctgttttcttcatcttctctaagccaagcaattattttatggagggaaaataaggccagaaacttctgagcagataactccacaaatggaaatttagtactttcttcctgatgccagttcttctgggaagcgcagaatttcagatatattttagtaacacattcccagctccccaggaaagccagtctcatctaatttcttagtcagtaaaaacaattccctgttccttcaggctatgaatggaccagccagggaaactctcgaccttgatctctagccagtgcttaggcccaatatctgacagcctcaggtgggctgggacctaggaagctccatcttgaaggctggtctagccccagacagggcatgaggggcagagaattcaagaaggtacagctttggccctcaagagcccactgtatgctggggaaatggaaccatggtgcagtagtgtggagtggatgagtgttccatgagcctaggagcaagaaagtctcttcggcctcgggcttcctggagaaggggacgtccattcctgctgggtcttaacaagcataaaaaggaaaaaaaggaaactcaggcaaagggatccatatgtgcaatggcaaagaaatgtgaaaaggcattgggagaagcagtctgggggaggccagcccagtgcgggcacagcacaacacggggagcagcaagagatgagccagggtccaggagacagatgcccatcgcgagtacagactttgtcctattggcaacaaggagtccatggagctttagagagatgcactcagcttcgtgttggccaagactccttctgggccaatggggctgcctcttttcctttcatcagacactgtgaaaacattcccttaagcgtgcactttttaatatcacatctatttgtctgtctgctcattgttttgttgctggaactaaatatgcaatggatcatgagactcagattctatgagaaacccagggtctctgctttaccacggagcagggtcaccaacccagatctccaggcccatgaggatggaacatgaaaggagccgacaaaagttgcttccattggcatgggctctggagctgtccagaagtccagggacaccagacttgatcaaggaagggctgtcactttagaggttcaaaaggaagtgcctcaaagcaaaggcaagcaaaggaaccccacgatgaacttgctcttttcctttgatgagcctctccccaggtgtatttcagcagaccccggggacccacccccactgggcctgctggcctccctcggctccagcccaatgccccagctggccttccccagcctgcaaggagcctgtagcatggcaaatctgcctgctgtatgctattttcttagatcttggtacatccagacaggatgagggtggagggagagctatttaacacaaatcctaagatttttttctgctcaggaaggggtgaaatagctggcagatacaaaagacagtggcttttatcattttaaatggtaggaatttaaggtgtgacttcagggagaaacaaacttgcaaaaaaaaaaaatctcaggccatgttggggtaacccagcaagggccagtgatgatttcccccagctcatccccttattttcccacaacccaaccattctctaaagcaggacagtgaataggtcttaggccagtgcacacaggaagaaattgaggcttatggatggggatgacttccctaagatcccatgggacaaggatgtggcaaggcttggatgagatggggcaccagtgcccaggaatttgaacattttcctttacccaggaaatctccggagccaacaccaccacccccagggggtctccccaccccaccccatttacagggtgagctcagcctgtcatgagcagaggaaaatattattaatgctctctgagtctttacaacaggagctcttacctcatagatgtgggctctgtttggggaagatgcaaggaagtaatgagaagcccaggaaatttctccacctgtgtttatggcctaaatagcttcaggatgtatcttagctgcactccaacattgcatcctttctggggtgaagaatctgggccaaccaggggtccttgggcctctagaaggccacagtaggcctctctttgtgggaatggaaggggacagtttgcttttagtgctggccctctctgtgggtgtggcctgcaaaggaaccaacagaccctatgctggggactctaacatgtgagctcattaaattcttccagcattctaaaggagggtttgtgattgtcaccatttactgatgaggaaactaaggctcctaggggagaaatcacttgcccacagttccacagctagtgagtgaatgaaccaggatttaaaccggttttttctcactacagagacaatatttttccaccattgtatctcacatttttcccaggaggttacccataacagaagagactagagtggaacagatacgtcagtggataaagctcaaagcaaacaacagtaagcttaaaattccttcatagtctcatgttttacgttcacaattcatgcaaaatttgcattccactttctgatttagccttgttggttttaatatgactctatgaatatttcaaaaaaaaatgtgctctgttcctcatgttgttctgttctgttcaccccgctatgacggaccctaggtcagctggtcttcagcttgaccctagaattgactctaggagcagtgaccctgctgcctcccagagccagttataggctcaagatcaagaccaactgaccttctcctaggcagctcctttggtgtgtgggtgctctgacctcactgttcatgaggggacctcaactaaggcatcttccagttgggtgctggaaggaacccattaactcacactagaatgatgaggatttgctcatctggcgtggagaaggatgagcccacaaaaccctaaagggaaaagagaagctggacacagctgtactcagcagattcctgaatgctaggctggaaagtggtgcctgttgtccaagtggagtcacatggttgctaatgtgggcaagtctgaggacacacttcatgagcagctggggtctggaaggctcctcactttaccctagccacacataattactgggtgcctacagcacctagcaccttggagggggcactattaggaaatcgagattactatggcacaattaattcctgggtaaggcatggggttgtggtggacagagctcagtctttagtttgaacgaaaacatacatacatgaaaaacatacatgaaaaaaggaccctcatcaacattagaaggggtagatttggagcactttaggcaggaaaacaggaacgcaaggccaggaaactggaacccagtgaatactcagaaccgaggatgcagatgacttatttagcaaaatggtcacttctgtgacatagctggagaaaggatgggtaacagcttgccagagccacttggaacaagggcaaatctcagtgtctggggcaaaagatgatgcatttccctctgacccatcatgtttattcatcctccactccccattgccacactagctcttgctgtaagtcctcaccaggatctacatttcctcgtcgctggtgggaaccccttagagtacatagaggtatcagtccagtaagactgctctacacaacagaagtgaggcccagggagtagcagccaggcccttatcctgttacctctgcaggagtgactgcccaacccagatccagagacattgaaggaaatgataattccttggtacctcactgccttgggacaaaatgaagaaagccacccttccttaggctgcagcttgccactcctgggctgggtaaacaggtcatcagcaccaagctcaaccaggagtaacactctggaagacatgggtgagcccaagaggaagcatgaacaggacgctgttcctaagtcatgtcaacaggttgtgctgggccaggatccccagggaaaaaaatggtcaacccaactggagggtaggttagaagaaaaaaaacataaacgtggatagtcatgtcatctcaaatccctgacttggcttccccattacttaacagtctgagctccttcttagcctgtgaccagcttcaaatcacagccaagtaaaacaaggaaataggaaaagtaaatccaactagaagagacaagctgagattcagatttgtttactcctcccatgcaaagtttccctgttggaggttttccatgtatacatgtctagaagtgatagaatgcaaggccttggctttgtcttgcagggatctgcctttgaggtcatagactgaacagcagggagagaggttagtggtggagtgtggggggagctgttctagctccagtttcttctgacacatttttcaggatcatggatctgatcctccgaagcacagcagagatatctaagccatatttgtgcacatgagcagactcttctagttttttagtaaccagggatgggcttttgcatggcactgactatagagatgtcttgtagagatcaagccagtcttttgcatcccacctgcccacctccagaagagatgggaaaaggtcatcaaagggcattcaccaactgaaatccactcatgaatgttaggtctctaaaaggaggcatcaacactcacaatggtagcctccaaacctagcatcccacctatctaagagctcaggggtggtccactggggcagatacaagggaagtgcaagggctcaggatgaaagaaaatctattgggaagagttttaggggcttgatcattatggggcttccttctatatctgagaactgctctgggtggtgagatgtggactctgatccttaattggaatgttcggagaatgagtgtctggtggccttgaagtgttggacagaaaagtatcagtataaaagcctggagctcagggtaattaatgtagttcatggttccttagtgagcaggactcttggatgtggaggagaaagggtcataggaagtaaaccaccaaaattacaaaattgagtctctgtacaattacttcagtgcctttgggcttatgaatacaaatcagtgggccttctctatgatggtccaacaaactctcagtgtccaccctgtccctgtatctcccatggaagatgaataatgtcaggtgttctttgggtcaaaggccccagggcagtctggaggcttagagggcagagtggtgtcattccatgtaaagttaggcttctgaggggtcaggcagaatatggtgtccatatcttccatagctctgcagattcttggatgaagtcaagcacagtttgctagacccaggtcactcctctgagtataactaggacccatgagtgaaacttaatagctgtaaggaagaacctgctgtctgccagagaggataagctgcccatctcagcagctgtctaaaagaaggcaggtgtctctttaaagggaagagaagcattggtgaaatggatttcaggtcacttccattccagatgggtgagatcttgtggagctgggatcatgtttgaactcattcatacctgtagagcacgaatccaagtagattgtgtttggtctgtacaggctgaagccccctgctctcccacccaagtgcccccactgagcaggccaacatgctgttgtggccacatatactgggctgatccaggctggttatcaccaaacagcaaaccatagggaacagctgctttgccatagacccaatacccatgtagatctctcatgagagcagccataactcagacccactgaccaacagggccatgagtgacagccagaaccagtgaaggtccaagtaggacacagagcagggcttttcttaccatacacattatctccagaggttatttctaccccactccctattcaaggcctgttggagcacactgcaaaagcaaaagcacagtaactcaatttacacatgattataatcatttccagtgcacacatttcatcaccaggtggatcctgagctagcccatgtaaatccgggttaacccatattggtaatcatactcaaaagcacttttcaccctacattctactagccaatcaaagacaaagagttgtggcctctaccattgccttggcttctggacaccctcacaagctatcccaaggttcccgctcaactccagggaggctgacatcttcacatccactgggcatataatattgcatgagaccaaagtctccacactctttgcagcctcctccatgaatcccaatggcctgcacttgtacagtttgggtgtttgatagataaagcacgtatgagaagagaaaacaaaataaatcaactttttaaaaaagccagcactgtgctgtcaatgttttttttttcttttcaattctagctcagaaaagcagaaggtaaataatgtcaggtcaatgaatatcagatatattttttgactgtacattacagtgaagtgtaatctttttacacctgcaagtccatcttatttattcttgtaaatgttccctgacaatgtttgtaacatggctgtgttaaaaaatctatacaataaagctgtgaccctgagattcatgttttcctaagata

SEQ ID NO: 321135 - DNA, 4296 bp, Artificial Sequence
  derived and/or modified sequence
atggccagtctggcagccctggctctgtcactgcttcttcgtcttcaattgcccccactgccaggcgcacgagcgcagtctgccgcagggggatgctcttttgatgagcactacagtaattgtggctacagtgtggctttgggcaccaatggtttcacttgggagcaaattaacacatgggaaaagcccatgctggatcaggcagtccctaccggcagcttcatgatggtgaactcctcggggcgagccagcgggcaaaaggcccacctcctcctgccgacattaaaggagaatgatacacactgcatcgattttcactactatttttcatccagagaccgcagtagccccggagctttaaacgtgtacgtgaaagtcaacggtggcccacagggaaaccctgtgtggaacgtatctggtgtcgtgactgagggatgggtgaaggcagagctcgcaatctccactttctggccccatttttatcaggtgatctttgagagcgtatctctgaaaggccatcccggttatatcgcagtcgacgaagttcgggtacttgcgcatccatgcaggaaagctccccacttcttgcgcttgcagaacgtggaggtgaatgtcggccagaatgcgacgtttcaatgcatcgcaggcggtaagtggtcccaacatgacaaactttggttacaacagtggaatggacgcgacactgccctgatggtaacacgagtggtgaatcatcgccgtttctcagcaaccgtaagcgtagcggataccgctcagaggagtgtaagcaaataccggtgcgtcattcgctccgatggtggcagtggcgtcagcaactatgctgagctcattgttaaggagcccccaactcctatcgccccacctgaattgttggcagtgggtgcaacatacctatggatcaaacccaatgccaactctatcatcggtgacggcccaatcatactcaaggaggttgaatatagaacgacgacgggcacttgggccgaaacgcacattgtcgattccccaaactataaactgtggcacctggaccctgacgtggagtacgaaattagggtgctgttgacccgcccaggtgaggggggtacagggcctcctggtcccccactgaccacccgaactaaatgtgcagatccggtccacggccctcagaatgttgaaatcgtcgacattcgggcacggcagttaactctgcaatgggagccatttgggtacgcagtgacgagatgtcactcctataacttgaccgtacaatatcagtatgtcttcaatcaacagcagtacgaagccgaggaggtgatacagacatcgtcacattacaccctaaggggactgcggccattcatgacgatccgtctaaggctgttgttgagcaatccggaaggaagaatggaatcggaagagctcgtcgtgcaaacggaggaagacgtcccaggggcagtgccgctagaatccatccaaggtggtccattcgaggaaaagatctacatccagtggaagccgccaaacgaaaccaacggtgtcattactctatacgagatcaattacaaagctgtggggtcattagatccgtctgccgatctgagctcccagaggggcaaagtcttcaaattacgtaacgagactcaccacctttttgtaggattgtaccctggcacgacatatagctttacaatcaaggccagtaccgccaagggctttggccctcccgtgacaacacggattgccacgaaaatcagtgcgccaagcatgccggaatatgatacggacacccccctaaatgagacagatactaccataaccgtgatgctgaagcccgcacagagtcgtggggctccagtatctgtatatcaattggtggtgaaggaagaacgcctgcagaagtcccgaagagccgctgatatcatcgagtgttttagtgtgcccgtgagctaccgtaacgcttcttcattggattcattacactactttgctgcagagcttaagccggctaaccttccagtcacccagccttttacggtgggcgataacaaaacctacaacgggtactggaaccccccactcagtccactcaagtcttattcaatttacttccaggctctttcaaaggccaatggagaaaccaagattaattgtgttagattggccaccaagggagcctccacgcagaactccaacacggtggagcccgagaagcaggtggacaacaccgttaagatggctggagtgatcgcagggctgcttatgttcattataattctgcttggcgtcatgctgaccatcaagcggcgaaagttagctaagaaacagaaagaaacacaaagcggcgctcagcgcgagatgggcccagtggctagcgctgacaaacccaccaccaaactgagtgccagcaggaatgacgaaggatttagcagctcctcccaggacgtaaatgggttcacagatggatctcgcggtgaactctcccagccaactttaaccattcagacacatccgtacaggacttgcgaccccgtcgagatgtcttatccaagggatcaattccagcctgctatccgcgtcgccgacttgctgcaacacatcacacagatgaagcgcggacagggatacggctttaaggaagagtacgaggcattgcccgagggacagacagccagttgggacaccgctaaggaagatgagaacaggaataaaaaccggtatggaaacatcatttcatatgaccattcaagagtgcgactcttggtgctggatggggatccgcactctgactatattaatgcaaattacattgacggataccaccggccacggcactatatcgctactcaggggccaatgcaggagaccgtcaaagacttctggagaatgatatggcaggaaaacagcgcctcgattgtcatggtgacgaatctggttgaagtcgggagagtaaaatgtgtcagatattggcccgacgataccgaagtctacggagatattaaagtaaccctgattgaaaccgaaccactcgcggagtacgtcattcgcacattcactgttcagaaaaaagggtaccacgagatcagagaactgcggttatttcatttcacatcctggcccgaccacggagtgccgtgctacgctaccgggcttttgggctttgtgaggcaagtgaaattcttgaacccccctgaggctggccctatcgtcgtgcactgtagcgctggagccggtcggaccggatgtttcattgcgatagacactatgctggacatggcagagaacgaaggagttgttgatatattcaattgtgtgcgagaacttcgggctcagagggtgaaccttgttcagacagaggaacagtatgtcttcgtgcatgatgcaattcttgaggcatgcctgtgcggtaacaccgctatcccagtgtgcgagtttcgtagcttatactataacatttcacgcctcgatccccagacgaacagtagccagatcaaggacgaatttcagacgctgaatattgtgactccgagggtgagacctgaagattgctccatcggcctactgccaaggaatcacgataaaaatcggtccatggacgtgctacccctggacagatgtttaccatttctaattagcgtcgatggtgaatctagcaattacatcaacgcggcacttatggattctcacaaacagcccgcagcctttgtggtaacgcagcacccactgcccaacaccgtggccgacttctggagattagtcttcgattataactgctcttccgtggtcatgctgaacgagatggacaccgcacagttttgcatgcaatattggccagagaaaacttctggatgctatgggcctattcaagtggagtttgtaagtgcggatatagacgaagacataattcatagaatattccggatatgtaatatggccaggccccaagacggatataggatagtccagcatctgcaatatattggctggccagcatacagagatacacctccttccaaaaggagcttgctcaaggtcgtcagacggctagagaaatggcaggagcagtatgatggacgggaggggaggactgtggtgcattgccttaacggcggtggcagatcagggactttctgtgctatatgttccgtctgcgaaatgatccaacagcaaaatattatagacgtgttccatatcgtgaagacactgcgcaataacaagtcaaatatggtggagacccttgagcagtacaagttcgtttacgaagtcgctctggaatacctctcctcgttctaa

SEQ ID NO: 321136 - protein, 339 aa, Artificial Sequence
  derived and/or modified sequence
METRSPGLNNMKPQSLQLVLEEQVLALQQQMAENQAASWRKLKNSQEAQQRQATLVRKLQAKVLQYRSWCQELEKRLEATGGPIPQRWENVEEPNLDELLVRLEEEQQRCESLAEVNTQLRLHMEKADVVNKALREDVEKLTVDWSRARDELMRKESQWQMEQEFFKGYLKGEHGRLLSLWREVVTFRRHFLEMKSATDRDLMELKAEHVRLSGSLLTCCLRLTVGAQSREPNGSGRMDGREPAQLLLLLAKTQELEKEAHERSQELIQLKSQGDLEKAELQDRVTELSALLTQSQKQNEDYEKMIKALRETVEILVHDPLLWKGVGRGLVGSLCFMDR

SEQ ID NO: 321137 - protein, 164 aa, Artificial Sequence
  derived and/or modified sequence
METRSPGLNNMKPQSLQLVLEEQVLALQQQMAENQAASWRKLKNSQEAQQRQATLVRKLQAKVLQYRSWCQELEKRLEATGGPIPQRWENVEEPNLDELLVRLEEEQQRCESLAEVNTQLRLHMEKADVVNKALREDVEKLTVDWSRARDELMRKESQWQMEQE

SEQ ID NO: 321138 - DNA, 1020 bp, Artificial Sequence
  derived and/or modified sequence
atggagactcggtccccaggccttaacaacatgaaaccacagtctctgcagcttgtgctggaagaacaggtcttagcactgcaacagcaaatggccgaaaatcaggcagcctcatggcgcaaactgaaaaatagccaggaggctcagcagcggcaagctacactcgtgcggaagctgcaggctaaggtgctacaatatagaagctggtgccaagagcttgagaaacgcctggaagccacgggcggaccgatcccccagcgctgggaaaatgtggaagaacccaacctcgatgaactgttggtgcgcctggaagaggagcagcaacgctgcgaatctctggccgaagtgaacactcagctaagattacacatggaaaaggctgacgtagtgaacaaggcgctcagggaagacgtggagaagctaactgtggattggtctcgggccagagatgagctcatgcgcaaggaatctcagtggcagatggagcaagaattcttcaagggatatttaaaaggcgagcatggtcggcttctcagcctctggcgggaggtggtaacgttccgtaggcacttcctggaaatgaaatcagcaaccgaccgcgacctcatggaattaaaggctgagcacgtgagactttctggctcattgttgacatgttgtcttaggctcacagttggagcacagagccgtgagccgaatggctcaggaaggatggacgggcgagaacccgctcaactcctgcttttgctcgctaaaacacaagagctagagaaggaggcccacgagcggagccaggagttgattcaacttaaatcccagggagatctcgagaaagccgagttgcaggatagagtgacagagctgtctgccctgctgactcaaagccagaaacagaatgaggactacgaaaagatgattaaagcactgcgtgagactgtcgagattttggtgcatgaccctctcttatggaaaggcgtggggcggggtctggtcggttcactctgtttcatggacaggtag

SEQ ID NO: 321139 - DNA, 345 bp, Artificial Sequence
  derived and/or modified sequence
atggagacaagaagtccaggcctgaacaacatgaaacctcaaagccttcaactggtgctagaagagcaggtgctggctctgcagcagcagatggctgaaaatcaagctgccagctggagaaaactgaagaattctcaggaggctcagcagagacaagccactctagtgcgcaagcttcaggccaaagtccttcaataccgctcctggtgtcaggagcttgaaaaaaggcttgaggcaaccggcggcccgatcccccagagatgggagaatgtcgaagagcccaacttagacgagctcctggtgcgcctggaagaggaacaacagagatgcgaaagtttggcctag

SEQ ID NO: 321140 - DNA, 495 bp, Artificial Sequence
  derived and/or modified sequence
atggagacaaggagtccaggtttgaataacatgaagccacagagccttcaattggtgctggaagaacaggtgctggcccttcagcagcaaatggctgagaaccaggcggcctcctggcgcaaacttaaaaactcacaagaggctcaacagcggcaggcaaccctcgtgagaaaactgcaggccaaagtgttgcagtatagatcatggtgccaggagcttgagaaaagactagaagccactggcggccctatcccgcagcgctgggaaaacgtggaagaacccaatctggacgaacttttggtgagactggaggaggagcaacagagatgtgaaagcctggctgaagtgaacacgcagctccgtctgcatatggagaaggcagatgtcgttaacaaagcgctaagagaggatgtggagaagttaacagtcgactggtccagggcacgcgatgagcttatgcgaaaggagagtcaatggcagatggaacaagagtag

SEQ ID NO: 321141 - DNA, 1617 bp, Artificial Sequence
  derived and/or modified sequence
atggaaacacgatcgcctggtctgaacaatatgaagcctcagtcattgcaacttgtgctggaggaacaggtgttagcactgcaacagcagatggccgaaaatcaagccgcatcctggagaaaactcaaaaactcacaggaggcccaacagcgccaagcgacactggttaggaagttacaggcaaaggtgctgcagtaccgaagttggtgtcaggaactcgagaaaagactcgaggcaaccggaggtcccatcccacagaggtgggagaacgttgaggaacctaacctggacgaactgctggtgaggctcgaagaagaacagcagcgttgcgaatctcttgccgaggtcaacactcagctgcggctacatatggagaaggcagatgtggttaataaagcgctgcgtgaggacgttgagaaactgacagtggactggtccagggctcgcgacgagctgatgcgcaaggagtcacagtggcaaatggaacaggaatttttcaaaggttacctcaagggggagcacgggcggctcctctccttatggcgcgaagtggttacctttcggcggcatttcctggaaatgaagagtgccaccgatagagacttaatggagttaaaggccgaacacgtgcgcctctccgggtcattactgacctgctgcctgagactgacggtaggcgcacagtcccgcgagccaaatgggtccggccgaatggatggaagggaacccgcacaattgctcctgctcctggcaaagacgcaagagttggagaaggaggcccatgagcgcagccaggagctgatccaactcaagtcacagggtgaccttgaaaaggccgagctacaggaccgggttactgagctctccgccctgctcactcagagccaaaagcaaaatgaagactacgaaaagatgataaaggccttgcgggagaccgtggagatcttggagactaatcacacggagctgatggaacacgaggccagtctctccaggaatgcacaggaggagaaacttagtctgcaacaggtgattaaagacatcacccaagtcatggtcgaagaaggggacaatattgctcagggttctggccatgaaaattcactcgaattggattcctcgattttttcacagtttgactatcaggacgcagacaaagcgctcacacttgtcagaagcgttctgacaagacgtcgccaagccgtacaagatttacgacagcagttggctgggtgtcaggaagccgtaaatctgctgcagcaacaacatgatcagtgggaggaggagggcaaggctttgagacagaggctccagaagctaaccggcgaacgggataccctcgctggccaaaccgtggacctgcagggcgaggtggacagcttaagcaaagagagggagttgttgcagaaggcccgggaggaactgaggcagcagcttgaggtgttggagcaggaggcatggcgcctcaggagggtgaacgtggaacttcagctgcaaggagacagcgcacagggacagaaggaggagcagcaggaagagcttcatctggcggtccgcgagagggaaaggctgcagtctagccagctacagtcatgtagggtcttaaagaccccttag

SEQ ID NO: 321142 - DNA, 1020 bp, Artificial Sequence
  derived and/or modified sequence
atggagaccaggagccctggcctgaacaacatgaagccccagagcctgcagctggtgctggaggagcaggtgctggccctgcagcagcagatggccgagaaccaggccgcctcctggaggaagctgaagaacagccaggaggcccagcagaggcaggccaccctggtgaggaagctgcaggccaaggtgctgcagtaccgctcctggtgccaggagctggagaagaggctggaggccaccggcggccccatcccccagcgctgggagaatgtggaggagcccaacctggatgagctgctggtgcggctggaggaggagcagcagagatgtgagagcctggccgaggtgaacacccagctgcggctgcacatggagaaggcagatgtggtgaacaaggccctgcgggaggatgtggagaagctgactgtggactggagccgggccagagatgagctgatgaggaaggagagccagtggcagatggagcaggagttcttcaagggctacctgaagggggagcacggccgcctgctgagcctgtggagggaggtggtgaccttccgccgccacttcctggagatgaagagcgccacagaccgggacctgatggagctgaaggccgagcacgtgcggctgagcggcagcctgctgacctgctgcctgcggctgactgtgggcgcccagagccgggagcccaatggaagtggccgcatggatggccgggagcccgcccagctgctgctgctgctggccaagacccaggagctggagaaggaggcccacgagaggagccaggagctgatccagctgaagagccagggcgacctggagaaggccgagctgcaggacagagtgacagagctgagcgccctgctgacccagagccagaagcagaatgaagattatgagaagatgatcaaggccctgcgggagaccgtggagatcctggtgcatgaccccctgctgtggaagggcgtgggccggggcctggtgggcagcctgtgcttcatggacagatag

SEQ ID NO: 321143 - DNA, 345 bp, Artificial Sequence
  derived and/or modified sequence
atggagaccaggagccctggcctgaacaacatgaagccccagagcctgcagctggtgctggaggagcaggtgctggccctgcagcagcagatggccgagaaccaggccgcctcctggaggaagctgaagaacagccaggaggcccagcagaggcaggccaccctggtgaggaagctgcaggccaaggtgctgcagtaccgctcctggtgccaggagctggagaagaggctggaggccaccggcggccccatcccccagcgctgggagaatgtggaggagcccaacctggatgagctgctggtgcggctggaggaggagcagcagagatgtgagagcctggcctag

SEQ ID NO: 321144 - DNA, 495 bp, Artificial Sequence
  derived and/or modified sequence
atggagaccaggagccctggcctgaacaacatgaagccccagagcctgcagctggtgctggaggagcaggtgctggccctgcagcagcagatggccgagaaccaggccgcctcctggaggaagctgaagaacagccaggaggcccagcagaggcaggccaccctggtgaggaagctgcaggccaaggtgctgcagtaccgctcctggtgccaggagctggagaagaggctggaggccaccggcggccccatcccccagcgctgggagaatgtggaggagcccaacctggatgagctgctggtgcggctggaggaggagcagcagagatgtgagagcctggccgaggtgaacacccagctgcggctgcacatggagaaggcagatgtggtgaacaaggccctgcgggaggatgtggagaagctgactgtggactggagccgggccagagatgagctgatgaggaaggagagccagtggcagatggagcaggagtag

SEQ ID NO: 321145 - DNA, 1617 bp, Artificial Sequence
  derived and/or modified sequence
atggagaccaggagccctggcctgaacaacatgaagccccagagcctgcagctggtgctggaggagcaggtgctggccctgcagcagcagatggccgagaaccaggccgcctcctggaggaagctgaagaacagccaggaggcccagcagaggcaggccaccctggtgaggaagctgcaggccaaggtgctgcagtaccgctcctggtgccaggagctggagaagaggctggaggccaccggcggccccatcccccagcgctgggagaatgtggaggagcccaacctggatgagctgctggtgcggctggaggaggagcagcagagatgtgagagcctggccgaggtgaacacccagctgcggctgcacatggagaaggcagatgtggtgaacaaggccctgcgggaggatgtggagaagctgactgtggactggagccgggccagagatgagctgatgaggaaggagagccagtggcagatggagcaggagttcttcaagggctacctgaagggggagcacggccgcctgctgagcctgtggagggaggtggtgaccttccgccgccacttcctggagatgaagagcgccacagaccgggacctgatggagctgaaggccgagcacgtgcggctgagcggcagcctgctgacctgctgcctgcggctgactgtgggcgcccagagccgggagcccaatggaagtggccgcatggatggccgggagcccgcccagctgctgctgctgctggccaagacccaggagctggagaaggaggcccacgagaggagccaggagctgatccagctgaagagccagggcgacctggagaaggccgagctgcaggacagagtgacagagctgagcgccctgctgacccagagccagaagcagaatgaagattatgagaagatgatcaaggccctgcgggagaccgtggagatcctggagaccaaccacacagagctgatggagcacgaggccagcctgagcagaaatgcccaggaggagaagctgagcctgcagcaggtgatcaaggacatcacccaggtgatggtggaggagggggacaacatcgcccagggcagcggccacgagaacagcctggagctggacagcagcatcttcagccagtttgactaccaggatgctgacaaggccctgaccctggtgcgctctgtgctgacccggcggcggcaggccgtgcaggacctgcggcagcagctggccggctgccaggaggccgtgaacctgctgcagcagcagcacgaccagtgggaggaggagggcaaggccctgcggcagaggctgcagaagctgactggagagcgggacaccctggccggccagacagtggacctgcagggcgaggtggacagcctgagcaaggagcgggagctgctgcagaaggcccgggaggagctgcggcagcagctggaggtgctggagcaggaggcctggaggctgcggcgggtgaatgtggagctgcagctgcagggcgacagcgcccagggccagaaggaggagcagcaggaggagctgcacctggccgtgcgggagcgggagcggctgcagagcagccagctgcagagctgccgggtgctgaagaccccctag

SEQ ID NO: 321146 - DNA, 1020 bp, Artificial Sequence
  derived and/or modified sequence
atggagacccggagccccggcctgaacaacatgaagccccagagcctccaactcgtactggaagagcaggttctagcactgcaacagcagatggcagaaaaccaggcggccagttggagaaagctgaagaacagccaggaggcccagcagagacaggccactctggtgcgcaagctccaagccaaagtactgcagtaccgctcatggtgtcaagagcttgagaagaggctggaagccaccgggggacctatccctcagcgctgggaaaatgttgaggagcctaatcttgacgagctgctcgttcgattggaggaggaacagcagcggtgtgaaagtctggcagaggtgaacacacagttacgtttacatatggaaaaagctgatgtcgtaaataaggcattaagggaagacgttgaaaagctcactgtggattggtctagagccagagacgagctcatgaggaaggagagtcagtggcagatggagcaagaattctttaagggctacctgaaaggggagcacggcagattgctgtccctgtggcgagaagtggtgacatttcggaggcatttccttgagatgaagtcagcaactgatagagatcttatggagctgaaagctgaacacgtccgcctatcaggttcactgttaacctgctgcctgcgtctgacggtgggagctcagagtcgggaacccaacggctctggcaggatggatggtagagagcccgcacagctgctcctgctgctggccaaaacccaggaactggaaaaagaggctcacgagaggtcacaagagcttattcaactcaagagccagggagacttagaaaaagccgagctgcaggaccgtgtcacagagctaagcgccctgttaacccaatctcaaaagcagaatgaagactacgagaaaatgattaaagccctacgtgagacggtggagatcctggtacatgaccctctgctttggaagggagtgggacgagggcttgtgggtagtttatgctttatggatagatag

SEQ ID NO: 321147 - DNA, 345 bp, Artificial Sequence
  derived and/or modified sequence
atggagacccggagccccggcctgaacaacatgaagccccagagcctccaactggtgctagaagagcaagttctggcgctgcagcaacagatggcagaaaaccaggcagcatcttggaggaaactgaaaaactctcaagaagctcagcaaaggcaggcgactctggtgcgcaaactgcaggcaaaagtgctgcagtataggtcatggtgccaggaactggagaaaagactggaggccactgggggacctataccccagagatgggaaaacgtggaggaaccaaatctggatgaactgcttgttagactggaggaagagcagcagcgatgcgagtcacttgcgtag

SEQ ID NO: 321148 - DNA, 495 bp, Artificial Sequence
  derived and/or modified sequence
atggagacccggagccccggcctgaacaacatgaagccccagagcctccaactcgtgttggaggagcaggtgctggcattacagcagcagatggcagagaaccaggccgctagctggcggaaactgaagaactctcaagaagcacagcagcggcaggccaccttagtgcgcaaattacaagcgaaagtgctgcaataccgatcttggtgccaggagctggagaagcgcctcgaagccactggcggccccatcccccaaaggtgggagaatgtggaagagccgaatctcgacgagttgctggtaaggctagaggaggagcaacagcgttgcgaatcactggccgaagtgaatacccaactccgactgcatatggagaaggctgatgtggtcaacaaagctctaagagaggacgtagagaaactaaccgtagattggtctcgggccagagacgagctcatgagaaaagaatcccaatggcagatggagcaggagtag

SEQ ID NO: 321149 - DNA, 1617 bp, Artificial Sequence
  derived and/or modified sequence
atggagacccggagccccggcctgaacaacatgaagccccagagccttcagctggtgctagaggagcaggtgctggccctgcagcagcagatggctgagaatcaggctgcctcatggagaaagctgaagaactcacaggaagcccagcaaaggcaggcgacgctggtacgcaagcttcaagccaaggttctacagtacagatcctggtgccaagagctggagaagcgtttagaggccacagggggacctattccccaacggtgggaaaacgtggaagagcctaatctggacgaactactggtcagactggaagaggagcaacagaggtgtgagagcctcgctgaggtgaacacccagcttagattgcacatggagaaagctgacgtggtcaacaaagctctgcgcgaggacgtagaaaagctcacagtggattggagccgcgctagggatgagctgatgcggaaggaatcccagtggcagatggagcaagagttctttaaaggatatctgaaaggggaacatggtcggctgttgagcctttggagggaggtagtgacatttcgccgacacttccttgaaatgaaatccgccaccgaccgcgaccttatggaactcaaagctgagcatgtcaggctgtccgggtcactcttaacttgctgcctgcgcctaaccgtcggagcccagtcacgcgaaccaaatggaagcggcagaatggatgggcgtgagccggcgcagttgcttctccttttggctaaaacgcaggagctggaaaaagaagctcatgagcgctcccaggaactgatacaacttaagtctcaaggcgatcttgagaaggccgagctacaggaccgtgtgacggagttgagcgcgctgctgacccagtctcagaagcagaatgaggactacgagaaaatgattaaggctcttcgcgagacggtggaaattctggaaacaaaccacaccgaattaatggagcacgaggctagcctcagccgtaacgcccaggaggagaaactgagcctgcagcaagtaattaaagatattacacaggttatggtcgaggagggggacaacatcgctcagggcagcggccatgagaattctctggaactggattcctcgattttttcacagtttgactaccaggatgccgataaagcgctcaccctggtcagatcagtcctcaccaggcggaggcaggccgtgcaagaccttcggcagcagcttgctggctgccaggaagcagttaacttgctccagcaacagcatgaccagtgggaagaggagggaaaggctctgaggcaaagactgcagaaactcaccggggagcgcgataccctcgcgggccagaccgtcgacctgcaaggtgaagtggactctctttctaaggagagggaactgctccagaaagccagagaggaactaaggcagcagcttgaggtgctggaacaggaggcctggcgcctgaggcgagttaacgtggagttacaactccagggagacagtgcccaggggcagaaggaggagcaacaggaagaactgcacctggcggtccgtgagcgggagcgcctccaaagttcacagctacagtcctgccgcgttttgaaaacgccttag

SEQ ID NO: 321150 - DNA, 1020 bp, Artificial Sequence
  derived and/or modified sequence
atggagaccagaagcccgggactcaacaacatgaaaccccagagcttacagcttgtcctcgaggagcaggtcctagctctccagcagcaaatggccgagaatcaggctgccagttggagaaagctgaagaattcccaagaagcgcaacagcgccaggcgaccctggttaggaagctccaggctaaggtacttcagtaccgtagttggtgtcaggagctggagaaacggctggaagctactgggggaccaataccacagcggtgggaaaacgtggaggaacccaatctggatgagctgctggtccgattggaggaggagcagcagagatgtgaatctctggccgaggtgaacacgcagcttcggctgcatatggaaaaagccgatgtcgtgaataaggccctgagagaggatgtcgagaaacttacggtggactggtcccgcgcacgggacgaattaatgcggaaagaaagccaatggcagatggagcaagaatttttcaagggttatctcaaaggggaacacgggaggctgcttagtttatggcgcgaggtggtcactttccgaagacacttcctggaaatgaaaagtgccaccgaccgagatctgatggaattgaaggcagagcacgtgaggctgtcaggttcgctgcttacctgctgtctgcggttaaccgtgggtgcccagtcaagagaacctaacggatcaggacggatggacggccgagagcccgcacaactcctcttgctcctggcgaagacccaagagctagagaaagaggcccacgagcgcagccaggaactgatccagctgaaatcccagggtgatctggagaaagcagaactccaggacagagtgacagagctgtctgctttattgacccagtcacagaagcagaatgaagattacgagaaaatgattaaagccctcagggagacggttgagatcttggtccatgaccctctcctgtggaagggcgtcggccgaggactggtgggatccctttgtttcatggaccggtag

SEQ ID NO: 321151 - DNA, 345 bp, Artificial Sequence
  derived and/or modified sequence
atggaaacgagatctcctggcctgaataacatgaaacctcagagcctccagctggtgctggaagaacaagttttggctcttcaacaacagatggcagagaaccaggccgctagttggagaaaattgaagaactcccaagaagcccagcagcggcaagccacactcgtgcgcaagctgcaggccaaggtcctgcagtaccggtcttggtgtcaggagctcgaaaagagattggaagccactgggggaccaatccctcaacggtgggagaatgtagaggagccaaacctcgatgaattgctggtgagattggaggaggagcaacagcgatgtgaaagcttagcgtag

SEQ ID NO: 321152 - DNA, 495 bp, Artificial Sequence
  derived and/or modified sequence
atggaaactcgatcacccggattgaataacatgaagccacagtcattgcaactcgtgctagaggagcaagtgctggcgctgcagcagcaaatggcggagaaccaggccgcaagctggaggaagctcaaaaactctcaagaagctcagcagaggcaggccacccttgtgcgcaagctccaggccaaggtcctgcagtataggagttggtgtcaagagcttgaaaaacgactcgaagctacagggggaccaatcccgcagcgatgggagaatgtggaggagccaaacctcgacgagctcctggttcggctagaggaagagcagcaaaggtgtgaatctttggcagaagtgaacacccagctgaggttacacatggaaaaggctgacgtagtaaacaaggcccttagggaggacgtcgaaaaactgaccgtggactggagcagggcgagggatgaactgatgagaaaagaaagccagtggcagatggaacaggaatag

SEQ ID NO: 321153 - DNA, 1617 bp, Artificial Sequence
  derived and/or modified sequence
atggaaacacggagcccagggctcaacaacatgaaaccccaaagcctgcagctggtgctggaggaacaggttctcgccctacaacaacagatggccgagaaccaggccgcttcctggaggaaactcaagaactctcaagaggcccagcagcggcaggccaccctcgtgaggaagttgcaggcaaaagtcttacaataccgcagctggtgccaggagttggagaagaggctggaagcaaccggcggacctatcccacagcggtgggagaatgtggaggagcccaacctggatgagctactggtacgacttgaggaagagcaacagagatgcgagtccctggcagaagtgaacacccaacttagacttcacatggaaaaggccgacgttgttaacaaagctctcagggaggacgtcgagaagctcacagtcgattggagtcgtgccagagatgaactgatgcgcaaggagagtcagtggcaaatggaacaggaattttttaagggctacctcaagggggagcatgggcgtcttctgagcctttggcgggaggtcgtgacttttcgcagacatttcctggagatgaaatctgctacagatcgcgatctgatggaactcaaagcagagcatgtgagattgtcagggtctctgctgacctgctgcctgcgattaacagtgggcgctcaatcccgagaacctaacggctctggaagaatggatggtcgggagcctgcccagctgctgcttctgcttgctaagactcaagagttggagaaggaagctcatgagcgctcacaggagctcatccagctaaagtctcagggggatctggaaaaggccgagctccaggacagagtgactgagttgtcagcactgctgacacagtctcagaaacaaaatgaggactacgagaagatgatcaaagccctgagagaaaccgtggagatcttagagacgaatcacactgagctgatggagcatgaggccagcctttctcgcaatgcccaggaagaaaagctgagcttgcagcaagtgattaaagacattactcaggtgatggtcgaggagggcgacaacatcgcccagggatccggtcacgaaaattcccttgaattggacagcagtatcttctctcagttcgattaccaggatgctgataaggctctgaccctggtacgcagtgttctaactcgaagaaggcaagcagtccaggacctccgccaacagctggcaggctgtcaagaggctgtgaatctgttgcagcaacagcacgatcagtgggaagaagagggcaaggccctgaggcagcggctgcagaagttgactggcgaaagagatacactcgcaggacaaacagtggatctccagggcgaggtggacagtctttcgaaggaacgcgaactgctgcagaaggcccgagaagagttgcgacaacaactcgaagttcttgagcaggaggcatggcgtttgcgaagagtgaatgtggagcttcaactgcagggcgattccgctcagggacagaaggaggaacagcaggaggagctccacctggccgttagagagagggagaggctgcaatcgtcccagcttcagagctgccgagttttaaagaccccttag

SEQ ID NO: 321154 - DNA, 1419 bp, Artificial Sequence
  derived and/or modified sequence
gttactttcccggcccctcgttgacaccgttcacaggtggctgttggtctttagtaagggtgctgtcttccctgtctgatccttagcaaaagtaggaaggtagagttgttggcagaaatcctgggataagagaatagtttcctggaagatctgtgcctccaaccagcagagagggattgagcttcattgaactcaacagagccaacatttcatagcaccatgttcaagaggaggttgaagtggcatggcaatggttagagaccctgctgggcgtgaacaccctctggctacctagggacctgtgggcctaccacctggtgccctcatggagacaagaagccctgggttgaacaacatgaagccccagtcactgcagctggtactggaagagcaggtgctggcactacagcagcagatggcagagaatcaggcagcctcctggcggaagctgaagaactcccaggaggcccagcagagacaagcaacccttgtgaggaagctgcaggccaaggtgctgcagtaccgaagctggtgccaagagctggagaagcggctagaagccactggaggaccaatcccccagaggtgggaaaatgtggaggagccaaacctggatgagctgctggtccgattggaggaggagcaacagaggtgtgagagtctagcagaggtgaacacccagcttcgactgcacatggaaaaagctgacgtggtgaataaagcccttagggaagatgtggaaaaactgacagtggactggagccgggcccgggatgagctaatgaggaaggagagccagtggcagatggagcaggagttcttcaagggctacctgaaaggggagcacggtcgccttctcagtctatggcgggaggttgtgacattccgacgccacttcctggaaatgaagtcagctactgacagagatctgatggagctaaaagctgagcatgtgaggctttcagggtctctgttgacctgttgtctgcgcttgactgtgggagcacagtctcgggaacccaacggatctggaagaatggatgggcgggagccggcccagctgctgctgctactagccaagacccaggagctggagaaggaagcccatgaaaggagccaggagttaatacagctgaagagtcaaggggatctggagaaggctgaacttcaggaccgggtgaccgagctctctgctctgttgacccagtctcagaagcaaaatgaagattatgaaaagatgataaaggctctgagagagacagtggagatcctggtacatgatcctttgctctggaaaggagttgggcgtgggcttgtaggttccttgtgctttatggacagatagtgcaggataccagttacatattccatgatgaaatcctctaaagctaaaaaataaattttggctgaatctgaaaa

SEQ ID NO: 321155 - DNA, 702 bp, Artificial Sequence
  derived and/or modified sequence
agcagcggctgccgcagctcaatcgcggagcaactagccgggcgtctgcgggagccgagcgtggttcacaggtggctgttggtctttagtaagggtgctgtcttccctgtctgatccttagcaaaagtaggaaggtagagttgttggcagaaatcctgggataagagaatagtttcctggaagatctgtgcctccaaccagcagagagggattgagcttcattgaactcaacagagccaacatttcatagcaccatgttcaagaggaggttgaagtggcatggcaatggttagagaccctgctgggcgtgaacaccctctggctacctagggacctgtgggcctaccacctggtgccctcatggagacaagaagccctgggttgaacaacatgaagccccagtcactgcagctggtactggaagagcaggtgctggcactacagcagcagatggcagagaatcaggcagcctcctggcggaagctgaagaactcccaggaggcccagcagagacaagcaacccttgtgaggaagctgcaggccaaggtgctgcagtaccgaagctggtgccaagagctggagaagcggctagaagccactggaggaccaatcccccagaggtgggaaaatgtggaggagccaaacctggatgagctgctggtccgattggaggaggagcaacagaggtgtgagagtctagca

SEQ ID NO: 321156 - DNA, 868 bp, Artificial Sequence
  derived and/or modified sequence
cgcagggccttagcagcggctgccgcagctcaatcgcggagcaactagccgggcgtctgcgggagccgagcgtggtgaggttcacaggtggctgttggtctttagtaagggtgctgtcttccctgtctgatccttagcaaaagtaggaaggtagagttgttggcagaaatcctgggataagagaatagtttcctggaagatctgtgcctccaaccagcagagagggattgagcttcattgaactcaacagagccaacatttcatagcaccatgttcaagaggaggttgaagtggcatggcaatggttagagaccctgctgggcgtgaacaccctctggctacctagggacctgtgggcctaccacctggtgccctcatggagacaagaagccctgggttgaacaacatgaagccccagtcactgcagctggtactggaagagcaggtgctggcactacagcagcagatggcagagaatcaggcagcctcctggcggaagctgaagaactcccaggaggcccagcagagacaagcaacccttgtgaggaagctgcaggccaaggtgctgcagtaccgaagctggtgccaagagctggagaagcggctagaagccactggaggaccaatcccccagaggtgggaaaatgtggaggagccaaacctggatgagctgctggtccgattggaggaggagcaacagaggtgtgagagtctagcagaggtgaacacccagcttcgactgcacatggaaaaagctgacgtggtgaataaagcccttagggaagatgtggaaaaactgacagtggactggagccgggcccgggatgagctaatgaggaaggagagccagtggcagatggagcaggag

SEQ ID NO: 321157 - DNA, 2295 bp, Artificial Sequence
  derived and/or modified sequence
cagtcccacccgccacccgactctggagctcccattcttcaggaccctgctgaagtatcgcttctcagccgccttctccaggcgcagctgcattcgcttctcggtttttgcactcgctgtgcaccgagttactttcccggcccctcgttgacaccgtagagttgttggcagaaatcctgggataagagaatagtttcctggaagatctgtgcctccaaccagcagagagggattgagcttcattgaactcaacagagccaacatttcatagcaccatgttcaagaggaggttgaagtggcatggcaatggttagagaccctgctgggcgtgaacaccctctggctacctagggacctgtgggcctaccacctggtgccctcatggagacaagaagccctgggttgaacaacatgaagccccagtcactgcagctggtactggaagagcaggtgctggcactacagcagcagatggcagagaatcaggcagcctcctggcggaagctgaagaactcccaggaggcccagcagagacaagcaacccttgtgaggaagctgcaggccaaggtgctgcagtaccgaagctggtgccaagagctggagaagcggctagaagccactggaggaccaatcccccagaggtgggaaaatgtggaggagccaaacctggatgagctgctggtccgattggaggaggagcaacagaggtgtgagagtctagcagaggtgaacacccagcttcgactgcacatggaaaaagctgacgtggtgaataaagcccttagggaagatgtggaaaaactgacagtggactggagccgggcccgggatgagctaatgaggaaggagagccagtggcagatggagcaggagttcttcaagggctacctgaaaggggagcacggtcgccttctcagtctatggcgggaggttgtgacattccgacgccacttcctggaaatgaagtcagctactgacagagatctgatggagctaaaagctgagcatgtgaggctttcagggtctctgttgacctgttgtctgcgcttgactgtgggagcacagtctcgggaacccaacggatctggaagaatggatgggcgggagccggcccagctgctgctgctactagccaagacccaggagctggagaaggaagcccatgaaaggagccaggagttaatacagctgaagagtcaaggggatctggagaaggctgaacttcaggaccgggtgaccgagctctctgctctgttgacccagtctcagaagcaaaatgaagattatgaaaagatgataaaggctctgagagagacagtggagatcctggagacaaatcacacagaattaatggaacatgaagcatctcttagtaggaatgcgcaagaggagaagttgtctttacagcaggtgatcaaggatataacccaggtcatggtggaagaaggggacaatatagcccaaggctctggtcatgagaactctttggaattggactctagtatcttctcccagtttgattaccaggatgcagacaaggctcttactctggtgcgttcagtgctgactcggagacgccaggctgtgcaggacctaaggcagcagcttgcaggctgtcaagaggctgtgaacttgttgcaacagcagcatgatcagtgggaggaagagggcaaagccttgagacagcggctgcagaagctcactggggagcgggacactctggcagggcagactgtggacctccagggagaggtggactctctcagcaaggagcgagagctgctgcagaaggccagggaagagctgcggcagcagctggaggtgctagagcaggaggcatggcgcctgcgaagggtaaatgtggagcttcagctgcagggggactctgcccagggccagaaggaggaacagcaggaggagctgcacctggctgtccgggagagggagcgtctgcagagcagtcaattgcagagctgtcgagttctgaaaacaccctgaagacagaagtagctgatcttcgggctgcagctgtcaagctcagtgccttaaatgaggctttggcgttagataaagttgggctgaaccagcagcttctccagttagaggaggagaaccagtctgtgtgcagcagaatggaggccgcagagcaggcgagaaatgctttgcaggtcgacctggcggaggcagagaagaggagggaagccctgtgggaaaagaacactcacctggaggctcagctgcagaaagctgaggaggctggggctgagctgcaggcagatctcagggacatccaag

SEQ ID NO: 321158 - DNA, 1020 bp, Artificial Sequence
  derived and/or modified sequence
atggagaccagaagccccggcctgaacaacatgaagccccagagcctgcagctggtgctggaggagcaggtgctggccctgcagcagcagatggccgagaaccaggccgccagctggagaaagctgaagaacagccaggaggcccagcagagacaggccaccctggtgagaaagctgcaggccaaggtgctgcagtacagaagctggtgccaggagctggagaagagactggaggccaccggcggccccatcccccagagatgggagaacgtggaggagcccaacctggacgagctgctggtgagactggaggaggagcagcagagatgcgagagcctggccgaggtgaacacccagctgagactgcacatggagaaggccgacgtggtgaacaaggccctgagagaggacgtggagaagctgaccgtggactggagcagagccagagacgagctgatgagaaaggagagccagtggcagatggagcaggagttcttcaagggctacctgaagggcgagcacggcagactgctgagcctgtggagagaggtggtgaccttcagaagacacttcctggagatgaagagcgccaccgacagagacctgatggagctgaaggccgagcacgtgagactgagcggcagcctgctgacctgctgcctgagactgaccgtgggcgcccagagcagagagcccaacggcagcggcagaatggacggcagagagcccgcccagctgctgctgctgctggccaagacccaggagctggagaaggaggcccacgagagaagccaggagctgatccagctgaagagccagggcgacctggagaaggccgagctgcaggacagagtgaccgagctgagcgccctgctgacccagagccagaagcagaacgaggactacgagaagatgatcaaggccctgagagagaccgtggagatcctggtgcacgaccccctgctgtggaagggcgtgggcagaggcctggtgggcagcctgtgcttcatggacagatag

SEQ ID NO: 321159 - DNA, 345 bp, Artificial Sequence
  derived and/or modified sequence
atggagaccagaagccccggcctgaacaacatgaagccccagagcctgcagctggtgctggaggagcaggtgctggccctgcagcagcagatggccgagaaccaggccgccagctggagaaagctgaagaacagccaggaggcccagcagagacaggccaccctggtgagaaagctgcaggccaaggtgctgcagtacagaagctggtgccaggagctggagaagagactggaggccaccggcggccccatcccccagagatgggagaacgtggaggagcccaacctggacgagctgctggtgagactggaggaggagcagcagagatgcgagagcctggcctag

SEQ ID NO: 321160 - DNA, 495 bp, Artificial Sequence
  derived and/or modified sequence
atggagaccagaagccccggcctgaacaacatgaagccccagagcctgcagctggtgctggaggagcaggtgctggccctgcagcagcagatggccgagaaccaggccgccagctggagaaagctgaagaacagccaggaggcccagcagagacaggccaccctggtgagaaagctgcaggccaaggtgctgcagtacagaagctggtgccaggagctggagaagagactggaggccaccggcggccccatcccccagagatgggagaacgtggaggagcccaacctggacgagctgctggtgagactggaggaggagcagcagagatgcgagagcctggccgaggtgaacacccagctgagactgcacatggagaaggccgacgtggtgaacaaggccctgagagaggacgtggagaagctgaccgtggactggagcagagccagagacgagctgatgagaaaggagagccagtggcagatggagcaggagtag

SEQ ID NO: 321161 - DNA, 1617 bp, Artificial Sequence
  derived and/or modified sequence
atggagaccagaagccccggcctgaacaacatgaagccccagagcctgcagctggtgctggaggagcaggtgctggccctgcagcagcagatggccgagaaccaggccgccagctggagaaagctgaagaacagccaggaggcccagcagagacaggccaccctggtgagaaagctgcaggccaaggtgctgcagtacagaagctggtgccaggagctggagaagagactggaggccaccggcggccccatcccccagagatgggagaacgtggaggagcccaacctggacgagctgctggtgagactggaggaggagcagcagagatgcgagagcctggccgaggtgaacacccagctgagactgcacatggagaaggccgacgtggtgaacaaggccctgagagaggacgtggagaagctgaccgtggactggagcagagccagagacgagctgatgagaaaggagagccagtggcagatggagcaggagttcttcaagggctacctgaagggcgagcacggcagactgctgagcctgtggagagaggtggtgaccttcagaagacacttcctggagatgaagagcgccaccgacagagacctgatggagctgaaggccgagcacgtgagactgagcggcagcctgctgacctgctgcctgagactgaccgtgggcgcccagagcagagagcccaacggcagcggcagaatggacggcagagagcccgcccagctgctgctgctgctggccaagacccaggagctggagaaggaggcccacgagagaagccaggagctgatccagctgaagagccagggcgacctggagaaggccgagctgcaggacagagtgaccgagctgagcgccctgctgacccagagccagaagcagaacgaggactacgagaagatgatcaaggccctgagagagaccgtggagatcctggagaccaaccacaccgagctgatggagcacgaggccagcctgagcagaaacgcccaggaggagaagctgagcctgcagcaggtgatcaaggacatcacccaggtgatggtggaggagggcgacaacatcgcccagggcagcggccacgagaacagcctggagctggacagcagcatcttcagccagttcgactaccaggacgccgacaaggccctgaccctggtgagaagcgtgctgaccagaagaagacaggccgtgcaggacctgagacagcagctggccggctgccaggaggccgtgaacctgctgcagcagcagcacgaccagtgggaggaggagggcaaggccctgagacagagactgcagaagctgaccggcgagagagacaccctggccggccagaccgtggacctgcagggcgaggtggacagcctgagcaaggagagagagctgctgcagaaggccagagaggagctgagacagcagctggaggtgctggagcaggaggcctggagactgagaagagtgaacgtggagctgcagctgcagggcgacagcgcccagggccagaaggaggagcagcaggaggagctgcacctggccgtgagagagagagagagactgcagagcagccagctgcagagctgcagagtgctgaagaccccctag

SEQ ID NO: 321162 - protein, 556 aa, Artificial Sequence
  derived and/or modified sequence
MRMSPPSASPPSSSGGRTSSSTTTAGEPFWAGVLFAIRPHPGLSGRIVWTAGCPGEGADGDFAVTHLTKAHLFHDGRVQWTPPAIYKSSCSIDVTFFPFDQQNCTMKFGSWTYDKAKIDLVNMHSRVDQLDFWESGEWVIVDAVGTYNTRKYECCAEIYPDITYAFVIRRLPLFYTINLIIPCLLISCLTVLVFYLPSECGEKITLCISVLLSLTVFLLLITEIIPSTSLVIPLIGEYLLFTMIFVTLSIVITVFVLNVHHRSPRTHTMPTWVRRVFLDIVPRLLLMKRPSVVKDNCRRLIESMHKMASAPRFWPEPEGEPPATSGTQSLHPPSPSFCVPLDVPAEPGPSCKSPSDQLPPQQPLEAEKASPHPSPGPCRPPHGTQAPGLAKARSLSVQHMSSPGEAVEGGVRCRSRSIQYCVPRDDAAPEADGQAAGALASRNTHSAELPPPDQPSPCKCTCKKEPSSVSPSATVKTRSTKAPPPHLPLSPALTRAVEGVQYIADHLKAEDTDFSVKEDWKYVAMVIDRIFLWMFIIVCLLGTVGLFLPPWLAGMI

SEQ ID NO: 321163 - DNA, 1602 bp, Artificial Sequence
  derived and/or modified sequence
gctcccgagccaggagaggcaccgagattggaccgagctcaccccggatgtgcctgcgcagagctctccttactctggctgtgctgttgcacgttcacatccgcagatggcgacttcgctgtgacacacttgactaaggctcacctgttccatgatggccgggtgcagtggacaccaccagccatctataaatcttcatgcagcatagatgttactttcttccccttcgaccagcagaactgcaccatgaagtttggctcctggacttacgataaggctaagattgacttagtgaatatgcatagcagagtagaccaactggatttttgggaatctggggaatgggtgatcgttgacgctgtcggaacttacaatactcggaagtatgagtgctgcgccgaaatatatcccgatattacttatgcgttcgttattcgacgcctgcctttattttacaccataaacttgatcatcccatgcctgctgatcagctgcctgacggtacttgtgttctacttgccatccgaatgcggagagaaaatcactctgtgcatcagtgtactgctgagtctcacagtttttttattacttattacggaaatcatcccttccacctcacttgtcatcccccttattggggagtacctgctgtttacgatgattttcgtgacactgtctatcgttattaccgtgttcgttctgaacgtgcaccatcgaagtcctaggacgcacactatgcctacttgggtgaggcgagtattcctggacatagtacctagactgctcctcatgaagcgcccatctgtggtgaaggataactgtcggagactgatcgagagcatgcataagatggccagcgccccgcggttctggcctgaaccggaaggcgagccccctgccacctccggcactcaatctctgcacccacccagcccctcattttgcgtccctctcgacgtcccagcagaacctggtccatcctgcaagtcaccgtccgatcagctgcctccgcagcagccgctcgaagccgaaaaggccagtccgcatcccagccctggaccatgtaggcctcctcacggcactcaggctcccggcctggctaaggccaggagcctctcagtgcagcacatgagttcgccaggggaggccgttgaaggcggagtacggtgccgctcaaggtctatccagtattgtgtgccccgggatgacgcagccccagaagcagacggccaggccgctggagcccttgcctctagaaacacccactccgcagagttgccaccccctgaccaaccttctccctgcaagtgcacttgtaagaaggagccgtcatctgtgtctccttcggcgactgttaaaactcggtcaacaaaggccccgccccctcacctgccactttctccggccctgactcgggccgtggaaggggtacaatacattgccgaccatctgaaggcagaggacacagatttctctgtgaaagaagactggaaatacgtggctatggtgatcgatcggattttcctttggatgttcattatcgtttgcttactgggaactgtagggctattccttccaccttggctggctggaatgatttag

SEQ ID NO: 321164 - DNA, 1671 bp, Artificial Sequence
  derived and/or modified sequence
atgcgaatgagcccaccatcggcaagccctccttcttcatcagggggaagaacaagttcttcaacaactactgccggagagccattttgggccggtgttctgttcgccataaggcctcacccaggcttatcaggaagaatagtttggaccgccgggtgcccaggagagggtgccgacggagactttgcagtcacacatctcacgaaggcacatctgtttcacgatgggcgcgttcagtggaccccaccagcaatctataagagttcgtgctccatcgacgtgactttttttccctttgatcagcagaactgcacaatgaaatttggaagctggacttacgacaaagctaagatagaccttgtgaacatgcactcacgcgtggaccagctcgatttttgggaaagcggagagtgggtgatcgtagacgccgtcgggacatacaacacccggaagtacgaatgctgcgctgaaatttaccctgacataacatacgccttcgtgatcagacggctgccgttgttctataccatcaacctgatcatcccatgccttttgattagctgcttaaccgtgcttgtgttctacttgccaagcgagtgcggcgaaaaaatcacgctttgcatcagcgttctgctgtctctaacagtgttcctgctgctcattacagaaatcatccccagcacaagtctggttattccattaataggagagtatctgttatttacaatgatattcgtgactctatcgatcgtcattacagtgtttgtcttaaacgtgcaccatcggtctccacgcacccatacaatgcctacctgggttagacgggtgttcctggacatcgtgcctaggctgctcctcatgaagcggccctccgtggtcaaggacaattgccggaggttaatagagtcaatgcacaaaatggctagtgcccctaggttctggcctgagccagagggggaacctccagcaaccagtggcacacagagtctacatcccccatctcccagcttttgcgtacccttggatgtccccgcggagccgggaccgtcttgcaaatcgccctcggaccaactgcctccccagcagccacttgaagccgaaaaggccagccctcaccccagccccggtccatgtaggcctccacatggtacacaggcacctggcctcgcgaaagctcggtctctgtctgtacagcatatgtcgtcacctggagaggcggtcgaaggcggagtgcgatgccgctctaggagcatccagtactgcgtgcctagagacgatgccgctcccgaagccgacgggcaggcggctggggcactcgcgagcagaaacacacatagcgccgagcttccacctccagaccagccctctccctgtaagtgtacctgcaagaaggaaccctccagtgtatctccttccgctaccgtcaaaacccgttctaccaaagccccccccccccatcttccactttctcccgcgctgacgagggcagtggaaggtgttcagtatattgccgatcaccttaaggcagaagatactgattttagcgtgaaggaggattggaaatatgtcgctatggttattgacagaatatttctgtggatgttcatcattgtgtgtttgctcgggaccgtcgggctctttttaccgccctggctggccggaatgatctag

SEQ ID NO: 321165 - DNA, 1602 bp, Artificial Sequence
  derived and/or modified sequence
gcccctgagcccggggaggccccccggctggaccgggcccaccctggctgtgcctgtgccgagctgagcctgctgtggctgtgctgctgcaccttcaccagcgcagatggagactttgctgtgacccacctgaccaaggcccacctgttccatgatggccgggtgcagtggaccccaccagccatctacaagagcagctgcagcattgatgtgaccttcttcccctttgaccagcagaactgcaccatgaagtttggctcctggacctatgacaaggccaagattgacctggtgaacatgcacagccgggtggaccagctggacttctgggagagcggggagtgggtgattgtggatgctgtgggcacctacaacaccaggaaatatgagtgctgtgccgagatctacccagacatcacctacgcctttgtgatccggcggctgcccctcttctacaccatcaacctgatcatcccctgcctgctgatcagctgcctgactgtgctggtgttctacctgcccagtgaatgtggggagaagatcaccctgtgcatctctgtgctgctgagcctgaccgtcttcctgctgctgatcacagagatcatccccagcaccagcctggtgatccccctcatcggggagtacctgctcttcaccatgatctttgtgaccctgagcatcgtcatcaccgtgtttgtgctgaatgtgcaccacaggagccccaggacccacaccatgcccacctgggtgagaagagtcttcctggacatcgtgccccggctgctgctgatgaagaggcccagcgtggtgaaggacaactgcagaagactcatcgagagcatgcacaagatggccagcgccccccgcttctggccagagcctgagggggagcccccagccaccagcggcacccagagcctgcacccccccagccccagcttctgtgtgcccctggatgtgcctgctgagcccggccccagctgcaagagccccagcgaccagctgcccccccagcagcccctggaggccgagaaggccagcccccaccccagccctggcccctgcaggcctcctcatggcacccaggcccctggcctggccaaggcccggagcctgtctgtgcagcacatgagcagccctggagaggccgtggagggcggcgtgcgctgccgcagccgcagcatccagtactgtgtgcccagagatgatgctgcccctgaggctgatggccaggccgccggggccctggccagcaggaacacccacagcgctgagctgcccccaccagaccagcccagcccctgcaagtgcacctgcaagaaggagcccagctctgtgagccccagcgccaccgtgaagaccaggagcaccaaggcccccccaccccacctgcccctgagccctgccctgaccagggctgtggagggcgtgcagtacatcgctgaccacctgaaggccgaggacacagacttctctgtgaaggaggactggaagtatgtggccatggtgattgaccgcatcttcctgtggatgttcatcatcgtgtgcctgctgggcaccgtgggcctcttcctgcccccctggctggccggcatgatctag

SEQ ID NO: 321166 - DNA, 1671 bp, Artificial Sequence
  derived and/or modified sequence
atgaggatgagccccccatctgccagcccccccagcagcagcggcggccgcaccagcagcagcaccaccacagctggggagcccttctgggccggcgtgctgtttgccatccggccccaccctggcctgagcggcagaattgtgtggacagctggctgccctggagagggcgcagatggagactttgctgtgacccacctgaccaaggcccacctgttccatgatggccgggtgcagtggaccccaccagccatctacaagagcagctgcagcattgatgtgaccttcttcccctttgaccagcagaactgcaccatgaagtttggctcctggacctatgacaaggccaagattgacctggtgaacatgcacagccgggtggaccagctggacttctgggagagcggggagtgggtgattgtggatgctgtgggcacctacaacaccaggaaatatgagtgctgtgccgagatctacccagacatcacctacgccttcgtcatccggcggctgcccctcttctacaccatcaacctgatcatcccctgcctgctgatcagctgcctgactgtgctggtgttctacctgcccagtgaatgtggggagaagatcaccctgtgcatctctgtgctgctgagcctgactgtgttcctgctgctgatcacagagatcatccccagcaccagcctggtgatccccctgattggagagtacctgctcttcaccatgatctttgtgaccctgagcatcgtcatcaccgtgtttgtgctgaatgtgcaccacaggagccccaggacccacaccatgcccacctgggtgcggcgggtcttcctggacatcgtgccccggctgctgctgatgaagaggccttctgtggtgaaggacaactgccggcggctgattgaatccatgcacaagatggccagcgccccccgcttctggccagagcctgagggggagcccccagccaccagcggcacccagagcctgcacccccccagccccagcttctgtgtgcccctggatgtgcctgctgagcccggccccagctgcaagagccccagcgaccagctgcccccccagcagcccctggaggccgagaaggccagcccccaccccagccctggcccctgccggcccccccacggcacccaggcccctggcctggccaaggcccggagcctgtctgtgcagcacatgagcagccctggagaggccgtggagggcggcgtgcgctgccgcagccgcagcatccagtactgtgtgcccagagatgatgctgcccctgaggctgatggccaggccgccggggccctggccagcaggaacacccacagcgctgagctgcccccaccagaccagcccagcccctgcaagtgcacctgcaagaaggagcccagctctgtgagccccagcgccaccgtgaagaccaggagcaccaaggcccccccaccccacctgcccctgagccctgccctgaccagggctgtggagggcgtgcagtacatcgctgaccacctgaaggccgaggacacagacttctctgtgaaggaggactggaagtatgtggccatggtgattgaccgcatcttcctgtggatgttcatcatcgtgtgcctgctgggcaccgtgggcctcttcctgcccccctggctggccggcatgatctag

SEQ ID NO: 321167 - DNA, 1602 bp, Artificial Sequence
  derived and/or modified sequence
gcccccgagcccggcgaggccccccggctggaccgggcccaccccgggtgtgcctgtgcggagctctccctgctgtggctgtgttgctgcacatttacctcagccgatggcgacttcgcagtgacccacttgactaaggcccacctgttccatgacgggagagtccagtggactccccctgctatctacaagtcctcatgcagcatagatgtgacgtttttccccttcgaccagcagaattgtaccatgaagtttggatcctggacttacgataaggctaagattgacttggtcaatatgcacagtcgggttgatcagctcgatttttgggaaagcggagagtgggtgattgtggatgcagttggcacttataacacacggaaatatgagtgttgcgccgagatctatccagacatcacttatgcctttgtgatccgacggctgccacttttctacacaatcaacctgatcattccgtgtttgctcatttcctgccttacagtgctcgtgttctatcttccgtccgagtgcggcgagaagatcacgttgtgcatttctgtgttgctcagtctgaccgtattcctgctgttgattactgagatcatcccaagtacttctcttgtgatccctctgatcggcgagtaccttctgtttaccatgatcttcgtcaccctttctatagttataaccgtcttcgtcctcaacgtccaccacaggtcaccacggactcacaccatgccgacttgggtgagaagggtttttctggacatcgtgccgcgcttgttactaatgaagcgcccctctgtggtaaaagacaactgtagacggttaatcgagtccatgcacaaaatggccagcgcccctcggttttggcctgaacccgagggagagccacccgccacttccggaactcagtctcttcatcccccttctcccagtttctgtgtaccattggatgtacccgcggagcctggcccctcatgtaaatccccttctgatcagctcccaccccagcagcctctggaggctgagaaggcctcccctcacccatcacctggcccttgtagaccccctcacggcactcaggcacccggcctggctaaggcaaggtccctgagtgtgcagcacatgtcctcaccgggagaagcggtagagggtggcgtgcgctgccggtcccgatccatccagtactgtgtgcctcgcgatgatgccgcccccgaagctgatggacaggccgcaggtgcgctagcaagcaggaatacccattcagccgagttacctccccctgaccagcccagtccatgtaaatgcacttgcaaaaaggagcccagctctgtgtcaccctccgctaccgtgaagacaaggtctacgaaagcccctccccctcacctccccctgagccctgcactgacacgcgccgtggagggggtgcaatacattgccgaccaccttaaggccgaggacactgacttctctgtcaaggaggattggaaatacgtcgccatggtcatcgacagaatatttctatggatgtttattatcgtttgtctgttagggactgtcggcctcttcttgcccccgtggctcgcaggtatgatctag

SEQ ID NO: 321168 - DNA, 1671 bp, Artificial Sequence
  derived and/or modified sequence
atgcggatgagcccccccagcgccagcccccccagcagcagcggcgggaggacatccagctccacaacaaccgccggcgaaccattttgggcaggagtcctattcgcaattcgacctcatccgggtctgtcaggtcggattgtttggacagccggctgccccggagagggtgccgatggggacttcgcagttacccatctcacaaaggcccatttatttcacgatggtcgggttcagtggactccacccgcgatctataagtcttcttgcagcatcgacgtgacattcttcccattcgaccaacaaaactgcacaatgaagttcggctcatggacctatgataaggctaaaattgacctggtaaatatgcatagtcgagttgatcaacttgacttctgggaatctggggagtgggtaattgtcgatgcggtcggaacatacaacacaagaaaatacgaatgttgcgccgagatttatcctgatatcacctatgcgtttgtaatcagacgtctgccgctcttttacaccattaacctgattatcccttgtctgctgatctcctgcctcactgtcttggtgttttatctgcctagcgaatgtggggagaaaattactctgtgcatttctgttctactcagtctgaccgtgtttctcctgctcattactgaaataattcccagcacctcgctggtcatacccctgatcggtgagtatctcctgttcaccatgatctttgtaaccctgtcaattgtgattaccgtgtttgttcttaacgtacaccatagaagtccacgcacccatacaatgcccacgtgggttagacgggtgttccttgatatagttccacgattactgctgatgaaaaggccatccgtggttaaagataactgtagaagactgatcgaatccatgcataagatggcctccgcacctcggttctggccagaacccgagggagaaccaccagctaccagtggcacgcagtccttgcacccaccatcccccagcttctgcgtgccactggacgtgcccgctgagccagggcccagttgtaaatccccttctgatcaactcccccctcagcaacctctggaggcagaaaaggcaagcccgcaccccagtccaggaccatgtcgtcctccgcatgggacacaagcgcctggattggccaaggcacggtcgctcagtgttcagcacatgtcttccccaggagaggcagtcgaaggcggggttagatgtcgtagcaggagcatccagtactgtgtgccgagagatgacgcggctcccgaagctgacggccaggcagctggagctctggcctctaggaacacacactccgccgagctccctccccccgaccagccgtccccctgcaaatgcacgtgcaagaaagaaccgtcctccgtcagcccaagcgccacagttaagacccggagcacaaaagcacccccgcctcacctacctctctcacccgctctgacccgggccgtggagggggtgcagtatatagcagaccatctgaaagcagaggacacagacttttccgtgaaagaagactggaagtatgttgctatggtaatcgaccgaatattcctgtggatgtttattatagtctgtctgctgggcaccgtgggactctttcttcctccatggttggctgggatgatctag

SEQ ID NO: 321169 - DNA, 1602 bp, Artificial Sequence
  derived and/or modified sequence
gccccagagcctggcgaggcgcctcggctggatagggcccaccctgggtgcgcctgtgctgagctttctctgctgtggctgtgctgttgcactttcacgagtgctgacggtgatttcgcagttacccacctgaccaaagcccacctcttccacgatggaagagtccagtggaccccacctgcaatctataagagcagctgctccatcgatgtgacatttttcccatttgatcagcagaactgtactatgaaattcggctcttggacctatgataaagctaaaatagatctggtcaatatgcattccagggtagaccagctggatttctgggagtcaggcgagtgggtcattgtggacgccgtagggacctacaacactaggaaatacgaatgttgtgccgagatctatccagatatcacatacgcatttgttattcggagactgcccctattctataccatcaatctcatcataccctgtctgctcatctcctgcctcactgtgctggtcttctatctcccctcggagtgcggggagaaaatcacactttgcattagcgtactactctctctcacggtgttcctgttgcttataacagagataatcccatcgactagccttgtgatcccattaattggggagtatctccttttcacaatgatatttgtcaccttgagcatcgttatcactgtctttgttcttaacgtccatcaccgctctccacggacccacaccatgcctacgtgggtgcggagagtattccttgacatagtcccacgcttattgctgatgaagagaccatccgtggtcaaggacaactgccgtagactgattgagtccatgcacaaaatggcttccgcacccagattttggcccgaaccagagggcgagccgccagcaactagcgggacgcagagcctgcatccaccctccccttcattctgtgttccactcgatgttccagcggagcctggtccctcttgcaagagcccaagtgaccagctgccaccccaacaaccccttgaggccgagaaagcctcacctcacccttctcccggaccatgtagacctccccatggcacccaggctccagggcttgctaaagccagatcattaagtgtgcagcacatgagcagccctggagaagccgtggaaggtggggtaaggtgcaggagcaggtccatacagtattgcgtccctagagatgacgctgcgcctgaggccgacggccaggctgcaggcgcactggctagccgaaatacacattccgccgaactgcccccaccagaccagccctcgccttgcaagtgcacatgcaaaaaggagccatcttccgtgagtccttcagcaacggtgaagacgcgttccaccaaagcccctcctcctcatttgccgctatcaccggctctcacacgcgcagtagaaggggtgcagtacatagcagatcatctcaaagccgaggacacagacttctccgtcaaggaggactggaagtacgtggctatggtcatcgatcgtatttttctgtggatgttcatcattgtgtgtctgctcggaaccgttgggctgttccttccaccatggcttgctggtatgatctag

SEQ ID NO: 321170 - DNA, 1671 bp, Artificial Sequence
  derived and/or modified sequence
atgcgcatgagcccccctagtgccagccctccctccagcagcggaggccgaacgagtagttctactacaactgccggagagcccttttgggctggcgtgctgtttgctatcaggccccaccccggactctctggcagaattgtgtggaccgcaggctgcccaggagagggagccgatggagattttgccgtcacacacttgaccaaggctcatctgtttcacgacgggagggtccagtggaccccccctgccatctacaagagctcctgcagtatcgacgttactttttttccgttcgatcaacaaaactgcacaatgaagtttggatcttggacttatgataaggctaagatagacctggtcaacatgcactcaagggtggatcagctggatttttgggagtcgggggagtgggtgatcgtggatgcagtggggacctataatacacgcaaatacgaatgctgtgcagaaatatacccggatattacctatgccttcgtgatcaggcgactcccactcttttataccattaacttaataatcccgtgcttgttgatatcatgcctgacggtgctggtgttttacctgccatccgagtgcggcgagaaaattactctttgcatcagcgttctcttatctctgacagtgttcctgttactgatcaccgaaatcatccctagtacgagtctggtaatcccacttatcggtgagtatctgcttttcaccatgatttttgtgactctgagcatcgttatcacggtgttcgtgcttaacgtgcatcacaggtccccaaggacgcacaccatgcctacatgggtgaggcgggtttttctggatattgtaccaaggctcctgttgatgaaacgcccttcagttgtaaaagacaactgtcgtaggctgattgagtctatgcacaaaatggctagcgctccccgtttctggcctgagcctgaaggagaacccccagcaacctccggcacccagtctctgcacccccctagcccttctttctgcgtgccgctggatgtccccgctgaaccaggaccgtcttgcaagtcccctagcgatcagctgcccccacagcagcctctggaggcagagaaagcctcacctcacccctctccaggcccatgtaggcctccgcacggcacacaggcacctggtctggcgaaagccaggtccctaagtgtccagcacatgagctcacccggtgaagctgtggaaggcggagtgcgctgccggtcccgctccattcagtactgcgtgcccagggatgatgcagcccctgaagcagatggtcaggcagcaggcgctctggcgtcaaggaatacacattccgctgaattgcccccacccgaccagccctcaccgtgcaaatgcacctgtaagaaagaaccatcatcagtaagccccagcgccaccgtcaagactagaagcacaaaggcccctccaccacacttgccactcagccccgctctaactcgagccgtggaaggcgtccaatatatcgctgatcacttgaaagccgaggacaccgacttcagcgtgaaggaagactggaagtacgtcgccatggttattgatcgaattttcctgtggatgttcatcattgtgtgcctgctggggactgtgggactcttcctgcccccttggctggcgggaatgatctag

SEQ ID NO: 321171 - DNA, 5027 bp, Artificial Sequence
  derived and/or modified sequence
gcaccagaacccggggaggcgccgaggctggaccgagcccaccctggctgtgcctgtgccgagctgagcctgctgtggctgtgttgctgcacatttaccagtgctgacggggacttcgcggtcacccacctgaccaaggcccacctgttccatgacgggcgggtgcagtggactcccccggccatttacaagagctcctgcagcatcgacgtcaccttcttccccttcgaccagcagaactgcaccatgaaattcggctcctggacctacgacaaggccaagatcgacctggtgaacatgcacagccgcgtggaccagctggacttctgggagagtggcgagtgggtcatcgtggatgccgtgggcacctacaacaccaggaagtacgagtgctgtgccgagatctacccggacatcacctatgccttcgtcatccggcggctgccgctcttctacaccatcaacctcatcatcccctgcctgctcatctcctgcctcaccgtgctggtcttctacctgccctccgagtgtggcgagaagatcacgctgtgcatctccgtgctgctgtcgctcaccgtcttcctgctgctcatcaccgagatcatcccgtccacctcactggtcatcccactcatcggcgagtacctgctgttcaccatgatcttcgtcaccctgtccatcgtcatcacggtcttcgtgctcaacgtgcaccaccgctcgccacgcacgcacaccatgcccacctgggtacgcagggtcttcctggacatcgtgccacgcctgctcctcatgaagcggccgtccgtggtcaaggacaattgccggcggctcatcgagtccatgcataagatggccagtgccccgcgcttctggcccgagccagaaggggagccccctgccacgagcggcacccagagcctgcacccgccctcaccgtccttctgtgtccccctggatgtgccggctgagcctgggccttcctgcaagtcaccctccgaccagctccctcctcagcagcccctggaagctgagaaagccagcccccacccctcgcctggaccctgccgcccgccccacggcacccaggcaccagggctggccaaagccaggtccctcagcgtccagcacatgtccagccctggcgaagcggtggaaggcggcgtccggtgccggtctcggagcatccagtactgtgttccccgagacgatgccgcccccgaggcagatggccaggctgccggcgccctggcctctcgcaacacccactcggctgagctcccacccccagaccagccctctccgtgcaaatgcacatgcaagaaggagccctcttcggtgtccccgagcgccacggtcaagacccgcagcaccaaagcgccgcccccgcacctgcccctgtcgccggccctgacccgggcggtggagggcgtccagtacattgcagaccacctgaaggccgaagacacagacttctcggtgaaggaggactggaagtacgtggccatggtcatcgaccgcatcttcctctggatgttcatcatcgtctgcctgctggggacggtgggcctcttcctgccgccctggctggctggcatgatctaggaagggaccgggagcctgcgtggcctggggctgccgtgcacggggccagcatccatgcggccggcctggggccgggctggcttctccctggactctgtggggccacacgtttgccaaattttccttcctgttctgtgtctgctgtaagacggccttggacggggacacggcctctggggagaccgagtgtggagctgcttccagttggactgtggcctcaggaggcagtggcttggagcagaggtgggggtcggcgccttctacctgcaggactcgggctaagtccagttcaagagtctcctgagctcccctgcagatggaactcactcctcccagtctctcagcagatctggtgatggtcccgaccgccccaaggggcccttgaagggagttcacgccccttcagccccaagcgccccgtcttctggaggcccggccgcctctcccacccaccgtgtcctgcgcctgtgtgggcttcaacttctcccccagggtccttgagcctctcgggccccatgagggtgagccagcagcgctccaatctgcttcgctaggagagggtccaggcagggattgtgtttggttgtgttttgggtaagttagtgagaactcaagtcttgtgcctaaggagccttggagaacagagttttgtggagctggttccgcgtggggagaatcgggaggcccacgcgggaccagctctcccctgcgcaggccctccgcgggggacaggaacacccagccccagcgagtctggagaccaggactctgccttccaggcgtagggccagggctctggcaggtggccagggctccacgggggcctagtggcttcagcccctggggtacttctgtgttgtgattccccggagctgggaaggtcccgaatggagtccagacctgggccctggttcccccaggaccctgagggtttccaccttggcgcgcagcccgggagatccgccctgggctctgggttcgggaagaaggacttcctgctacagtagctgtggggagctggtgggggcatccttgaggacctccacctgggagatgctgggaccctcggggcaggaagtccctgagaagcctcatgggagtcagggagccctggggtttccacacaggcccatgccctccgtcctggcagggcaggcagagctcagcacagcctcacccctgcaggcggtatccagaggtgagggaggcctgaaatgtttccaggcatgaccctggagcccggcagtgcaccccctaaagatggcgcacccggcagccccccagtgtccccaggggcacacttccccttgggatgggcacaggctgccccacccctccatgattccaagggcccagaggggcggggccaggatggcgtgtcccctgcctgtgagtgacatcggttcaggaggagacagtcaggaagcctcctgctgagtggtccacattctgctgcccccagaccccatccagccaggggtggggatggggttgggctctgcgtcccactgagtctcattcctctgtccccgagccgagctctcctgggccagggtctcgtcaggaggtgcctgagagcagaatgaataattgaggttaggaacccggcatgccgagtgccccagaaatgccgctgtgtccccgcgggcagtgacgtgagtggggaggagactcaggcccacattgcccacacctgcctctgaactgctgctggtcacccccacccccgggtgcctgtgaccggggtcctgaggctggggcttttgtgccaggagtgggtgggacacagagacccccgtgccaaatcctgggcatccccagccccctggcccctcccacatcccccgtgtattcaggaccccatctgctgagctctgacctgcccccgctctgccatcagcccctgctgctcctcggccagagctcccaggacgcagggagaccctgggagagtgaggtcatcccggggccatggaagctggcaggagacactggtctcagaggagggatagagacgcagatttcagatgtaagaagcccgatccacattgcataagtggacccagctgccagatgtgtgggcagctgcagggagtggcccggggtgctgggcccagctgtggttgttcttttctgggtcaggagtgactgcggagtggctgggacgctcctgccgggggaccctcctgccgggggtggccgcttgcctgggggaagacccctttccctttctttttttttttgaggctcaaaaaaaaaatccaaataaagcaccatattcccaccacgccaaattaaccttgacaacaatgttggcgtatttgcgtccagtgctgtttttattaattaaggtaaaatttacatatggtgagatgcatgctcttcagtggagacccagcccctagaaggtccctccagcccttcctgtcggcgtccctccccatctgtggctctgacttaagcaccgtggattgacctctccggctcacgaccttcgaggagtcagaatcctgcagttggagcctttgatgtctggcttcttcatcctatgacttagagcttcatccgtgctgttgtgtgtgtccgtagctccttgctgtctgttccttcgtttttaattgtgagcagtgttcttctgtctgaataaactaagacgcagtttgtccatcacctgttagtggactttgcttgcagctgtcggtgattaggaatggaggtgccggtgtgtgcatggcactctatccgttatgcatgtttattttctgcatctgttaatgttttaacatctttcagacccaggactgctcctcctagggccagttagttcccgggggtggacagcttgcctagaacccaccttgccagggctgtgacccccgaccccctatcaaagtctcacactaagccaacgtttccccgccctgtgccaggcaccaggcagcgggagacactgctgcagctcgaagcctgccggggcgccggcccctctgcggctgcttgcgccatcctgccccctccttcccaggggaggccccagtgaaggccctggccagggcttcccagccccttctgcctccggaccggcctgggtgcttcccgtgtggcccggcctggggcgacgtggccctcctctcaggaagcgtggtaatctctcaatggctggcctccggagttgtcactcaggctcccttgtaagttaaggccgggcccaggacactctagggcacgcagctgctgtgggactgctgggttaggtgtcccctggagcagaggcggcttcggatttctaaagtggctgagtcctttcaccttgcaccagaaatgctggatcaggcgcagcacacacagcacctggggatgcaagcccggccagccccatggaccaagccccgccgaccgtgtggcccgccgagcccaggtgcggc

SEQ ID NO: 321172 - DNA, 2075 bp, Artificial Sequence
  derived and/or modified sequence
ccacaggagaagacgaaccgggcccagcagccatgtggagacccgggcccacgccgaggagcggctcctgaagaaactcttctccggttacaacaagtggtcccgacccgtggccaacatctcggacgtggtcctcgtccgcttcggcctgtccatcgctcagctcattgacgtggatgagaagaaccagatgatgaccacgaacgtatgggtgaagcaggagtggcacgactacaagctgcgctgggacccagctgactatgagaatgtcacctccatccgcatcccctccgagctcatctggcggccggacatcgtcctctacaacaactgcaggagagcccttttgggcaggagtgcttttcgccatcagaccccatcctggcctttctgggagaatagtgtggactgcagggtgccctggagagggtgctgacggggacttcgcggtcacccacctgaccaaggcccacctgttccatgacgggcgggtgcagtggactcccccggccatttacaagagctcctgcagcatcgacgtcaccttcttccccttcgaccagcagaactgcaccatgaaattcggctcctggacctacgacaaggccaagatcgacctggtgaacatgcacagccgcgtggaccagctggacttctgggagagtggcgagtgggtcatcgtggatgccgtgggcacctacaacaccaggaagtacgagtgctgtgccgagatctacccggacatcacctatgccttcgtcatccggcggctgccgctcttctacaccatcaacctcatcatcccctgcctgctcatctcctgcctcaccgtgctggtcttctacctgccctccgagtgtggcgagaagatcacgctgtgcatctccgtgctgctgtcgctcaccgtcttcctgctgctcatcaccgagatcatcccgtccacctcactggtcatcccactcatcggcgagtacctgctgttcaccatgatcttcgtcaccctgtccatcgtcatcacggtcttcgtgctcaacgtgcaccaccgctcgccacgcacgcacaccatgcccacctgggtacgcagggtcttcctggacatcgtgccacgcctgctcctcatgaagcggccgtccgtggtcaaggacaattgccggcggctcatcgagtccatgcataagatggccagtgccccgcgcttctggcccgagccagaaggggagccccctgccacgagcggcacccagagcctgcacccgccctcaccgtccttctgtgtccccctggatgtgccggctgagcctgggccttcctgcaagtcaccctccgaccagctccctcctcagcagcccctggaagctgagaaagccagcccccacccctcgcctggaccctgccgcccgccccacggcacccaggcaccagggctggccaaagccaggtccctcagcgtccagcacatgtccagccctggcgaagcggtggaaggcggcgtccggtgccggtctcggagcatccagtactgtgttccccgagacgatgccgcccccgaggcagatggccaggctgccggcgccctggcctctcgcaacacccactcggctgagctcccacccccagaccagccctctccgtgcaaatgcacatgcaagaaggagccctcttcggtgtccccgagcgccacggtcaagacccgcagcaccaaagcgccgcccccgcacctgcccctgtcgccggccctgacccgggcggtggagggcgtccagtacattgcagaccacctgaaggccgaagacacagacttctcggtgaaggaggactggaagtacgtggccatggtcatcgaccgcatcttcctctggatgttcatcatcgtctgcctgctggggacggtgggcctcttcctgccgccctggctggctggcatgatctaggaagggaccgggagcctgcgtggcctggggctgccgtgcacggggccagcatccatgcggccggcctggggccgggctggcttctccctggactctgtggggccacacgtttgccaaattttccttcctgttctgtgtctgctg

SEQ ID NO: 321173 - DNA, 1602 bp, Artificial Sequence
  derived and/or modified sequence
gcccccgagcccggcgaggcccccagactggacagagcccaccccggctgcgcctgcgccgagctgagcctgctgtggctgtgctgctgcaccttcaccagcgccgacggcgacttcgccgtgacccacctgaccaaggcccacctgttccacgacggcagagtgcagtggaccccccccgccatctacaagagcagctgcagcatcgacgtgaccttcttccccttcgaccagcagaactgcaccatgaagttcggcagctggacctacgacaaggccaagatcgacctggtgaacatgcacagcagagtggaccagctggacttctgggagagcggcgagtgggtgatcgtggacgccgtgggcacctacaacaccagaaagtacgagtgctgcgccgagatctaccccgacatcacctacgccttcgtgatcagaagactgcccctgttctacaccatcaacctgatcatcccctgcctgctgatcagctgcctgaccgtgctggtgttctacctgcccagcgagtgcggcgagaagatcaccctgtgcatcagcgtgctgctgagcctgaccgtgttcctgctgctgatcaccgagatcatccccagcaccagcctggtgatccccctgatcggcgagtacctgctgttcaccatgatcttcgtgaccctgagcatcgtgatcaccgtgttcgtgctgaacgtgcaccacagaagccccagaacccacaccatgcccacctgggtgagaagagtgttcctggacatcgtgcccagactgctgctgatgaagagacccagcgtggtgaaggacaactgcagaagactgatcgagagcatgcacaagatggccagcgcccccagattctggcccgagcccgagggcgagccccccgccaccagcggcacccagagcctgcacccccccagccccagcttctgcgtgcccctggacgtgcccgccgagcccggccccagctgcaagagccccagcgaccagctgcccccccagcagcccctggaggccgagaaggccagcccccaccccagccccggcccctgcagacccccccacggcacccaggcccccggcctggccaaggccagaagcctgagcgtgcagcacatgagcagccccggcgaggccgtggagggcggcgtgagatgcagaagcagaagcatccagtactgcgtgcccagagacgacgccgcccccgaggccgacggccaggccgccggcgccctggccagcagaaacacccacagcgccgagctgcccccccccgaccagcccagcccctgcaagtgcacctgcaagaaggagcccagcagcgtgagccccagcgccaccgtgaagaccagaagcaccaaggccccccccccccacctgcccctgagccccgccctgaccagagccgtggagggcgtgcagtacatcgccgaccacctgaaggccgaggacaccgacttcagcgtgaaggaggactggaagtacgtggccatggtgatcgacagaatcttcctgtggatgttcatcatcgtgtgcctgctgggcaccgtgggcctgttcctgcccccctggctggccggcatgatctag

SEQ ID NO: 321174 - DNA, 1671 bp, Artificial Sequence
  derived and/or modified sequence
atgagaatgagcccccccagcgccagcccccccagcagcagcggcggcagaaccagcagcagcaccaccaccgccggcgagcccttctgggccggcgtgctgttcgccatcagaccccaccccggcctgagcggcagaatcgtgtggaccgccggctgccccggcgagggcgccgacggcgacttcgccgtgacccacctgaccaaggcccacctgttccacgacggcagagtgcagtggaccccccccgccatctacaagagcagctgcagcatcgacgtgaccttcttccccttcgaccagcagaactgcaccatgaagttcggcagctggacctacgacaaggccaagatcgacctggtgaacatgcacagcagagtggaccagctggacttctgggagagcggcgagtgggtgatcgtggacgccgtgggcacctacaacaccagaaagtacgagtgctgcgccgagatctaccccgacatcacctacgccttcgtgatcagaagactgcccctgttctacaccatcaacctgatcatcccctgcctgctgatcagctgcctgaccgtgctggtgttctacctgcccagcgagtgcggcgagaagatcaccctgtgcatcagcgtgctgctgagcctgaccgtgttcctgctgctgatcaccgagatcatccccagcaccagcctggtgatccccctgatcggcgagtacctgctgttcaccatgatcttcgtgaccctgagcatcgtgatcaccgtgttcgtgctgaacgtgcaccacagaagccccagaacccacaccatgcccacctgggtgagaagagtgttcctggacatcgtgcccagactgctgctgatgaagagacccagcgtggtgaaggacaactgcagaagactgatcgagagcatgcacaagatggccagcgcccccagattctggcccgagcccgagggcgagccccccgccaccagcggcacccagagcctgcacccccccagccccagcttctgcgtgcccctggacgtgcccgccgagcccggccccagctgcaagagccccagcgaccagctgcccccccagcagcccctggaggccgagaaggccagcccccaccccagccccggcccctgcagacccccccacggcacccaggcccccggcctggccaaggccagaagcctgagcgtgcagcacatgagcagccccggcgaggccgtggagggcggcgtgagatgcagaagcagaagcatccagtactgcgtgcccagagacgacgccgcccccgaggccgacggccaggccgccggcgccctggccagcagaaacacccacagcgccgagctgcccccccccgaccagcccagcccctgcaagtgcacctgcaagaaggagcccagcagcgtgagccccagcgccaccgtgaagaccagaagcaccaaggccccccccccccacctgcccctgagccccgccctgaccagagccgtggagggcgtgcagtacatcgccgaccacctgaaggccgaggacaccgacttcagcgtgaaggaggactggaagtacgtggccatggtgatcgacagaatcttcctgtggatgttcatcatcgtgtgcctgctgggcaccgtgggcctgttcctgcccccctggctggccggcatgatctag

SEQ ID NO: 321175 - DNA, 1557 bp, Artificial Sequence
  derived and/or modified sequence
atggatcagactcccccagcacgccccgagtacctcgtcagtggaattcgcacccctcctgtgcggagaaattctaagctggctacactggggagaatctttaagccttggaagtggcgcaagaagaagaatgagaagctgaaacagacgacttctgctctggaaaagaagatggctggccgccaaggccgagaggagttgatcaaaaagggactcctcgaaatgatggagcaagatgcggagtccaagacctgcaaccccgacggaggtcccaggtcagtccaatccgaacctcccaccccaaagagtgagactctgacctccgaggacgctcagccgggttctccactggccaccggcacagatcaggtgtcgcttgacaaaccattgtctagcgcggcacacctggatgatgccgcaaaaatgcccagcgccagttccggggaggaagccgacgcaggcagtctgctgcctaccaccaacgagctgtctcaggcgctggcaggtgctgattccctcgactcccccccgcggcccctggaacgttcagtggggcagctgccctcccctcccctcttaccaactccaccacccaaggccagcagcaaaacaaccaaaaatgtgacaggacaggccaccctcttccaagcttcctctatgaagtctgcagatccaagtctcaggggacagctctctacgcccaccggcagtcctcacctaaccaccgtccatcgccctctccctcccagccgggtcatcgaggaattacaccgggcgctggccacgaaacaccgtcaggatagtttccaaggtagagagtctaaaggatccccaaaaaagcgccttgatgtgcgcctgtcccggacgtccagtgtggaacgcggaaaagaacgcgaggaagcctggagcttcgacggcgccttagaaaataagcgcacggccgccaaagagagcgaggagaacaaagaaaatttaataatcaactcagaacttaaagatgatctgcttttataccaggacgaggaagccttaaatgatagtatcatctctggcaccctgccacgcaaatgtaagaaggaattacttgcagtgaagctcaggaataggccaagcaagcaggagcttgaggaccgtaacatcttcccgagacgaaccgatgaggagagacaggaaatcagacagcagatcgaaatgaaattgtctaagcgcctcagccagagacccgccgtggaagagttggaaaggagaaatattcttaagcagaggaatgaccagactgagcaagaagaacgacgagagataaaacagcggctcacccgaaagttgaaccagaggcccacagtggatgaattgagagatcggaagatccttattaggttttcagattacgtcgaagtggctaaggcgcaggactacgacaggcgagccgataaaccctggactagacttagtgccgcagacaaagctgcgatccgtaaggagctgaatgagtacaagtcaaacgaaatggaggtgcacgcttcctccaagcacctaacccgatttcatcgaccatag

SEQ ID NO: 321176 - DNA, 1557 bp, Artificial Sequence
  derived and/or modified sequence
atggaccagacacctccagccagaccggagtacttggtgtcgggaatcagaacccctcctgttaggagaaacagcaagcttgcaaccctggggcggatattcaagccctggaaatggcgtaagaaaaagaacgaaaaactgaagcagacaacctcggctcttgagaagaaaatggcgggtcggcagggccgggaggaactaataaaaaagggactgctggagatgatggaacaggatgctgaaagcaaaacttgtaatcctgatggtggtccccgctcagtccaatcagagcccccgacgccaaaatcggaaaccctgaccagcgaagatgcccaacccgggagtcctcttgcaacggggactgatcaggtgagcctcgacaagcctctcagctccgccgctcacctggatgacgcagccaagatgccaagtgcatctagcggggaagaggcggacgccgggagtttgttgccaaccacaaatgagcttagccaggcactggccggcgccgactctctggatagtccaccaaggcctctggagcggagcgtggggcagctcccatccccccctctcctgcccactccacccccaaaagctagcagcaagactaccaagaatgtgacgggacaggccactctcttccaggccagctccatgaagagtgccgatccatctctgcgtggtcagctgagcactcctacgggttcccctcacctgaccaccgtgcatcggcccctgcctccctcgagggttattgaggaactacaccgggcactggcaactaaacatcgacaggactcctttcagggtcgcgagagcaagggctcgcccaaaaagcgcctagatgtaaggctgtctaggacgagctcggtggagcggggcaaggagagagaggaggcatggtcattcgatggggcactggaaaataagcgtaccgccgcaaaggagagcgaggagaacaaggaaaacttaattataaacagcgagctgaaagatgatctgctgctctatcaagatgaggaagcccttaacgactccataatttccggaacattgccaagaaagtgtaagaaggaactgctagcagtgaagctgagaaacaggccgtcaaaacaggagctcgaagatcgaaacatcttccctaggcgcacagatgaggaaagacaggagatcagacagcaaatcgagatgaagctgtctaaaaggttgtctcaacgacctgccgtggaggagctggagcggcggaatatcttgaaacagcgaaatgatcagaccgagcaagaagaaaggcgtgagatcaaacaaagactaactaggaaattgaatcaacgccctacggtagatgaattaagagacagaaagatcctgatcaggttttcagactacgtggaggtggctaaggcccaggactacgaccgtagagcagacaaaccctggaccaggctgtcggctgctgacaaagcagctatacggaaagagctaaatgagtataaatcgaacgagatggaagtccatgccagcagcaagcacctgactaggttccatcgtccctag

SEQ ID NO: 321177 - DNA, 1557 bp, Artificial Sequence
  derived and/or modified sequence
atggatcagacaccgccggccaggcctgagtacctggtgtcaggcattaggacccccccggtgcgccgaaactcaaagcttgccacgctgggcaggatttttaaaccttggaagtggaggaaaaaaaagaatgaaaagctgaagcagaccacatctgctcttgagaaaaagatggccgggagacaaggccgggaagagctcatcaaaaaaggcctcttagaaatgatggaacaggatgccgaaagcaagacgtgcaatccggacgggggccctaggtctgtccagtctgaaccccctacacccaaaagcgaaacactaacttctgaggatgcccagccaggctcgcctctggctaccggaaccgatcaggtgtccctggataaaccgctcagttctgcggcccacctggacgatgcggccaagatgccctcagcctcctctggcgaagaagccgacgcgggttccctccttcctaccactaatgagctctcacaggcacttgcgggcgctgactccctggatagtcccccaagaccacttgagcggtctgtagggcaactcccctcccctcccctccttcctacaccccctcctaaggcgagtagtaaaacaaccaaaaacgtcacaggacaggcaacactgttccaggcttcttctatgaagtccgcagatccatccctgaggggccagctgtccacgccaactggtagcccccatctgacaactgtccaccgaccccttcctcctagtcgcgttatcgaagagctacatagggctttggctacaaagcacagacaggactctttccaaggtagagagagcaagggctcccctaagaagcggctggacgtccgactgagtaggacctcctcagttgagagaggtaaggagcgagaagaagcttggtctttcgatggagccctcgagaataagagaacggccgctaaggagtctgaagagaataaagaaaacctgatcataaattctgaactgaaagacgatctgctgctgtaccaagatgaggaggccttgaacgatagtatcatttccggcaccctgcccaggaaatgtaaaaaggaacttctggccgtgaaactgagaaaccggccctctaagcaggagctggaggaccgcaacatattcccaagaaggacagatgaagagcgacaagagatccggcaacagatcgaaatgaaattgtccaagaggctctcacagcgcccagccgtggaagagctggaaaggcgcaacatcctaaagcaaaggaatgaccagaccgagcaggaggagagacgcgaaattaagcagcgtcttactcgcaagcttaaccagcggcctactgtggatgaattacgcgatcgaaaaatcctgattcggttctcagactacgtggaggtggctaaggcgcaggattacgatcggagagccgataagccatggacccggctatctgcggctgacaaggccgccatccgtaaagaacttaacgagtacaagtccaacgaaatggaggtacacgcatccagcaagcacctcacgcgattccacaggccttag

SEQ ID NO: 321178 - DNA, 1557 bp, Artificial Sequence
  derived and/or modified sequence
atggaccagaccccaccagcccggcctgagtacctggtgtctggcatccgcaccccacctgtgagaagaaacagcaagctggccaccctgggccgcatcttcaagccctggaagtggaggaagaagaagaatgagaagctgaagcagaccaccagcgccctggagaagaagatggccggccggcagggccgggaggagctgatcaagaagggcctgctggagatgatggagcaggatgctgagagcaagacctgcaacccagatggcggccccaggtctgtgcagagcgagccccccacccccaagtctgagaccctgaccagtgaagatgcccagcccggcagccccctggccactggaacagaccaggtgtccctggacaagcccctgagcagcgctgcccacctggatgatgctgccaagatgcccagcgccagcagtggagaggaggctgatgctggcagcctgctgcccaccaccaatgagctgagccaggccctggccggggctgacagcctggacagccccccccggcccctggagaggtctgtgggccagctgcccagcccccccctgctgcccaccccaccacccaaggccagcagcaagaccaccaagaatgtgacaggccaggccaccctcttccaggccagctccatgaagtctgctgaccccagcctgcggggccagctgagcacccccaccggcagcccccacctgaccaccgtgcaccggcccctgccccccagccgggtgattgaggagctgcaccgggccctggccaccaagcaccggcaggacagcttccagggccgggagagcaagggcagccccaagaagaggctggatgtgcggctgagcaggaccagctctgtggagcggggcaaggagcgggaggaggcctggagctttgatggagccctggagaacaagaggacagctgccaaggagagcgaggagaacaaggaaaatctcatcatcaacagcgagctgaaggatgacctgctgctgtaccaggatgaggaggccctgaatgacagcatcatcagcggcaccctgcccaggaagtgcaagaaggagctgctggccgtgaagctgaggaaccggcccagcaagcaggagctggaggacaggaacatcttccccaggagaacagatgaggagcggcaggagatccggcagcagatcgagatgaagctgagcaagaggctgagccagaggcctgctgtggaggagctggagaggaggaacatcctgaagcagagaaatgaccagacagagcaggaggagcggcgggagatcaagcagaggctgaccaggaagctgaaccagaggcccaccgtggatgagctgcgggacaggaagatcctgatccgcttcagtgactatgtggaggtggccaaggcccaggactatgaccggcgggctgacaagccctggacccggctgtctgctgctgacaaggccgccatcaggaaggagctgaatgagtacaagagcaatgagatggaggtgcacgccagcagcaagcacctgacccgcttccaccggccctag

SEQ ID NO: 321179 - DNA, 1557 bp, Artificial Sequence
  derived and/or modified sequence
atggaccagaccccccccgcccggcccgagtacctggtgagcggcattaggacaccaccggtgcgtcggaattccaagctggctacgcttgggaggatttttaagccctggaagtggcgaaagaagaaaaatgagaaactgaaacagacaacaagcgcactggaaaaaaaaatggcgggcagacaaggcagagaagagctgatcaaaaaagggttgctcgaaatgatggaacaggatgccgagtccaaaacatgtaatcccgatggaggcccaagatctgtccagtctgaacctccaactccaaaaagcgaaacacttacatccgaggacgcccagcccggaagtccactggccaccggtaccgaccaggtgtctcttgacaaaccgctcagcagcgccgcccatctcgatgatgcggcaaaaatgccaagtgcctcttccggggaggaggctgatgctggcagcctgctccctaccacaaacgaactgagccaggcactggctggggcagacagcctggattcccccccccgccctctggagcggagcgtcggccaacttccttctcctcctctgttgcccacccccccacctaaagccagctctaaaacgacgaagaacgtgactggacaggccactttgtttcaggccagttcaatgaaatctgccgacccaagtctgagaggccagctgagtacgcccaccggctccccgcatctgacaactgttcatcgcccactgccaccatcacgagtcatagaggagctgcatcgcgctttagcgacaaagcatcgccaggacagctttcagggcagggagtccaaaggatcaccgaagaagcgcctggacgtgcgactgtctagaacctcctcagtggaacgaggcaaagagagagaagaggcttggtctttcgacggcgcactcgagaacaaacgtacagccgcaaaggaaagcgaagaaaataaggaaaatctgattataaatagcgagcttaaggatgatctcttgctgtatcaggacgaggaggcactgaacgactcaatcatcagcggaacattaccccgcaagtgcaaaaaagagcttctcgctgtgaagctccgaaatagaccatctaagcaggaactagaggataggaacattttccctaggcggaccgacgaggaacgccaggaaattaggcagcagattgaaatgaaactttcaaaacgattaagtcaaaggcctgcagtggaggagttagagcgaagaaacatcctcaaacagcgtaatgaccagacagagcaggaagagcgcagggaaatcaagcagcgcctgactcggaagctgaaccaaagacctacagtcgatgagctccgcgacaggaaaatcctgatcagattctctgattacgtcgaggttgcaaaggcccaagattatgatcgaagggcagataagccatggacgagactgtctgctgcagacaaagccgcgatccggaaggagttgaatgaatacaagagtaacgaaatggaagtgcatgcctcgagtaagcacctgacaagattccaccgaccatag

SEQ ID NO: 321180 - DNA, 1557 bp, Artificial Sequence
  derived and/or modified sequence
atggaccagaccccccccgcccggcccgagtacctggtgagcggcatccgcacccctcctgttagaaggaactctaagctggcaaccctcgggagaatcttcaaaccatggaagtggcggaagaagaagaacgagaaactgaaacagactacaagcgcattggagaaaaagatggctggccgtcagggaagggaagagcttattaaaaagggtctccttgagatgatggaacaggatgccgaatctaaaacatgcaaccctgacggcggccctcgctcggtccagtctgagccccccacaccaaagagcgagactctcacgagcgaagacgcccagccaggaagcccgttagccaccggcacagatcaggtgagtctggacaaaccgctctccagcgcagctcacctggacgatgcggcaaagatgccaagcgcgagctctggcgaggaagccgatgccggaagtctcctgccaacaaccaacgaactaagtcaggctctggccggagccgacagcttggactctccccctagaccactggagagaagcgtagggcaacttccgagtccccccctactccccacccctccccctaaggctagctcaaaaaccaccaagaatgtgaccggccaggcgaccctgtttcaggcctccagcatgaagtcggcggacccctctctgcgcggacaactcagcactcccacaggatcaccccacttgacaaccgtgcatagacccctccctcctagcagggtgatcgaggaactacacagggcacttgccacaaagcacagacaggattccttccaaggacgtgaatctaagggcagccccaagaaacgtttggatgtcagactgtcccggactagctcagtggaacgggggaaagagcgcgaggaggcttggtccttcgacggagcactggaaaacaagaggaccgccgctaaggaatctgaggaaaataaggaaaatctgatcatcaatagtgagcttaaggacgacttgctcctgtatcaggacgaggaggccttaaatgactctataatctccggcacccttccccgcaagtgcaagaaggaactgctggccgtaaagctgcggaaccgcccaagcaagcaggagctggaggaccgcaacatttttccacggcggaccgatgaggagcggcaggagatccgacagcagatcgaaatgaagctttcaaaaaggctcagccagcgtcccgctgtcgaagagttagaacgccgtaacatactgaagcaacggaacgatcagaccgaacaagaggaacgccgtgaaatcaagcagagactgacaagaaagctgaatcaaagacctacagtcgacgagttaagagaccggaagatcttgataagattttcagactatgtggaagtggccaaggctcaggattatgaccgcagagccgacaagccctggactcgactctctgcagctgataaagctgccattaggaaagaactgaatgaatataagtctaatgagatggaggtccacgcatcaagcaaacatttgacaagatttcatcgaccctag

SEQ ID NO: 321181 - DNA, 1557 bp, Artificial Sequence
  derived and/or modified sequence
atggaccagaccccccccgcccggcccgagtacctggtgagcggcattcggactcctccagtgcggcgcaattcgaagttggccaccctgggacgcattttcaagccgtggaagtggaggaagaagaaaaatgaaaagttgaagcagaccacgtctgcattagaaaaaaagatggccggtcggcagggaagggaagagctgataaagaagggcctgctggaaatgatggagcaggacgctgaatccaagacctgcaacccagatggtggccccaggtccgttcagtcagaaccccctaccccaaagtccgagaccctaacctccgaggacgcccagccaggttccccgctggctacaggaaccgaccaagtgagtctggataaacccctgtcgtcggcagcccatctggacgatgccgccaaaatgccatccgcttcttccggcgaagaagctgacgccggcagcctgctcccaactaccaacgaattgtcccaggctctcgccggagctgattccctcgattcgcctcccaggccattggagagaagtgtggggcaattgccgtccccccccttgctgcctacaccaccgcctaaagccagcagtaaaaccaccaaaaacgtgacgggccaggccaccctgttccaagcctcctccatgaaatctgctgacccatccctcagaggccagctctccacccctacggggagcccacacttgacaacagtgcaccgcccactgcctccttccagagtcattgaggagttacaccgggccctggcaacgaaacatcgtcaggactctttccaaggtcgggagagcaaaggctctccaaagaaacgtctcgatgtccgactgagtcgcactagtagcgtcgaacggggcaaggagagagaagaggcctggagcttcgacggtgctctggagaacaagcggacggccgccaaggagtccgaggagaacaaagagaatctgataatcaactctgaacttaaggatgaccttctgctttatcaggacgaagaagccctcaacgatagcattatcagtggcacgcttcctagaaagtgcaagaaagagttactagcagtcaaactccgcaacaggccaagcaaacaggagctcgaggacaggaacatttttccaagaaggacagacgaggagagacaggaaatcagacagcagatcgaaatgaaactgtctaagcgcctgtcacaacgcccagccgtcgaggagctggagcgccggaacattctgaagcagcgcaatgaccaaacagagcaggaagagcggcgtgagattaagcaacgcctgactagaaaactcaaccagagacctactgtcgacgagttacgggatcggaaaattctgatcagattttcagactatgtggaggtagcaaaggcacaggactatgatagacgcgctgataaaccctggacgcgcctgtcagccgcggataaggctgccatccggaaggaacttaatgagtataaatcaaatgagatggaggttcacgctagcagtaagcatctaactagattccatcggccatag

SEQ ID NO: 321182 - DNA, 1557 bp, Artificial Sequence
  derived and/or modified sequence
atggaccagactcctccagccaggccagagtacctcgtctctggcattaggaccccacccgttaggaggaactcaaagctggcaacattggggcgtatcttcaaaccctggaagtggcggaagaagaagaatgagaagttgaagcagacaactagcgcactcgagaagaaaatggccggaaggcagggacgcgaagaattaattaaaaaagggctgctggagatgatggaacaagatgctgagtccaaaacctgcaaccccgacggtggaccacggtccgttcagtccgagcctcccacacctaagtcagagacgttaacctcggaggacgctcagcccggtagtcccctggccaccgggaccgatcaggtgagcctggataagccactcagcagcgcagctcacctggatgacgccgctaaaatgcctagcgctagttcaggagaggaagccgacgctgggagcctcctccccactactaatgaactcagccaggcactcgcaggcgctgacagccttgattctccgcctcgacccctggaacgcagtgttggtcagctcccatctcctccgctgctaccaaccccccctccgaaagcctctagtaagactacaaagaatgtgacaggacaggcgacactctttcaggcctcaagcatgaaatccgccgatccgagcctccggggtcaattgtctacccccactggctccccacacctgaccactgtccaccggcctctgccaccttcacgcgttattgaggaactccaccgcgctcttgcgactaaacataggcaggactcttttcagggcagagagtctaaaggttcccctaaaaaaagactcgacgtaaggctctctagaacatcgtcagtggagcggggaaaggagcgggaggaggcttggtccttcgacggcgcacttgagaacaaaaggaccgctgcgaaggagtctgaggagaataaggaaaaccttattattaactccgagctgaaagacgatctgttgctgtatcaggacgaggaagcgctgaacgactcgatcatatccggaactctgcccaggaaatgcaaaaaagaactgttggctgtgaaactgagaaacaggcctagcaagcaggagcttgaggataggaacatcttcccgaggcgcactgatgaggagcgacaagagatcaggcaacagatagagatgaagctctctaagcgcctgagtcagcggccagcagtggaggagctggagcggaggaacatactgaaacagcgtaatgaccagaccgaacaagaagaacgacgggagatcaagcaacggcttacaagaaaacttaaccagcggccaactgtcgatgagctgcgcgaccggaaaattcttatccggtttagtgattatgtcgaagtagctaaggcccaggactacgaccgcagggccgataaaccctggacacgactatcggccgcagataaagcagctatccgtaaggagctcaacgagtacaaaagtaatgaaatggaagtgcacgcctctagtaaacacttaactagatttcaccgtccatag

SEQ ID NO: 321183 - DNA, 1557 bp, Artificial Sequence
  derived and/or modified sequence
atggatcaaacccccccagccaggccagaatatctcgtctctggcatccgtacccctccagtccgtaggaactcaaagctggccacgctgggcagaattttcaagccatggaagtggcgaaagaagaaaaacgagaagctcaagcagaccaccagcgcactcgagaaaaagatggctggcaggcaggggagagaggagctcataaagaaggggctcctcgagatgatggagcaggatgctgagtcaaagacatgcaaccccgacggcggacctcgctctgttcagtctgaaccgcctactcccaagtccgaaacactcaccagcgaagacgctcaacctgggagcccactggcaacaggaacagaccaagtgtcgctggacaagcctctctcatctgccgctcatctggacgatgcagccaagatgccctctgcatcaagcggcgaggaggccgacgcgggatcacttttgccaaccaccaacgagctgtcacaggcgctggcaggcgcagactcgctggattcacctccacggccattggaaagaagcgtggggcaactccccagcccgccactgttgcccacaccgcctcccaaggcctctagtaagacaaccaaaaatgtgacgggacaggcgaccctgtttcaggccagttcaatgaaatctgcggacccctctctccggggacagctgtcgacaccaaccgggagtccccatcttacaacagtgcaccggccactgcccccttcgcgggtgattgaagaacttcacagagcgcttgccaccaaacatcgtcaggattcatttcagggcagggaaagcaagggatctccaaagaaacggttagatgtcagactatctaggaccagctcggtcgaacggggtaaggagcgcgaagaggcctggagttttgatggagcactcgaaaacaagcggaccgcagctaaagagtccgaagagaacaaggagaacctcatcataaatagtgaattgaaagatgatctactgctgtatcaggacgaggaggcgctcaatgattcgatcatcagcgggacactgcctcgcaagtgtaaaaaagaacttttggccgtgaaactgcgcaacaggccaagtaaacaggagctggaggatcgaaacatctttccacggaggactgacgaggagagacaagaaattagacagcaaatcgaaatgaagttgtccaagaggttatcgcaacgccctgccgttgaggagctcgaacggagaaatattctcaagcagaggaatgaccaaaccgagcaagaggaaaggcgagagatcaagcagcggctcacacggaagctgaaccagcgaccgactgtcgacgagctgagagatcgcaagattctcatccgattttcggactacgtcgaggtagccaaggcccaagattatgaccggagagccgataagccctggaccaggctgtctgcggctgataaggccgcaataagaaaggaactcaacgagtacaagagcaacgagatggaggtccacgcatcctccaagcacctgacccgattccacaggccctag

SEQ ID NO: 321184 - DNA, 1557 bp, Artificial Sequence
  derived and/or modified sequence
atggaccaaactcctcccgcacgccctgaatatctggtgtcaggcattcgaacacccccagttcgaaggaattcaaaactggctactttgggccgtatttttaagccctggaagtggcgcaagaaaaagaatgagaagcttaagcagactaccagcgccctggagaagaagatggccggtcggcagggacgcgaagaactcatcaagaaagggctgctggaaatgatggagcaggatgccgagtccaagacttgcaatcccgatggaggaccacgctcagtgcagtctgagcctcccactcccaaaagtgaaaccctgacatccgaagacgctcagccaggatccccattggcgaccggaaccgaccaagtgtcccttgataaaccgctgagttcagctgcccatctggacgatgcagccaaaatgcctagcgcttccagcggtgaggaggcagacgcgggaagcctgctgcccaccaccaatgagttatctcaagccttggctggcgctgattccctggactcgccacccagacctctggaaagaagtgtgggacagttgccctccccaccactcctacccacccccccaccaaaggcttcttccaaaaccactaaaaatgtgaccgggcaggcaactcttttccaggcttcttccatgaaatctgcggacccctccctgagggggcagctgtcaaccccgacagggtctccacacctgacaaccgtgcaccggccacttccaccttctcgtgtgatcgaggaactccatcgggctcttgcaaccaaacatcggcaggattcattccaggggagggaaagcaaggggtcacctaaaaaacgcctggacgtgcggctgtcaaggaccagcagtgtagagagaggcaaagagagggaagaagcatggtcttttgatggcgctctggagaacaagagaaccgcagccaaagagtcggaggagaacaaggagaatctaattatcaattcggagcttaaggacgatttgcttctctatcaggacgaggaagccctgaacgactccatcataagcgggacccttcccaggaaatgcaaaaaagagctgttggcagtaaagttgcgaaacaggcccagtaagcaggagttggaagatcggaatatctttccacggaggaccgatgaggaacgccaggagataaggcagcagattgagatgaagttgtcaaaaagattatctcaacgtcccgctgtggaggagcttgaaagaaggaacatccttaagcagagaaacgatcagacagaacaggaggaacggagggagattaaacaaagactgacccggaagctcaaccagcgccctaccgtagatgagctgcgggatcggaaaattcttattcgcttcagcgactatgtggaggtcgcaaaagcccaagactatgatagaagagccgacaaaccctggaccaggttgtctgccgctgataaagccgcaatccgcaaggagctgaacgagtataagtcgaacgagatggaggtgcacgcttcatctaagcacctcactcggtttcataggccctag

SEQ ID NO: 321185 - DNA, 1557 bp, Artificial Sequence
  derived and/or modified sequence
atggaccagaccccccccgccagacccgagtacctggtgagcggcatcagaaccccccccgtgagaagaaacagcaagctggccaccctgggcagaatcttcaagccctggaagtggagaaagaagaagaacgagaagctgaagcagaccaccagcgccctggagaagaagatggccggcagacagggcagagaggagctgatcaagaagggcctgctggagatgatggagcaggacgccgagagcaagacctgcaaccccgacggcggccccagaagcgtgcagagcgagccccccacccccaagagcgagaccctgaccagcgaggacgcccagcccggcagccccctggccaccggcaccgaccaggtgagcctggacaagcccctgagcagcgccgcccacctggacgacgccgccaagatgcccagcgccagcagcggcgaggaggccgacgccggcagcctgctgcccaccaccaacgagctgagccaggccctggccggcgccgacagcctggacagcccccccagacccctggagagaagcgtgggccagctgcccagcccccccctgctgcccacccccccccccaaggccagcagcaagaccaccaagaacgtgaccggccaggccaccctgttccaggccagcagcatgaagagcgccgaccccagcctgagaggccagctgagcacccccaccggcagcccccacctgaccaccgtgcacagacccctgccccccagcagagtgatcgaggagctgcacagagccctggccaccaagcacagacaggacagcttccagggcagagagagcaagggcagccccaagaagagactggacgtgagactgagcagaaccagcagcgtggagagaggcaaggagagagaggaggcctggagcttcgacggcgccctggagaacaagagaaccgccgccaaggagagcgaggagaacaaggagaacctgatcatcaacagcgagctgaaggacgacctgctgctgtaccaggacgaggaggccctgaacgacagcatcatcagcggcaccctgcccagaaagtgcaagaaggagctgctggccgtgaagctgagaaacagacccagcaagcaggagctggaggacagaaacatcttccccagaagaaccgacgaggagagacaggagatcagacagcagatcgagatgaagctgagcaagagactgagccagagacccgccgtggaggagctggagagaagaaacatcctgaagcagagaaacgaccagaccgagcaggaggagagaagagagatcaagcagagactgaccagaaagctgaaccagagacccaccgtggacgagctgagagacagaaagatcctgatcagattcagcgactacgtggaggtggccaaggcccaggactacgacagaagagccgacaagccctggaccagactgagcgccgccgacaaggccgccatcagaaaggagctgaacgagtacaagagcaacgagatggaggtgcacgccagcagcaagcacctgaccagattccacagaccctag

SEQ ID NO: 321186 - protein, 448 aa, Artificial Sequence
  derived and/or modified sequence
MDQTPPARPEYLVSGIRTPPVRRNSKLATLGRIFKPWKWRKKKNEKLKQTTSALEKKMAGRQGREELIKKGLLEMMEQDAESKTCNPDGGPRSVQSEPPTPKSETLTSEDAQPGSPLATGTDQVSLDKPLSSAAHLDDAGQATLFQASSMKSADPSLRGQLSTPTGSPHLTTVHRPLPPSRVIEELHRALATKHRQDSFQGRESKGSPKKRLDVRLSRTSSVERGKEREEAWSFDGALENKRTAAKESEENKENLIINSELKDDLLLYQDEEALNDSIISGTLPRKCKKELLAVKLRNRPSKQELEDRNIFPRRTDEERQEIRQQIEMKLSKRLSQRPAVEELERRNILKQRNDQTEQEERREIKQRLTRKLNQRPTVDELRDRKILIRFSDYVEVAKAQDYDRRADKPWTRLSAADKAAIRKELNEYKSNEMEVHASSKHLTRFHRP

SEQ ID NO: 321187 - protein, 41 aa, Artificial Sequence
  derived and/or modified sequence
MAASEDGSGCLVSRGRSQSDPSVLTDSSATSSADAGENPDE

SEQ ID NO: 321188 - DNA, 2162 bp, Artificial Sequence
  derived and/or modified sequence
cattcaaacccagtccattctggctcatggggcccaagccttgctctgctgccccaggctgtgtaggatgcatctgcggtggccattcttctctccagaggtccttcctaggactgactttgtggagattctgtgctggtaggtggcggggcaagacacgcctgtctctccccctggaaggagtcagtccagcaagaaacctgatgaaaccagtgactcccagctctggatgagatggaccaaacgcccccggcgcgtcctgaatatctggtctcagggattcgaactccccctgtgaggaggaacagcaaactggccaccctgggcaggatcttcaaaccctggaaatggaggaaaaagaaaaacgaaaaactgaagcagacaacgtcagcgctggagaagaagatggccggcaggcaaggccgagaggagctcatcaagaaggggctgctggagatgatggagcaggatgctgaaagcaaaacttgcaaccccgatggaggaccccgatctgtacagagtgaaccacccactcccaagtcggagacgctgacttcagaagatgcccagcccggaagccccttggccactgggacggaccaggtctccctggacaagccactgtcctcagctgcccacttggacgatgcaggccaagccacactcttccaagcctccagcatgaagagtgccgacccttccctccggggccagctctccacacccacggggtctccgcatctcaccacggtccaccggcctcttcccccaagccgcgtcattgaggagctgcacagggcgctggccacgaagcaccgccaggacagttttcaaggaagagaaagtaaagggtctccaaagaagcggctggatgtccgtctgtcgagaacgtccagcgtggagcggggcaaggagagggaggaggcttggagctttgacggggcattggagaacaagcgaactgccgctaaggaatctgaggagaacaaggagaacctgatcataaattctgaactcaaagacgacttgcttttgtatcaggacgaggaggcgctgaacgactccattatttctggaacactgccacggaaatgcaagaaggagctcctggccgtgaagctaaggaaccggccaagcaaacaggaactagaagaccggaacattttccccagaaggactgatgaagaaagacaggagatccggcagcagatcgagatgaagctttccaaacggctgagccaaagacctgccgtggaagagctggagagaagaaatatcttgaaacaaaggaatgatcagacagagcaggaagaaagaagagaaatcaagcaaagattgacaagaaagcttaatcagagacccactgttgatgaattaagagacagaaaaattctgatacgattcagtgattacgtggaagtagcaaaagcgcaggactatgacaggagggcagacaaaccctggacgagactgtcagcagcagataaggcagcaattcgtaaagaattaaatgagtacaaaagtaatgaaatggaggtacatgcatcaagcaagcacttgacaagattccacaggccatagagattttcttctgagaagaatttgtgtttaattttttgataccaacactgaacattcatcagggaactttcctgaagttcagctcaagactaccctacctgctgtgtttgtgagaagagtaggatcacacacacaggtgcaatcttgaccacacttacctgcaagaggagtaaccagaggacacacttccttccttctttggtgtctgaggagtgtgaactgttggggtcagttaagacccaacataactctatcagaagaaaactgttgtttgcctttcaaccttgttttacagttctgcagtgtaatggaggacgggcaacgtgcatgtgcaggctcaccactcccaggcctctgacatgagggacatgtgacagtgtcattcagtattatgttcaaaagacatttttatcctgatcataattaatttgaaaactctttaagttcatgttatacaagatgatttactgtattatacttttccttttttatataatgtctaacaaaaaatacagctgcaacattttgattcctgttaattttgttctttaattaaatgactacttattgcaggaaattaa

SEQ ID NO: 321189 - DNA, 2518 bp, Artificial Sequence
  derived and/or modified sequence
gcaattgcaagagcaaagattcttccttttcccttttttcctgggggggtggggggtggggtggggggagggagcgcccccagacattccaggacatcaccccctgccccaagcacgcaataaacactgacaagaaaaagtttttatttcctggttcaacttttttttttttccctggaatatagactgaagaatgggaataaacacgaataaataacaaagcgaggccgcgcacgccgggatgcgcctggctgcagccggcgaggctattgtctccccgccctgaagccagccccggcgtctttctccagctcgtttcctttcccggccttttttttttttttttttttttaattttcttttttaaaaagacgccccctccagccccctcgccggtgaccttggccgcctcggatgctctgattccacgcggctcgctctaacttgcccccgcgccggccgggcccatggccgcgtcggaggacgggagcggctgcctcgtgtcgcggggccgctcgcagagtgaccccagcgtcctcaccgactcctcggccacctcctccgcggacgccggggagaacccagatgagatggaccaaacgcccccggcgcgtcctgaatatctggtctcagggattcgaactccccctgtgaggaggaacagcaaactggccaccctgggcaggatcttcaaaccctggaaatggaggaaaaagaaaaacgaaaaactgaagcagacaacgtcagcgctggagaagaagatggccggcaggcaaggccgagaggagctcatcaagaaggggctgctggagatgatggagcaggatgctgaaagcaaaacttgcaaccccgatggaggaccccgatctgtacagagtgaaccacccactcccaagtcggagacgctgacttcagaagatgcccagcccggaagccccttggccactgggacggaccaggtctccctggacaagccactgtcctcagctgcccacttggacgatgcaggccaagccacactcttccaagcctccagcatgaagagtgccgacccttccctccggggccagctctccacacccacggggtctccgcatctcaccacggtccaccggcctcttcccccaagccgcgtcattgaggagctgcacagggcgctggccacgaagcaccgccaggacagttttcaaggaagagaaagtaaagggtctccaaagaagcggctggatgtccgtctgtcgagaacgtccagcgtggagcggggcaaggagagggaggaggcttggagctttgacggggcattggagaacaagcgaactgccgctaaggaatctgaggagaacaaggagaacctgatcataaattctgaactcaaagacgacttgcttttgtatcaggacgaggaggcgctgaacgactccattatttctggaacactgccacggaaatgcaagaaggagctcctggccgtgaagctaaggaaccggccaagcaaacaggaactagaagaccggaacattttccccagaaggactgatgaagaaagacaggagatccggcagcagatcgagatgaagctttccaaacggctgagccaaagacctgccgtggaagagctggagagaagaaatatcttgaaacaaaggaatgatcagacagagcaggaagaaagaagagaaatcaagcaaagattgacaagaaagcttaatcagagacccactgttgatgaattaagagacagaaaaattctgatacgattcagtgattacgtggaagtagcaaaagcgcaggactatgacaggagggcagacaaaccctggacgagactgtcagcagcagataaggcagcaattcgtaaagaattaaatgagtacaaaagtaatgaaatggaggtacatgcatcaagcaagcacttgacaagattccacaggccatagagattttcttctgagaagaatttgtgtttaattttttgataccaacactgaacattcatcagggaactttcctgaagttcagctcaagactaccctacctgctgtgtttgtgagaagagtaggatcacacacacaggtgcaatcttgaccacacttacctgcaagaggagtaaccagaggacacacttccttccttctttggtgtctgaggagtgtgaactgttggggtcagttaagacccaacataactctatcagaagaaaactgttgtttgcctttcaaccttgttttacagttctgcagtgtaatggaggacgggcaacgtgcatgtgcaggctcaccactcccaggcctctgacatgagggacatgtgacagtgtcattcagtattatgttcaaaagacatttttatcctgatcataattaatttgaaaactctttaagttcatgttatacaagatgatttactgtattatacttttccttttttatataatgtctaacaaaaaatacagctgcaacattttgattcctgttaattttgttctttaattaaatgactacttattgcaggaaattaa

SEQ ID NO: 321190 - DNA, 539 bp, Artificial Sequence
  derived and/or modified sequence
cacactgccagcgctcacactgcactcccaggccctgctgtaggtgctaatctgatgggggcagccttagggagggctctgtccccagcaggaggacccttggtgtctctgtggtccttgaatcctggtgtctgttgaaatgcctcctcctctgggcaccttccaggaccaggccaggtgacaccaccattccacccccgtctctacccctttcctggactttcttccttccctgccctggctggggaagcagcggctgcctgcctgtgttcaccccacaccaccgctggggttgtgagaatcgctccttagcaccctggaggacacctctccccctcgccggtgaccttggccgcctcggatgctctgattccacgcggctcgctctaacttgcccccgcgccggccgggcccatggccgcgtcggaggacgggagcggctgcctcgtgtcgcggggccgctcgcagagtgaccccagcgtcctcaccgactcctcggccacctcctccgcggacgccggggagaacccagatgagat

SEQ ID NO: 321191 - DNA, 405 bp, Artificial Sequence
  derived and/or modified sequence
atgctggtggtgggcgccggccccctgggcgccgccgcctggagccagaggctggactgggggcgctgccagctcaaattactgggccagcacggacaggatgttttgcacactaacctcggagaagagaatgtatgtattgctgggcccctgctgttgccatgtccagattcccagccatgtcttacacccccccacccagcgcaggctcttgtccagttatgggtgccttgcccctgcctttgtcccagagttggtgctagcacggcgtggctggagggcgacaccccagccttacctcagcatttaggcccctcaatcaccacaacaggacggtgggcgacccccaaaaaaatccctgggctgaccgttccaccagagaacatggattctatgtgggggtag

SEQ ID NO: 321192 - DNA, 513 bp, Artificial Sequence
  derived and/or modified sequence
gtatctgtccccacacatttagtttgtcctcggacaccccttagtcccccagccgccgtgcacacctgcgagaacgaggagcagtccttgctagacttatttctcggagtctgtcatgacattaacgtcttcttttacaccattccactggcgattaagcttaaggagcatcccatattcttcatgttcatccagatcgccgtaattgctatattcaagtcttatcctacagttggtgacgtcgctttgtacatggccttcttcccagtgtggaaccatctttatcgttttctcagaaacatcttcgtgctcacttgtatcattatcgtctgctcacttctctttccagtactgtggcatctgtggatttatgcagggtcagcaaattcaaattttttctacgccattaccctgacattcaacgtgggacagatactcctgattagcgactacttctatgccttcctgcgcagggaatactacctgacccacggcctctatctcactgcctag

SEQ ID NO: 321193 - DNA, 513 bp, Artificial Sequence
  derived and/or modified sequence
gtgtctgtgcccacccacctggtgtgccccaggacccccctgagccccccagctgctgtgcacacctgtgaaaatgaggagcagagcctgctggacctcttcctgggcgtgtgccacgacatcaacgtgttcttctacaccatccccctggccatcaagctgaaggagcaccccatcttcttcatgttcatccagattgctgtgattgccatcttcaagagctaccccaccgtgggagatgtggccctgtacatggccttcttccctgtgtggaaccacctgtaccgcttcctgaggaacatctttgtgctgacctgcatcatcatcgtgtgcagcctgctcttccctgtgctgtggcacctgtggatctatgccggcagcgccaacagcaacttcttctacgccatcaccctgaccttcaacgtgggccagatcctgctgatcagtgactacttctacgccttcctgcggcgggagtactacctgacccacggcctgtacctgacagcctag

SEQ ID NO: 321194 - DNA, 513 bp, Artificial Sequence
  derived and/or modified sequence
gtgagcgtgcccacccacctggtgtgcccccggacccccctgagcccaccggccgccgtccacacctgcgaaaatgaagagcagagtttgctcgacctgttcctcggcgtgtgtcacgacatcaacgtgttcttttatacgatacctctcgccataaagctgaaggaacacccaatcttcttcatgttcatccagatcgctgttattgcaatctttaaatcctatcccaccgtgggcgatgtcgccttgtatatggcttttttcccagtctggaaccacctgtatcgcttcctacgtaacattttcgttctgacttgtattataattgtatgcagcttgctgtttcccgtgttatggcatttatggatctacgcagggtccgctaactccaacttcttttatgcgatcacccttacctttaacgtgggtcagattctgctcatctcagactacttctatgccttcctgcggcgagaatattatctcacgcatgggttgtatcttacagcctag

SEQ ID NO: 321195 - DNA, 509 bp, Artificial Sequence
  derived and/or modified sequence
gtctctgtacccactcaccttgtttgtcccaggactcctctatctcctccagcggcagtacatacctgtgaaaatgaagagcaaagccttctggatcttttcttgggagtatgccatgatatcaacgtcttcttctacaccatccccttagccataaagctaaaggagcaccccatcttcttcatgtttatccagatcgctgtcatcgccatctttaagtcctacccgacagtgggggacgtggcgctctacatggccttcttccccgtgtggaaccatctctacagattcctgagaaacatctttgtcctcacctgcatcatcatcgtctgttccctgctcttccctgtcctgtggcacctctggatttatgcaggaagtgccaactctaatttcttttatgccatcacactgaccttcaacgttgggcagatcctgctcatctctgattacttctatgccttcctgcggcgggagtactacctcacacatggcctctacttgaccgc

SEQ ID NO: 321196 - DNA, 513 bp, Artificial Sequence
  derived and/or modified sequence
gtgagtgtacctacccatttggtgtgcccacgaactcctttgtcacctcccgctgctgtgcatacctgcgaaaacgaagaacagtccctccttgacctgttcttgggagtgtgccacgacattaatgtgttcttttatacaatacccctagcaattaagctcaaagagcacccgatattctttatgttcattcaaattgccgtgattgctattttcaagagctatcccactgtcggggatgtggccctgtacatggcgttctttcccgtgtggaaccacttatacagattcctgagaaatattttcgtcctcacatgtataataatcgtctgtagccttttgtttcccgtgttgtggcacctgtggatttacgctggctcggctaatagtaacttcttttatgctatcacgctcaccttcaacgtgggccaaatactgctgatctccgactacttctacgccttcctgcgccgtgagtactatctgacacacggactgtatttaacagcatag

SEQ ID NO: 321197 - DNA, 513 bp, Artificial Sequence
  derived and/or modified sequence
gtgagcgtgcccacccacctggtgtgccccagaacccccctgagcccccccgccgccgtgcacacctgcgagaacgaggagcagagcctgctggacctgttcctgggcgtgtgccacgacatcaacgtgttcttctacaccatccccctggccatcaagctgaaggagcaccccatcttcttcatgttcatccagatcgccgtgatcgccatcttcaagagctaccccaccgtgggcgacgtggccctgtacatggccttcttccccgtgtggaaccacctgtacagattcctgagaaacatcttcgtgctgacctgcatcatcatcgtgtgcagcctgctgttccccgtgctgtggcacctgtggatctacgccggcagcgccaacagcaacttcttctacgccatcaccctgaccttcaacgtgggccagatcctgctgatcagcgactacttctacgccttcctgagaagagagtactacctgacccacggcctgtacctgaccgcctag

SEQ ID NO: 321198 - protein, 191 aa, Artificial Sequence
  derived and/or modified sequence
MWWSSTQNAGTEGEAGPPGLPGPPGPKGAPGKPGKPGEAGLPGLPGVDGLTGRDGPPGPKGAPGERGSLGPPGPPGLGGKGLPGPPGEAGVSGPPGGIGLRGPPGPSGLPGLPGPPGPPGPPGHPGVLPEGATDLQCPSICPPGPPGPPGMPGFKGPTGYKGEQGEVGKDGEKGDPGPPGPAGLPGSVGLQ

SEQ ID NO: 321199 - DNA, 2055 bp, Artificial Sequence
  derived and/or modified sequence
atggccggccccagagcctgcgcccccctgctgctgctgctgctgctgggcgagctgctggccgccgccggcgcccagagagtgggcctgcccggcccccccggcccccccggcccccccggcaagcccggccaggacggcatcgacggcgaggccggcccccccggcctgcccggcccccccggccccaagggcgcccccggcaagcccggcaagcccggcgaggccggcctgcccggcctgcccggcgtggacggcctgaccggcagagacggcccccccggccccaagggcgcccccggcgagagaggcagcctgggcccccccggcccccccggcctgggcggcaagggcctgcccggcccccccggcgaggccggcgtgagcggcccccccggcggcatcggcctgagaggcccccccggccccagcggcctgcccggcctgcccggcccccccggcccccccggcccccccggccaccccggcgtgctgcccgagggcgccaccgacctgcagtgccccagcatctgcccccccggcccccccggcccccccggcatgcccggcttcaagggccccaccggctacaagggcgagcagggcgaggtgggcaaggacggcgagaagggcgaccccggcccccccggccccgccggcctgcccggcagcgtgggcctgcagggccccagaggcctgagaggcctgcccggccccctgggcccccccggcgacagaggccccatcggcttcagaggcccccccggcatccccggcgcccccggcaaggccggcgacagaggcgagagaggccccgagggcttcagaggccccaagggcgacctgggcagacccggccccaagggcacccccggcgtggccggccccagcggcgagcccggcatgcccggcaaggacggccagaacggcgtgcccggcctggacggccagaagggcgaggccggcagaaacggcgcccccggcgagaagggccccaacggcctgcccggcctgcccggcagagccggcagcaagggcgagaagggcgagagaggcagagccggcgagctgggcgaggccggccccagcggcgagcccggcgtgcccggcgacgccggcatgcccggcgagagaggcgaggccggccacagaggcagcgccggcgccctgggcccccagggcccccccggcgcccccggcgtgagaggcttccagggccagaagggcagcatgggcgaccccggcctgcccggcccccagggcctgagaggcgacgtgggcgacagaggccccggcggcgccgccggccccaagggcgaccagggcatcgccggcagcgacggcctgcccggcgacaagggcgagctgggccccagcggcctggtgggccccaagggcgagagcggcagcagaggcgagctgggccccaagggcacccagggccccaacggcaccagcggcgtgcagggcgtgcccggcccccccggccccctgggcctgcagggcgtgcccggcgtgcccggcatcaccggcaagcccggcgtgcccggcaaggaggccagcgagcagagaatcagagagctgtgcggcggcatgatcagcgagcagatcgcccagctggccgcccacctgagaaagcccctggcccccggcagcatcggcagacccggccccgccggcccccccggcccccccggcccccccggcagcatcggccaccccggcgccagaggcccccccggctacagaggccccaccggcgagctgggcgaccccggccccagaggcaaccagggcgacagaggcgacaagggcgccgccggcgccggcctggacggccccgagggcgaccagggcccccagggcccccagggcgtgcccggcaccagcaaggacggccaggacggcgcccccggcgagcccggcccccccggcgaccccggcctgcccggcgccatcggcgcccagggcacccccggcatctgcgacaccagcgcctgccagggcgccgtgctgggcggcgtgggcgagaagagcggcagcagaagcagctag

SEQ ID NO: 321200 - DNA, 2055 bp, Artificial Sequence
  derived and/or modified sequence
atggccggtcctagggcatgcgcccccctgctccttctgctgctgcttggggaactccttgccgcagctggggctcagcgggtggggctgcctggtcctcctggccctcccggaccccctggcaaaccaggccaggatggcatcgacggggaagcaggaccaccgggactacccggacctcccggacccaagggagcgcctgggaagccggggaaaccgggggaggcaggtctcccggggcttcccggagtggacggattaaccgggagggacggaccccctggccctaagggtgccccaggcgagcgtggttccctcgggccccctgggcccccaggccttggtgggaaagggctacctggaccacctggtgaagctggcgtttcagggccccccggaggtattgggctaagaggcccccctggcccgtcaggtctgccgggcctgcccggacctcccggcccaccagggccgcctgggcatcccggagtgctgccggaaggggccacagatctgcagtgcccctccatatgccctccaggtcctcccggtccacctgggatgcccggcttcaagggccctacagggtataagggagagcagggcgaagtgggcaaagatggcgagaagggagacccaggaccgcccggccccgccggcctgcccggtagtgtggggctgcagggaccacgaggcctccgcggcctacctggacctttagggccacctggcgatagagggcccatcggatttcgggggcctccaggtatacccggcgcccctgggaaggcaggggatagaggcgaacgaggacccgaagggtttcggggccccaaaggggacttaggcaggccaggtcctaaaggcacacccggtgtagccggacccagtggggagccgggcatgccaggaaaggacgggcagaatggcgttccgggactcgacggtcagaaaggtgaggccgggagaaatggcgcgcccggagagaagggaccgaacggcttacctggtctgcccggcagagcggggtcgaagggcgagaagggggagcgcggcagggctggagagctgggggaggcaggcccaagcggggagccaggcgtccctggcgacgccggtatgccaggcgagcggggagaagctggccaccggggatcggcgggtgccctgggtccacagggtccccctggcgcgcctggagtccggggatttcaaggtcaaaagggctctatgggtgatcccggactgcccggaccccagggcttgaggggcgacgtaggggacaggggaccgggtggcgccgccggacccaaaggagaccagggtattgctggcagcgacggcttaccaggagacaagggagaactcggcccatccggcctcgtcggccctaagggagagagcggatccaggggagagctcgggccaaaagggactcagggccctaatgggacgagtggtgtgcagggagtgcctggcccccccgggccccttggacttcagggggtgcccggcgtgcctggcataaccgggaagcctggagttcccggtaaagaagccagtgagcaacgcatccgggaattgtgcggtggtatgatatccgagcagatcgcgcagctggccgcgcatctgagaaagcccctggccccagggagtatcgggcgccctggtccggcgggtccgcccgggccccctggcccaccaggatccatcggccacccaggcgcgcgggggccccctggttaccgaggccctacaggcgagctgggagatccgggaccacgcgggaaccagggagatcgcggcgataaaggagccgctggcgcgggcctggatggtcccgaaggcgaccagggaccccaggggccccagggtgtgccaggcacctcgaaggatggacaggatggtgcccctggcgagcctggtccccctggggaccctgggctgcctggcgccatcggcgcccagggtaccccagggatctgcgatacgtctgcttgtcagggtgccgtcctgggtggggtgggggagaagtcaggaagtagatctagctag

SEQ ID NO: 321201 - DNA, 2055 bp, Artificial Sequence
  derived and/or modified sequence
atggccggcccccgggcctgtgcccccctgctgctgctgctgctgctgggggagctgctggccgctgctggggcccagagggtgggcctgcccggccccccaggccccccaggccccccaggcaagccaggccaggacggcattgatggagaggccggccccccaggcctgcccggccccccaggccccaagggggcccctgggaagccaggcaagccaggagaggccggcctgcccggcctgcccggggtggatggcctgaccggcagagatggccccccaggccccaagggggcccctggagagcggggcagcctgggccccccaggccccccaggcctgggcggcaagggcctgcccggccccccaggagaggccggcgtgtctggccccccaggcggcatcggcctgcggggccccccaggccccagcggcctgcccggcctgcccggccccccaggccccccaggccccccaggccaccctggggtgctgcctgagggcgccacagacctgcagtgccccagcatctgccccccaggccccccaggccccccaggcatgcctggcttcaagggccccaccggctacaagggggagcagggcgaggtgggcaaggatggagagaagggggaccccggccccccaggccctgctggcctgcccggctctgtgggcctgcagggcccccggggcctgcggggcctgcccggccccctgggccccccaggggaccggggccccatcggcttccggggccccccaggcatccctggggcccctgggaaggccggggacagaggagagcggggccctgagggcttccggggccccaagggggacctgggccggcccggccccaagggcaccccaggagtggccggccccagcggggagcccggcatgcctgggaaggatggccagaatggagtgcccggcctggatggccagaagggggaggccggcagaaatggagcccctggagagaagggccccaacggcctgcccggcctgcccggccgggccggcagcaaaggagagaagggggagcggggccgggccggggagctgggggaggccggccccagcggggagcccggggtgcctggagatgctggcatgcctggagagcggggggaggccggccaccggggcagcgctggggccctgggcccccagggccccccaggggcccctggggtgcggggcttccagggccagaagggctccatgggagaccccggcctgcccggcccccagggcctgcggggagatgtgggggaccggggccctggaggagctgctggccccaagggggaccagggcattgctggcagtgatggcctgcccggggacaagggggagctgggccccagcggcctggtgggccccaagggggagagcggcagcagaggagagctgggccccaagggcacccagggccccaacggcaccagcggcgtgcagggcgtgcccggccccccaggccccctgggcctgcagggcgtgcctggggtgcccggcatcaccgggaagccaggagtgcctgggaaggaggccagcgagcagaggatccgggagctgtgtggcggcatgatcagcgagcagatcgcccagctggccgcccacctgaggaagcccctggcccctggcagcatcggccggcccggccctgctggccccccaggccccccaggccccccaggcagcatcggccaccctggggcccggggccccccaggctaccggggccccaccggggagctgggggaccccggcccccggggcaaccagggcgacagaggagacaagggagctgctggagctggcctggatggccctgagggggaccagggcccccagggcccccagggcgtgcccggcaccagcaaggatggccaggatggagcccctggagagcccggccccccaggggaccccggcctgcccggggccatcggggcccagggcaccccaggcatctgtgacaccagcgcctgccagggcgctgtgctgggcggcgtgggggagaagagcggcagccgcagcagctag

SEQ ID NO: 321202 - DNA, 2485 bp, Artificial Sequence
  derived and/or modified sequence
gccatggccgggccgcgcgcgtgcgccccgctcctgctcctgctcctgctcggggagcttctggcggccgccggggcgcagagagtgggactccccggcccccccggccccccagggccgcccgggaagcccggccaggacggcattgacggagaagctggtcctccaggtctgcctgggcccccgggaccaaagggggccccaggaaagccggggaaaccaggagaggctgggctgccgggactgccgggtgtggatggtctgactggacgagatggaccccctggacccaagggtgcccctggggaacggggaagtctgggacccccggggccgcccgggctggggggcaaaggcctccctggaccccccggagaggcaggagtgagcggccccccaggtgggatcggcctccgcggccccccgggaccttctggactccccggcctccctggtcccccaggacctcccggaccccctggacacccaggagtcctccctgaaggcgctactgaccttcagtgcccaagtatctgcccgccaggtcccccagggccccctggaatgccagggttcaagggacccactggctacaaaggcgagcagggggaagtcggcaaggacggcgagaagggtgaccctggcccccctgggcccgccggcctcccgggcagcgtggggctgcagggcccccggggattacgaggactgccagggccactcgggccccctggggaccggggtcccattgggttccgagggccgcctgggatcccaggagcgcctgggaaagcgggtgaccgaggcgagaggggcccagaagggttccgcggccccaagggtgacctcggcagacctggtcccaagggaacccccggagtggccgggccaagcggagagccgggcatgccgggcaaggacggccagaatggcgtgccaggactcgatggccagaagggagaggctggtcgcaacggtgctccgggagagaagggccccaacgggctgccgggcctccctggacgagcggggtccaaaggcgagaagggagaacggggcagagctggggagctgggtgaggccggcccctctggagagccaggcgtccctggagatgctggcatgcctggggagcgcggtgaggctggccaccggggctcagcgggggccctcggcccacaaggccctcccggagcccctggtgtccgaggcttccagggccagaagggcagcatgggagaccccggccttccaggcccccagggcctccgaggtgacgtgggcgaccggggtccgggaggtgccgcaggccctaagggagaccagggtattgcaggttccgacggtcttcctggggataaaggagaactgggtcccagcggcctggtcggacccaaaggagagtctggcagtcgaggggagctgggccccaaaggcacccagggtcccaacggcaccagcggtgttcagggtgtccccgggccccccggtcctctgggcctgcagggcgtcccgggtgttcctggcatcacggggaagccgggagttccggggaaggaggccagcgagcagcgcatcagggagctgtgtggggggatgatcagcgaacaaattgcacagttagccgcgcacctaaggaagcctttggcacccgggtccattggtcggcccggtccagctggcccccctgggcccccaggacccccaggctccattggtcaccctggcgctcgaggaccccctggataccgcggtcccactggggagctgggagaccccgggcccagaggaaaccagggtgacagaggagacaaaggcgcggcaggagcagggctggacgggcctgaaggagaccaggggccccaaggaccccaaggcgtgcccggcaccagcaaggacggccaggacggtgctcccggcgagcctgggcctcccggagatcctgggcttccaggtgccattggggcccaggggacaccggggatctgcgacacctcagcctgccaaggagccgtgttaggaggggtcggggagaaatcaggctctcgaagctcataaaattcaacgtgaggaagcaagtgacaaggacgcccgaagcacagtggacggtcatgaaggagcgggggtgtggcaggcgggtgacgtccaggagagggagcgcccctggctgcccctcggccgccgactggacgcgcgggccttgccagcgagcaccctcatcgggctgtcgcctgacagcatacctcaaaaggccctagctaataaacctgtaagcccagcatttgagagaaggtagggtgtgtatatataaaaggttgtgtacaactccacgaggtgaaaaatattcagtaacttgtttacatagcatttgtgtaaagactatgatctcatcccaataaaatgatatattaaaccttcagattaatgactggctacagagtaacaaaaaataaagaatttaatgtacagtaaattctctcccata

SEQ ID NO: 321203 - DNA, 596 bp, Artificial Sequence
  derived and/or modified sequence
ggtgggtaggggtggagggtgtcatgtggtggtcctccacccagaatgccggcactgagggagaagctggtcctccaggtctgcctgggcccccgggaccaaagggggccccaggaaagccggggaaaccaggagaggctgggctgccgggactgccgggtgtggatggtctgactggacgagatggaccccctggacccaagggtgcccctggggaacggggaagtctgggacccccggggccgcccgggctggggggcaaaggcctccctggaccccccggagaggcaggagtgagcggccccccaggtgggatcggcctccgcggccccccgggaccttctggactccccggcctccctggtcccccaggacctcccggaccccctggacacccaggagtcctccctgaaggcgctactgaccttcagtgcccaagtatctgcccgccaggtcccccagggccccctggaatgccagggttcaagggacccactggctacaaaggcgagcagggggaagtcggcaaggacggcgagaagggtgaccctggcccccctgggcccgccggcctcccgggcagcgtggggctgcag

SEQ ID NO: 321204 - DNA, 2371 bp, Artificial Sequence
  derived and/or modified sequence
atgtggtggtcctccacccagaatgccggcactgagggagaagctggtcctccaggtctgcctgggcccccgggaccaaagggggccccaggaaagccggggaaaccaggagaggctgggctgccgggactgccgggtgtggatggtctgactggacgagatggaccccctggacccaagggtgcccctggggaacggggaagtctgggacccccggggccgcccgggctggggggcaaaggcctccctggaccccccggagaggcaggagtgagcggccccccaggtgggatcggcctccgcggccccccgggaccttctggactccccggcctccctggtcccccaggacctcccggaccccctggacacccaggagtcctccctgaaggcgctactgaccttcagtgcccaagtatctgcccgccaggtcccccagggccccctggaatgccagggttcaagggacccactggctacaaaggcgagcagggggaagtcggcaaggacggcgagaagggtgaccctggcccccctgggcccgccggcctcccgggcagcgtggggctgcagggcccccggggattacgaggactgccagggccactcgggccccctggggaccggggtcccattgggttccgagggccgcctgggatcccaggagcgcctgggaaagcgggtgaccgaggcgagaggggcccagaagggttccgcggccccaagggtgacctcggcagacctggtcccaagggaacccccggagtggccgggccaagcggagagccgggcatgccgggcaaggacggccagaatggcgtgccaggactcgatggccagaagggagaggctggtcgcaacggtgctccgggagagaagggccccaacgggctgccgggcctccctggacgagcggggtccaaaggcgagaagggagaacggggcagagctggggagctgggtgaggccggcccctctggagagccaggcgtccctggagatgctggcatgcctggggagcgcggtgaggctggccaccggggctcagcgggggccctcggcccacaaggccctcccggagcccctggtgtccgaggcttccagggccagaagggcagcatgggagaccccggccttccaggcccccagggcctccgaggtgacgtgggcgaccggggtccgggaggtgccgcaggccctaagggagaccagggtattgcaggttccgacggtcttcctggggataaaggagaactgggtcccagcggcctggtcggacccaaaggagagtctggcagtcgaggggagctgggccccaaaggcacccagggtcccaacggcaccagcggtgttcagggtgtccccgggccccccggtcctctgggcctgcagggcgtcccgggtgttcctggcatcacggggaagccgggagttccggggaaggaggccagcgagcagcgcatcagggagctgtgtggggggatgatcagcgaacaaattgcacagttagccgcgcacctaaggaagcctttggcacccgggtccattggtcggcccggtccagctggcccccctgggcccccaggacccccaggctccattggtcaccctggcgctcgaggaccccctggataccgcggtcccactggggagctgggagaccccgggcccagaggaaaccagggtgacagaggagacaaaggcgcggcaggagcagggctggacgggcctgaaggagaccaggggccccaaggaccccaaggcgtgcccggcaccagcaaggacggccaggacggtgctcccggcgagcctgggcctcccggagatcctgggcttccaggtgccattggggcccaggggacaccggggatctgcgacacctcagcctgccaaggagccgtgttaggaggggtcggggagaaatcaggctctcgaagctcataaaattcaacgtgaggaagcaagtgacaaggacgcccgaagcacagtggacggtcatgaaggagcgggggtgtggcaggcgggtgacgtccaggagagggagcgcccctggctgcccctcggccgccgactggacgcgcgggccttgccagcgagcaccctcatcgggctgtcgcctgacagcatacctcaaaaggccctagctaataaacctgtaagcccagcatttgagagaaggtagggtgtgtatatataaaaggttgtgtacaactccacgaggtgaaaaatattcagtaacttgtttacatagcatttgtgtaaagactatgatctcatcccaataaaatgatatattaaaccttcagattaatgactggctacagagtaacaaaaaataaagaatttaatgtacagtaaattctctcccata

SEQ ID NO: 321205 - DNA, 2055 bp, Artificial Sequence
  derived and/or modified sequence
atggccggcccccgggcctgcgcccccctgctgctgctgctgctgctcggggaattgcttgccgcagccggggcccaacgcgtggggttgcctgggcctcccggccctccaggccctcctgggaagcccggacaggatgggattgatggggaggcaggccctcccggactccccgggccacctggtccaaagggagcacccgggaagcctgggaaacccggtgaagccggactgcccggtttgcctggagtggatggcctgaccggcagggatgggccccctggcccaaaaggcgcccccggcgaacgggggagcctcgggccaccgggccctcctgggctcggagggaaaggactgccggggccaccaggagaggccggcgtatctggcccccccggagggatcggcctccggggaccccctgggcctagcggactgccaggattgccgggaccaccaggcccacccggtcctccagggcaccctggggtactacctgaaggcgcaaccgacctccagtgcccttctatctgtcctcctgggcccccaggcccgcctgggatgcctggcttcaaggggcccacagggtataagggcgagcagggcgaagtgggtaaggatggcgaaaagggtgaccctgggcctccgggtcctgccggtttgccaggcagtgtgggactacagggacctagagggctgaggggcctgcctggacccctgggaccccctggcgacagaggacccatcggattccgtggcccaccgggcattccaggagctcccggaaaagcaggagatcgaggagaacgcggacccgagggtttcaggggccctaagggcgatcttgggcgtcccggtccaaaggggacccccggcgtggctggaccttccggcgagcccggcatgccaggaaaggatggacagaatggtgtccctggcctggatgggcagaagggggaggcgggacggaatggcgctccaggggagaaaggccctaatggactccccggcctgcctggtcgggccggttccaaaggcgaaaagggcgaaaggggtcgggctggggagttgggggaggccggcccctctggagagcccggagtgcctggagacgctggaatgccgggagaacgcggcgaggcgggccaccgcggctccgcaggggccctggggcctcagggacccccgggcgccccaggcgtcagagggttccagggtcagaaggggagtatgggcgacccaggactccccggacctcagggacttcgaggggatgtgggtgacagagggccaggaggtgccgcgggtccgaagggcgaccagggcatcgcaggtagtgatgggcttcctggggataaaggggaactcggccccagcggtctggttggtcccaagggagagtctggaagtagaggcgaacttggacccaaggggacgcaggggcctaatggcactagtggggttcagggagtacccggaccacccggtcccctgggattacagggcgtccccggcgttccagggataacaggaaagcccggcgtcccaggtaaagaggcttcagagcagagaatcagagagctctgcggtgggatgatttcagagcagattgcccaactggctgcacatcttaggaaacccctggccccggggtccattggaagaccagggcccgccggcccccccggcccacctggaccaccagggagcataggtcaccccggcgcccgggggccaccagggtaccgaggccctacaggagaactcggcgatccagggccacgagggaatcagggcgacagaggggacaagggggctgccggcgctggcctggatggcccggaaggagaccagggtccccaggggccccagggagtcccaggcacatcaaaggatggacaagatggcgctcccggagaacctggacccccgggggaccccggtctgcctggggcaataggcgcccagggcacgcccgggatctgtgacaccagcgcctgtcagggggcggttctggggggagtgggcgaaaaaagcgggagtagaagcagctag

SEQ ID NO: 321206 - DNA, 2055 bp, Artificial Sequence
  derived and/or modified sequence
atggcagggcctcgggcttgcgctcctctcttgcttcttcttctcctgggagaactcctggctgccgctggtgcccagcgagtcgggctgccaggccctccgggtccacccggaccacctgggaaacctggccaggacggcatagacggggaggctggcccacccggacttcccggaccacctgggcctaagggggcacccggaaagcccggaaaaccgggagaagctgggctgcccggtcttcccggtgtcgatgggcttaccgggcgagacgggccaccaggcccaaaaggtgctcccggagagcgtggaagcctggggcctcccggtcctccgggtctcggcggtaagggtctgccaggcccacccggagaggccggagttagcgggcctccaggagggattggacttagagggcctcctggtcctagcggtctgccgggattgcctggaccgcctggcccacctggacctcctggccatcccggtgtcctgccagaaggagccacggacctgcagtgtccatcaatctgcccccctgggcctccaggcccacctggaatgcccggatttaagggcccaaccggctataagggcgaacagggtgaagttggaaaggacggcgagaagggcgatccaggccctcctggtcctgccggactaccaggctctgtggggctgcagggcccaaggggacttcgaggtcttcccggaccacttggtcctccgggtgatcgagggccaattggtttccgcggtccaccgggaataccgggagcgcctggcaaagcaggcgatcgtggggaaagaggacctgaaggatttcgaggacctaagggtgacctgggcaggcccggtccgaagggcacccccggagtggctggaccttctggtgaacctgggatgcccggaaaagacggacagaacggtgtgccgggactcgacggtcagaagggtgaagctgggcgaaatggagctcccggagagaagggccctaacggactgcctgggctccctggcagagcaggtagcaaaggcgagaagggcgaaagaggaagggccggtgaactcggcgaggccggtccctcaggagagcccggagtcccgggagatgcagggatgccaggcgagagaggcgaagccggtcaccggggatcggcaggcgctctcggaccacaggggcctccaggcgctccaggagttcgcggatttcagggccaaaagggctctatgggggaccccggactaccaggtccccagggcctccggggtgacgttggagaccgcggtccgggtggagctgcaggcccaaagggagaccaggggattgccggttcggatggactgccgggagacaaaggggagcttggaccaagcggcctggtgggacccaagggagagtccggcagtagaggggaactggggcctaagggaactcaggggcctaatgggacttcaggagtccaaggagtgcctggaccccctggaccccttgggctgcagggggtacccggagttcctgggatcacaggcaaaccaggagtgcctggaaaagaagcttcagaacaacggatacgagagctgtgcgggggtatgatctccgagcagatcgctcagctagctgcacatttaagaaaacctctggcgccaggctccatcggccgaccaggacctgcaggtccacctggtcccccaggccctcctgggtccatcggccatccaggggcacgaggccctccagggtaccggggtccaacaggtgagctgggagacccaggtcctcgaggcaatcagggagaccgaggggataaaggggcagccggtgcagggctggatggcccagagggtgatcagggtcctcagggtccccagggagtgccgggaaccagcaaagacggtcaggatggagcccctggcgagccgggaccgccaggcgacccgggactgcctggggcaatcggagcccagggaacgccgggaatttgtgacactagtgcctgtcagggggcagtgctgggcggtgttggggagaagagcggttcccggagctcatag

SEQ ID NO: 321207 - DNA, 2055 bp, Artificial Sequence
  derived and/or modified sequence
atggccgggcctagagcatgcgctcccctgttactacttctactactcggggaactactggcagctgccggagcccaacgggtcggacttcctggcccacctggccctccaggacccccaggaaagcctggccaggacgggatcgatggcgaggctggacctcccgggttgcccggcccccccggtcccaaaggagccccgggtaaacctggcaaacctggagaggctggtttacccggtctccccggagtggacggccttaccggccgggacggaccgccggggcctaagggtgcccctggtgagcgtggttctctcggtccccctggcccgccagggctcggagggaaggggctcccaggacctcccggcgaggctggtgtcagtggcccgcccggcggcataggactacgcggcccaccgggcccctctggccttcctggactgcccgggccacccggcccaccgggcccacccggccacccaggtgtactccctgaaggagccactgacctgcagtgcccttcaatctgtcctccaggtccacccggcccccctggtatgcctggtttcaaaggaccgactggctataaaggagaacaaggggaagtggggaaggacggagaaaagggcgaccctggaccccccggtccagccggcttacccggtagcgtgggccttcaggggccacgcgggctgcgcggactccctggccctctcggaccccccggcgacaggggccccattggttttcggggccctcccgggatacccggtgcccccgggaaagccggtgatagaggggaacgcggccccgaagggtttcgcggcccaaagggcgatctaggtagacctggacctaagggtactccaggcgtggcagggccctccggagagcctggcatgccaggaaaagatggtcagaacggcgtgcccggtctggatggccagaaaggagaagctggccggaatggagcccctggagagaaagggcctaatgggttgccagggctccccggtagggcggggtctaaaggcgaaaagggagaaaggggcagagcaggagaactgggtgaggccggacccagcggagagcccggagttccaggcgacgccgggatgcctggagaaagaggggaagcaggccatcgcggtagcgccggtgcgcttggaccccaaggacctcctggagctcccggagtgaggggattccagggccagaagggctccatgggagaccctggccttccagggccccaaggtctccgaggtgacgtaggagatagaggacccggcggtgccgctgggccaaaaggtgaccaagggatcgccggctcggatggcctgccaggggacaagggagaactgggtccgtccggcctggttggtccaaagggcgagtccggctccaggggtgagctcggacctaagggcacccagggtccaaatggaactagcggcgtccagggcgttccaggcccgcctggtcctcttgggttgcagggggtgcctggggtgcctggtatcacaggaaagccaggcgtacccggcaaggaagcatccgagcagagaatccgggaactctgcggtggaatgattagtgaacaaatcgctcagctcgctgctcatctgagaaaaccattggccccgggatccatcgggagacctggacccgcaggccccccgggcccccccgggccaccaggctccattggccatccaggcgcacgcgggcctcccgggtaccggggaccaaccggagagttgggcgacccgggcccacgaggcaaccagggggatcggggggataagggcgcagctggcgctggtctcgatggacccgagggcgatcaaggacctcaggggccacagggcgtgccaggaacaagtaaagatgggcaggacggtgcgccaggagaacctggcccacccggggaccctggcctccccggagctattggagctcaaggcactccaggcatctgcgatacgtccgcttgccagggcgccgtgctgggcggggtgggagaaaagtcagggagtcgtagctcttag

SEQ ID NO: 321208 - DNA, 2055 bp, Artificial Sequence
  derived and/or modified sequence
atggccggaccacgtgcatgcgctccactgctgctgttgttattactgggcgagcttctggcggcggcgggcgcacagagagttggcttaccaggcccccccgggcctcccggccctccgggcaaacccggacaagatggcatagacggtgaagccggcccacccgggctcccggggcctccaggaccaaagggtgctccaggcaaacccggaaagcccggcgaggctggattgcctgggcttcctggtgtcgatggacttactgggagagacggaccacctggacctaaaggagcccccggcgagcgcggcagtctcgggccccctggccctcctggcctcggcggaaagggactgccaggtccccccggcgaagctggagttagcggcccccccggtggtattggacttagagggcccccaggcccctctggcctgccaggcctgcccggtcccccggggcctcctggtccacccggtcatcctggcgtgctcccagaaggtgctaccgacctgcagtgtccaagcatctgtcctcctggaccacctggcccacccggcatgccaggcttcaaaggacccacgggctacaagggagagcagggagaagtaggcaaagatggtgaaaaaggagaccccggaccccccggacccgcgggcttaccagggtctgttgggcttcagggtccccggggactgagagggttgcctggcccattaggacctcctggagatcggggacctatcggtttcagagggcctcctggaatacctggagctccaggcaaagcgggtgatcgtggagagaggggacccgagggatttaggggtccaaaaggagatttaggacggccaggcccgaagggcactccgggagtcgctgggcctagcggcgaaccgggtatgccaggtaaggatgggcagaatggggtccctgggctcgatggacagaaaggagaggctggaaggaatggagcccccggcgagaaaggacccaatgggctgcctggcctgccaggcagggcagggagcaaaggtgaaaagggggagagggggagagcaggagagctgggggaagctggcccgagtggagagccaggagttccgggcgatgctgggatgcctggggagcggggggaggcagggcaccggggatccgctggggcactaggaccgcagggccctccaggcgctccaggcgtgcgaggattccagggccaaaaaggcagtatgggagaccccggactgcccgggccccagggcttaaggggggatgtgggagacaggggacctggaggggctgctggaccaaaaggcgaccagggaattgccggcagtgacggtcttcccggcgacaagggggagttgggaccatctggcctcgtggggcctaaaggagaatcaggaagcagaggggagctcggaccaaagggaacacagggacctaacgggacaagcggcgttcagggcgttcctgggccacccgggccccttggactgcagggggttcccggggtacccggtattactggaaagccaggcgttcctggcaaagaggctagtgaacagagaatccgagaactgtgcggtgggatgatctccgagcagatagcacagctcgccgcacatctgagaaagccactggctcccggatcaattggacgcccgggacctgctggtccaccaggcccccccggtcctcccggcagtatcggccatccaggcgcacgcggaccacccggttataggggccccaccggggaactaggtgacccaggccctaggggtaaccaaggcgatagaggcgataagggcgctgctggtgctggtctagacggacccgagggggaccaaggaccacaaggccctcaaggcgtaccagggacaagtaaagacgggcaagacggggcgccaggcgaacctggccctccaggcgaccctggcctccccggcgcaatcggggcgcagggaacccctggaatctgtgacaccagtgcctgtcagggagcagtgctaggcggtgtaggagagaaatctgggagtcggtcatcctag

SEQ ID NO: 321209 - RNA, 2055 nt, Artificial Sequence
  derived and/or modified sequence
auggccgggccuagagcaugcgcuccccuguuacuacuucuacuacucggggaacuacuggcagcugccggagcccaacgggucggacuuccuggcccaccuggcccuccaggacccccaggaaagccuggccaggacgggaucgauggcgaggcuggaccucccggguugcccggcccccccggucccaaaggagccccggguaaaccuggcaaaccuggagaggcugguuuacccggucuccccggaguggacggccuuaccggccgggacggaccgccggggccuaagggugccccuggugagcgugguucucucggucccccuggcccgccagggcucggagggaaggggcucccaggaccucccggcgaggcuggugucaguggcccgcccggcggcauaggacuacgcggcccaccgggccccucuggccuuccuggacugcccgggccacccggcccaccgggcccacccggccacccagguguacucccugaaggagccacugaccugcagugcccuucaaucuguccuccagguccacccggccccccugguaugccugguuucaaaggaccgacuggcuauaaaggagaacaaggggaaguggggaaggacggagaaaagggcgacccuggaccccccgguccagccggcuuacccgguagcgugggccuucaggggccacgcgggcugcgcggacucccuggcccucucggaccccccggcgacaggggccccauugguuuucggggcccucccgggauacccggugcccccgggaaagccggugauagaggggaacgcggccccgaaggguuucgcggcccaaagggcgaucuagguagaccuggaccuaaggguacuccaggcguggcagggcccuccggagagccuggcaugccaggaaaagauggucagaacggcgugcccggucuggauggccagaaaggagaagcuggccggaauggagccccuggagagaaagggccuaauggguugccagggcuccccgguagggcggggucuaaaggcgaaaagggagaaaggggcagagcaggagaacugggugaggccggacccagcggagagcccggaguuccaggcgacgccgggaugccuggagaaagaggggaagcaggccaucgcgguagcgccggugcgcuuggaccccaaggaccuccuggagcucccggagugaggggauuccagggccagaagggcuccaugggagacccuggccuuccagggccccaaggucuccgaggugacguaggagauagaggacccggcggugccgcugggccaaaaggugaccaagggaucgccggcucggauggccugccaggggacaagggagaacuggguccguccggccugguugguccaaagggcgaguccggcuccaggggugagcucggaccuaagggcacccaggguccaaauggaacuagcggcguccagggcguuccaggcccgccugguccucuuggguugcagggggugccuggggugccugguaucacaggaaagccaggcguacccggcaaggaagcauccgagcagagaauccgggaacucugcgguggaaugauuagugaacaaaucgcucagcucgcugcucaucugagaaaaccauuggccccgggauccaucgggagaccuggacccgcaggccccccgggcccccccgggccaccaggcuccauuggccauccaggcgcacgcgggccucccggguaccggggaccaaccggagaguugggcgacccgggcccacgaggcaaccagggggaucggggggauaagggcgcagcuggcgcuggucucgauggacccgagggcgaucaaggaccucaggggccacagggcgugccaggaacaaguaaagaugggcaggacggugcgccaggagaaccuggcccacccggggacccuggccuccccggagcuauuggagcucaaggcacuccaggcaucugcgauacguccgcuugccagggcgccgugcugggcggggugggagaaaagucagggagucguagcucuuag

SEQ ID NO: 321210 - RNA, 2055 nt, Artificial Sequence
  derived and/or modified sequence
auggccggaccacgugcaugcgcuccacugcugcuguuguuauuacugggcgagcuucuggcggcggcgggcgcacagagaguuggcuuaccaggcccccccgggccucccggcccuccgggcaaacccggacaagauggcauagacggugaagccggcccacccgggcucccggggccuccaggaccaaagggugcuccaggcaaacccggaaagcccggcgaggcuggauugccugggcuuccuggugucgauggacuuacugggagagacggaccaccuggaccuaaaggagcccccggcgagcgcggcagucucgggcccccuggcccuccuggccucggcggaaagggacugccagguccccccggcgaagcuggaguuagcggcccccccggugguauuggacuuagagggcccccaggccccucuggccugccaggccugcccggucccccggggccuccugguccacccggucauccuggcgugcucccagaaggugcuaccgaccugcaguguccaagcaucuguccuccuggaccaccuggcccacccggcaugccaggcuucaaaggacccacgggcuacaagggagagcagggagaaguaggcaaagauggugaaaaaggagaccccggaccccccggacccgcgggcuuaccagggucuguugggcuucaggguccccggggacugagaggguugccuggcccauuaggaccuccuggagaucggggaccuaucgguuucagagggccuccuggaauaccuggagcuccaggcaaagcgggugaucguggagagaggggacccgagggauuuagggguccaaaaggagauuuaggacggccaggcccgaagggcacuccgggagucgcugggccuagcggcgaaccggguaugccagguaaggaugggcagaauggggucccugggcucgauggacagaaaggagaggcuggaaggaauggagcccccggcgagaaaggacccaaugggcugccuggccugccaggcagggcagggagcaaaggugaaaagggggagagggggagagcaggagagcugggggaagcuggcccgaguggagagccaggaguuccgggcgaugcugggaugccuggggagcggggggaggcagggcaccggggauccgcuggggcacuaggaccgcagggcccuccaggcgcuccaggcgugcgaggauuccagggccaaaaaggcaguaugggagaccccggacugcccgggccccagggcuuaaggggggaugugggagacaggggaccuggaggggcugcuggaccaaaaggcgaccagggaauugccggcagugacggucuucccggcgacaagggggaguugggaccaucuggccucguggggccuaaaggagaaucaggaagcagaggggagcucggaccaaagggaacacagggaccuaacgggacaagcggcguucagggcguuccugggccacccgggccccuuggacugcaggggguucccgggguacccgguauuacuggaaagccaggcguuccuggcaaagaggcuagugaacagagaauccgagaacugugcggugggaugaucuccgagcagauagcacagcucgccgcacaucugagaaagccacuggcucccggaucaauuggacgcccgggaccugcugguccaccaggcccccccgguccucccggcaguaucggccauccaggcgcacgcggaccacccgguuauaggggccccaccggggaacuaggugacccaggcccuagggguaaccaaggcgauagaggcgauaagggcgcugcuggugcuggucuagacggacccgagggggaccaaggaccacaaggcccucaaggcguaccagggacaaguaaagacgggcaagacggggcgccaggcgaaccuggcccuccaggcgacccuggccuccccggcgcaaucggggcgcagggaaccccuggaaucugugacaccagugccugucagggagcagugcuaggcgguguaggagagaaaucugggagucggucauccuag

SEQ ID NO: 321211 - DNA, 576 bp, Artificial Sequence
  derived and/or modified sequence
atgtggtggagcagcacccagaacgccggcaccgagggcgaggccggcccccccggcctgcccggcccccccggccccaagggcgcccccggcaagcccggcaagcccggcgaggccggcctgcccggcctgcccggcgtggacggcctgaccggcagagacggcccccccggccccaagggcgcccccggcgagagaggcagcctgggcccccccggcccccccggcctgggcggcaagggcctgcccggcccccccggcgaggccggcgtgagcggcccccccggcggcatcggcctgagaggcccccccggccccagcggcctgcccggcctgcccggcccccccggcccccccggcccccccggccaccccggcgtgctgcccgagggcgccaccgacctgcagtgccccagcatctgcccccccggcccccccggcccccccggcatgcccggcttcaagggccccaccggctacaagggcgagcagggcgaggtgggcaaggacggcgagaagggcgaccccggcccccccggccccgccggcctgcccggcagcgtgggcctgcagtag

SEQ ID NO: 321212 - DNA, 576 bp, Artificial Sequence
  derived and/or modified sequence
atgtggtggagcagcacccagaatgccggcacagaaggagaggccggccccccaggcctgcccggccccccaggccccaagggggcccctgggaagccaggcaagccaggagaggccggcctgcccggcctgcccggggtggatggcctgaccggcagagatggccccccaggccccaagggggcccctggagagcggggcagcctgggccccccaggccccccaggcctgggcggcaagggcctgcccggccccccaggagaggccggcgtgtctggccccccaggcggcatcggcctgcggggccccccaggccccagcggcctgcccggcctgcccggccccccaggccccccaggccccccaggccaccctggggtgctgcctgagggcgccacagacctgcagtgccccagcatctgccccccaggccccccaggccccccaggcatgcctggcttcaagggccccaccggctacaagggggagcagggcgaggtgggcaaggatggagagaagggggaccccggccccccaggccctgctggcctgcccggctctgtgggcctgcagtag

SEQ ID NO: 321213 - DNA, 576 bp, Artificial Sequence
  derived and/or modified sequence
atgtggtggagcagcacccagaacgccggcaccgagggcgaggccggcccacccggtttgcccgggccccctggacccaagggagctcctggtaagcctggcaagccaggggaggctgggcttcctgggttgccgggagttgacggcctcacagggcgagatggccctcctggccccaaaggcgctcctggagaacgaggttcactcggccccccaggcccccccggactcggcggaaaaggtctacccggtcctcctggcgaggccggcgtgtcgggcccgcctggaggtatcggcctgagagggcctccaggaccttccgggctgcctggactgcccggccctcctggacccccagggcccccaggccatcctggcgtcctgccagagggtgccactgacctacagtgtccctccatatgtccacccgggccgcctgggccccctgggatgccaggcttcaaagggccgaccgggtataagggcgaacaaggggaggtaggcaaagacggtgaaaagggagaccccggcccacccgggcctgctggtctgcccggctccgtgggcctgcagtag

SEQ ID NO: 321214 - DNA, 576 bp, Artificial Sequence
  derived and/or modified sequence
atgtggtggagtagcacccagaatgcaggaacagaaggggaggccggaccacctggcctaccagggcctcctggtccaaaaggagcccctggtaaaccaggcaaacccggagaagcaggactgcctggactgcctggagtcgacgggctgacagggagggacggacctcccggacctaagggagctcctggtgagaggggatccctcggcccaccgggacccccagggttgggaggtaaaggcctcccgggtccgcctggcgaggcaggagtgtcaggccctcctgggggaatagggctgcgcggaccacctggccctagtggtctgcctggattgcctggcccacctggccctcctggtccaccagggcacccaggggtgctcccagagggtgctacagacctacagtgcccttctatctgcccacctgggccaccaggccctcccggtatgcccggtttcaagggcccaactgggtacaaaggggagcaaggcgaggtgggcaaagacggcgagaagggcgaccctggccctccagggcctgcgggactgccaggtagtgtggggcttcagtag

SEQ ID NO: 321215 - DNA, 576 bp, Artificial Sequence
  derived and/or modified sequence
atgtggtggagttctacccagaacgccggaactgagggggaggcaggcccaccgggactgcccggacctcccggaccaaaaggggctcctggaaagccaggcaaaccaggggaagccggtttgcccggactgcccggtgtggacggactaacggggagggacgggcctcctggccctaagggtgctcccggtgagagaggctctctcgggccacccggacccccaggactgggtgggaaaggccttccaggaccgccaggagaggcgggagtgtctggcccaccaggcggaatcgggctaagaggcccacccggaccctcgggtctacctggcctgcccggaccacccggtcctcctgggcctccaggccacccgggagtacttcctgagggcgctacagatctgcagtgtccctctatatgtccccctggacctccaggccctcctgggatgcctggttttaaggggcctacaggatacaaaggggagcagggagaagtaggcaaggacggggagaaaggcgacccaggcccaccaggacctgccggtctccctgggtcagtgggcttacaatag

SEQ ID NO: 321216 - DNA, 576 bp, Artificial Sequence
  derived and/or modified sequence
atgtggtggagtagcacacaaaatgctggaactgagggagaggctggcccccccggactgccggggccaccaggtcccaaaggcgccccaggaaaacctggcaaaccaggtgaggcgggattacctggtctgcccggggtcgacggcctgacgggaagagacggacctcccggcccgaaaggagcccccggggagcggggaagtttaggacctccgggtccccccggcctgggcggaaaaggcttaccaggacctcccggtgaagctggagtatcaggccctccaggcgggattggattgagaggccctccgggtccctccggcctgcctggactgcctggcccacccggaccgcccgggcccccaggtcatcccggcgttctgcccgagggggctaccgatctgcagtgtccatccatatgtcctcctggccctcctggaccacccggcatgcccggttttaaagggccaactggatacaaaggggagcaaggagaagttggcaaggacggagagaaaggcgaccctggcccaccaggtcctgctggcctgccgggaagcgtcggtcttcagtag

SEQ ID NO: 321217 - DNA, 576 bp, Artificial Sequence
  derived and/or modified sequence
atgtggtggtctagcacacagaatgctgggactgaaggagaagctggtccccctggcctccccggcccccccggtccgaagggcgccccaggtaaacctggcaagcctggcgaggccggtcttcccggcttacctggagtcgatggcttaaccggacgcgatggccccccgggtcccaaaggggctcccggcgaacgaggatctcttggtcctccgggacctccgggtttgggaggtaaaggtctgcccggacccccaggcgaagctggagtgtcaggtcccccaggagggatcggtctgcgaggaccaccaggtccctctggcctccccggtctcccaggaccaccaggccccccaggtccacccgggcaccctggggtactgcccgaaggcgcaactgacctgcaatgccccagcatttgccctccaggcccaccaggaccacctggaatgccaggcttcaagggcccgacgggatataagggcgaacaaggagaggttggcaaagatggcgaaaaaggagatccaggtccaccaggccctgccggactgccaggttctgttggcctgcaatag

SEQ ID NO: 321218 - DNA, 438 bp, Artificial Sequence
  derived and/or modified sequence
atgctgggctggatccagcccagccggcagccccagctgcgggccgccccacccaccaggaccccatctgccaagcgctgcatcctgtgcaacttcctgcccggctgctggctggtgggagatgtggccggcagccggcagcccagcgccccccagaccctgcggcagaggcagcacacccggcccccaccccaggagcggggcagcggcagaagaagccccctgcgggaggcccggcgggccaacccccacttcaagagcttccctgtgctggaggcccggggcctgccctgtggggccaggagaacaggcccccggcggcctgtgcgggagatgaccctgcccagcgaccctgagcgggccaccctgcccaacccccggctgggcgccccagctgtgccccggcggggccccaggagccatggaggaagaagatag

SEQ ID NO: 321219 - RNA, 576 nt, Artificial Sequence
  derived and/or modified sequence
augugguggaguagcacacaaaaugcuggaacugagggagaggcuggcccccccggacugccggggccaccaggucccaaaggcgccccaggaaaaccuggcaaaccaggugaggcgggauuaccuggucugcccggggucgacggccugacgggaagagacggaccucccggcccgaaaggagcccccggggagcggggaaguuuaggaccuccggguccccccggccugggcggaaaaggcuuaccaggaccucccggugaagcuggaguaucaggcccuccaggcgggauuggauugagaggcccuccgggucccuccggccugccuggacugccuggcccacccggaccgcccgggcccccaggucaucccggcguucugcccgagggggcuaccgaucugcaguguccauccauauguccuccuggcccuccuggaccacccggcaugcccgguuuuaaagggccaacuggauacaaaggggagcaaggagaaguuggcaaggacggagagaaaggcgacccuggcccaccagguccugcuggccugccgggaagcgucggucuucaguag

SEQ ID NO: 321220 - RNA, 576 nt, Artificial Sequence
  derived and/or modified sequence
augugguggucuagcacacagaaugcugggacugaaggagaagcuggucccccuggccuccccggcccccccgguccgaagggcgccccagguaaaccuggcaagccuggcgaggccggucuucccggcuuaccuggagucgauggcuuaaccggacgcgauggccccccgggucccaaaggggcucccggcgaacgaggaucucuugguccuccgggaccuccggguuugggagguaaaggucugcccggacccccaggcgaagcuggagugucaggucccccaggagggaucggucugcgaggaccaccaggucccucuggccuccccggucucccaggaccaccaggccccccagguccacccgggcacccugggguacugcccgaaggcgcaacugaccugcaaugccccagcauuugcccuccaggcccaccaggaccaccuggaaugccaggcuucaagggcccgacgggauauaagggcgaacaaggagagguuggcaaagauggcgaaaaaggagauccagguccaccaggcccugccggacugccagguucuguuggccugcaauag

SEQ ID NO: 321221 - DNA, 1514 bp, Artificial Sequence
  derived and/or modified sequence
aagcacgcgaggcgcgcggtggcggtttggatctggcccctggggaatcgcgttatgtcgcgaccgaagagagcagagagcatcgatccggttcaagaccaccctcatgaacacactcatggacgtccttcgccacaggccaggatgggtggaagtgaaggacgaaggggagtgggatttctactggtgtgacgtcagctggctccgggagaacttcgaccacacctacatggatgaacatgtgcggatcagtcacttccggaaccactatgagctgacccggaagaactacatggtgaagaacctgaagcggttccggaagcagctggagcgtgaggcaggaaagctggaggcagccaagtgtgacttcttccccaaaacctttgagatgccttgcgagtaccacctgtttgtagaggagtttcgcaaaaacccaggaatcacctggatcatgaagcctgacacaagaagctctgacgaccagaaagatgatattcccgtggagaactatgtggctcagcgttacattgaaaatccttacctgataggaggccgcaagtttgacctgcgtgtctatgtgctggtgatgtcgtacatcccgctgcgggcctggctctaccgggatggctttgcccgattctccaacacccgcttcacactgaacagcattgatgaccagtatgttcacctcaccaacgtggctgtgcaaaaaacatctcccgactaccacccaaagaagggctgcaagtggacgctgcagcgcttccggcagtacctggcgtccaaacacgggcccgaggcagtggagacactcttcagggacatcgacaacatctttgtcaaaagcctgcagagtgtgcagaaggtgatcatcagtgacaagcactgcttcgagctgtacggctatgacatcctcatcgaccaggacctcaagccgtggctcctggaggtcaatgcgtccccatcactgacagccagcagccaggaagactatgagctcaagacctgcctcctggaagacaccctgcatgttgtggacatggaagcgaggctgcgtcaacgatcggaagaaacaactgaggcagctcttctgctcccttcaagttcagaagaaagcttccagttgatccccagctgccaggaggaaatcagccttagcaggccttgtgtttgagattgggagctgagccagaaaccggaaaaccctgggctcatgggcaggacagcttcgggagttgagtgtcaagcccgaagggaagacttttggaaggaaaatactggcaaatccaagaagtgaaccagccgactttaggaaagccagaagccaggctactctagaccttctgccttcagagcatgaggacttctcccactcatccctgtacctgaggcacaccaacccagacaggtccaggcatggactccaggttccctatttccagaaggaatgcgattagctttttttggcccagcacccaccctgccagggaggaaggggcaattttccagtgatg

SEQ ID NO: 321222 - protein, 371 aa, Artificial Sequence
  derived and/or modified sequence
MSRPKNQNYKGHGLSKGKEREQRASIRFKTTLMNTLMDVLRHRPGWVEVKDEGEWDFYWCDVSWLRENLEREAGKLEAAKCDFFPKTFEMPCEYHLFVEEFRKNPGITWIMKPVARSQGKGIFLFRRLKDIVDWRKDTRSSDDQKDDIPVENYVAQRYIENPYLIGGRKFDLRVYVLVMSYIPLRAWLYRDGFARFSNTRFTLNSIDDQYVHLTNVAVQKTSPDYHPKKLHPTVGPLCIHSPENGSLSVTPWPWDAHMGCKWTLQRFRQYLASKHGPEAVETLFRDIDNIFVKSLQSVQKVIISDKHCFELYGYDILIDQDLKPWLLEVNASPSLTASSQEDYELKTCLLEDTLHVVDMEASFSPIIPAEV

SEQ ID NO: 321223 - DNA, 1116 bp, Artificial Sequence
  derived and/or modified sequence
atgagcagacccaagaaccagaactacaagggccacggcctgagcaagggcaaggagagagagcagagagccagcatcagattcaagaccaccctgatgaacaccctgatggacgtgctgagacacagacccggctgggtggaggtgaaggacgagggcgagtgggacttctactggtgcgacgtgagctggctgagagagaacctggagagagaggccggcaagctggaggccgccaagtgcgacttcttccccaagaccttcgagatgccctgcgagtaccacctgttcgtggaggagttcagaaagaaccccggcatcacctggatcatgaagcccgtggccagaagccagggcaagggcatcttcctgttcagaagactgaaggacatcgtggactggagaaaggacaccagaagcagcgacgaccagaaggacgacatccccgtggagaactacgtggcccagagatacatcgagaacccctacctgatcggcggcagaaagttcgacctgagagtgtacgtgctggtgatgagctacatccccctgagagcctggctgtacagagacggcttcgccagattcagcaacaccagattcaccctgaacagcatcgacgaccagtacgtgcacctgaccaacgtggccgtgcagaagaccagccccgactaccaccccaagaagctgcaccccaccgtgggccccctgtgcatccacagccccgagaacggcagcctgagcgtgaccccctggccctgggacgcccacatgggctgcaagtggaccctgcagagattcagacagtacctggccagcaagcacggccccgaggccgtggagaccctgttcagagacatcgacaacatcttcgtgaagagcctgcagagcgtgcagaaggtgatcatcagcgacaagcactgcttcgagctgtacggctacgacatcctgatcgaccaggacctgaagccctggctgctggaggtgaacgccagccccagcctgaccgccagcagccaggaggactacgagctgaagacctgcctgctggaggacaccctgcacgtggtggacatggaggccagcttcagccccatcatccccgccgaggtgtag

SEQ ID NO: 321224 - DNA, 1116 bp, Artificial Sequence
  derived and/or modified sequence
atgagcagaccaaagaatcagaactacaagggccacggtttatccaaagggaaggaaagggagcaacgggcctcaatccgctttaaaaccacgttaatgaatacactcatggacgtcctacggcaccgtcccggctgggtggaagttaaggacgagggcgagtgggacttttactggtgcgacgtaagctggctccgggaaaatcttgagagagaagctggaaagttggaggcagccaagtgtgacttcttccccaaaactttcgagatgccttgtgagtatcacctgttcgttgaagagtttcgcaagaatcctgggatcacgtggatcatgaaaccagtagccaggtcccaggggaagggcatcttcttattccgacgccttaaagatattgtggactggaggaaggacacccggagtagcgatgaccagaaggacgacattcctgttgagaattacgtggcccagcgctatattgagaatccctaccttatcggcggtagaaagtttgatctcagagtgtacgtgctggtgatgagctatatccctttgagagcgtggctgtaccgtgatggatttgctcgcttttcaaacacacggttcacccttaactctattgatgatcagtacgtccatctgactaatgtggccgttcagaagacgtcacccgattaccaccccaagaagttacatcccactgttggcccactttgtattcactcgccagaaaatggatcacttagtgtcacaccttggccatgggacgcccacatgggctgcaagtggacgctgcaaagattcagacagtatttagcgagcaagcatggtcccgaggcagttgaaacactttttagagacatcgataatatattcgtgaagagccttcagtccgtacaaaaggtgataatttcagataagcactgtttcgaactgtacggttacgacattctaatagaccaggacttaaaaccctggctgctggaggtgaatgcaagcccaagcctcacagcctctagtcaggaggattatgaactgaaaacctgcctactggaggatacactccatgtggtagatatggaggctagcttctctcccatcatccccgcggaagtgtag

SEQ ID NO: 321225 - DNA, 1290 bp, Artificial Sequence
  derived and/or modified sequence
ataagcacgcgaggcgcgcggtggcggtttggatctggcccctggggaatcgcgttatgtcgcgaccgaagaaccaaaattacaagggccatggattgtcaaagggaaaagagcgagagcagagagcatcgatccggttcaagaccaccctcatgaacacactcatggacgtccttcgccacaggccaggatgggtggaagtgaaggacgaaggggagtgggatttctactggtgtgacgtcagctggctccgggagaacctggagcgtgaggcaggaaagctggaggcagccaagtgtgacttcttccccaaaacctttgagatgccttgcgagtaccacctgtttgtagaggagtttcgcaaaaacccaggaatcacctggatcatgaagcctgtagcccggtctcaagggaaaggcatcttcctcttccgtaggctgaaggacatcgtggactggaggaaggacacaagaagctctgacgaccagaaagatgatattcccgtggagaactatgtggctcagcgttacattgaaaatccttacctgataggaggccgcaagtttgacctgcgtgtctatgtgctggtgatgtcgtacatcccgctgcgggcctggctctaccgggatggctttgcccgattctccaacacccgcttcacactgaacagcattgatgaccagtatgttcacctcaccaacgtggctgtgcaaaaaacatctcccgactaccacccaaagaagctccatcccacagtggggcccttgtgcatacacagccctgaaaatggcagcctgtcggtcactccttggccttgggatgcacacatgggctgcaagtggacgctgcagcgcttccggcagtacctggcgtccaaacacgggcccgaggcagtggagacactcttcagggacatcgacaacatctttgtcaaaagcctgcagagtgtgcagaaggtgatcatcagtgacaagcactgcttcgagctgtacggctatgacatcctcatcgaccaggacctcaagccgtggctcctggaggtcaatgcgtccccatcactgacagccagcagccaggaagactatgagctcaagacctgcctcctggaagacaccctgcatgttgtggacatggaagcgagcttttccccgattattccagcagaagtttgagggctgattctccttgctggtaactgggacacattcccattcctaaaccactcactgtgactctgcttgaccaggctcacgggaagggagaagcgagtcgggggctttgacctcatgt

SEQ ID NO: 321226 - DNA, 1116 bp, Artificial Sequence
  derived and/or modified sequence
atgagccggcccaagaaccagaactacaagggccacggcctgagcaagggcaaggagcgggagcagagggccagcatccgcttcaagaccaccctgatgaacaccctgatggatgtgctgcggcaccggcccggctgggtggaggtgaaggatgaaggagagtgggacttctactggtgtgatgtgtcctggctgcgggagaacctggagcgggaggccggcaagctggaggccgccaagtgtgacttcttccccaagacctttgagatgccctgtgagtaccacctgtttgtggaggagttcaggaagaaccctggcatcacctggatcatgaagcctgtggcccggagccagggcaagggcatcttcctgttccggcggctgaaggacatcgtggactggaggaaggacaccaggagcagtgatgaccagaaggatgacatccctgtggagaactacgtggcccagcgctacatcgagaacccctacctgattggaggcaggaagtttgacctgcgggtgtatgtgctggtgatgagctacatccccctgcgggcctggctgtacagagatggctttgcccgcttcagcaacacccgcttcaccctgaacagcattgatgaccagtatgtgcacctgaccaacgtggccgtgcagaagaccagcccagactaccaccccaagaagctgcaccccaccgtgggccccctgtgcatccacagcccagaaaatggcagcctgtctgtgaccccctggccctgggatgcccacatgggctgcaagtggaccctgcagcgcttccggcagtacctggccagcaagcacggccctgaggccgtggagaccctcttccgggacatcgacaacatctttgtgaagagcctgcagagcgtgcagaaggtgatcatcagtgacaagcactgctttgagctgtatggctatgacatcctgattgaccaggacctgaagccctggctgctggaggtgaatgccagccccagcctgacagccagcagccaggaggactatgagctgaagacctgcctgctggaggacaccctgcacgtggtggacatggaggccagcttcagccccatcatcccagctgaggtgtag

SEQ ID NO: 321227 - DNA, 1116 bp, Artificial Sequence
  derived and/or modified sequence
atgagccggcccaagaaccagaactacaagggccacggcctgagcaaaggcaaagagagggaacaaagggcctccattaggtttaaaaccaccctcatgaacactctgatggacgtgctgcgacatagacccggttgggtggaggtgaaagatgaaggggagtgggacttttattggtgtgacgttagctggctacgagagaacctggaaagggaggcaggtaagcttgaggctgctaagtgcgatttctttcccaaaacgtttgagatgccatgtgaataccacctgttcgtggaggagttccggaaaaatcctgggatcacttggatcatgaaacccgttgcgagatcacagggaaaagggatcttcctgttccgtagactcaaagacatcgtggactggcggaaggacacacgctccagtgatgatcagaaagacgacattcctgtagaaaactacgtggctcagcgctacattgaaaatccttacctaatcgggggccggaagttcgacttgcgcgtgtatgtcctggtaatgagctatatcccattgcgtgcttggctctacagagatgggttcgctcgcttctctaatacccgattcactctgaattccattgatgaccagtacgtgcatttaaccaacgtggccgtgcaaaagaccagtcccgactaccatcctaagaaactacacccaaccgtaggacccctgtgcatccatagccctgaaaacggtagcttaagcgtgactccatggccttgggatgctcatatgggctgcaagtggacactccaacgattccggcagtacctggccagcaagcatggaccggaggctgtcgagacactgtttcgcgatatcgataacatcttcgtgaagagcctgcagtccgtgcagaaggtgatcatctctgataagcactgcttcgaactctatgggtacgatattctaatagaccaggatttaaagccttggctgcttgaggtcaatgctagtccatccctaaccgcgagcagccaggaggactacgagttaaaaacctgcctgctggaggacacactccacgtggtggacatggaagcatccttcagtcccatcattcccgcggaggtgtag

SEQ ID NO: 321228 - DNA, 1116 bp, Artificial Sequence
  derived and/or modified sequence
atgagcaggcctaagaatcagaactacaaggggcacgggctgtccaaaggcaaggagagagagcagcgggctagtataaggtttaaaaccactctaatgaataccctgatggacgtcctcaggcatcggcctggctgggtagaagttaaagacgagggggagtgggatttctattggtgcgacgtatcctggttgcgggagaatcttgagagagaggccggaaagttggaagccgcaaaatgtgactttttcccgaagaccttcgagatgccctgcgagtaccacctcttcgtggaagaatttcggaaaaatcctggaatcacatggatcatgaaacccgtcgctagatcacaggggaaaggcatctttttgttccggagactaaaagacattgttgactggcggaaggatacgagatcttccgacgaccaaaaggacgatatcccagtggagaattacgtagctcagcgatacattgaaaatccctacctgatcggaggcaggaagtttgacctacgggtatatgtgctggtgatgtcatatattcctcttcgcgcatggctgtaccgggacggttttgccaggttctcaaatacccgatttaccctcaattctatagacgatcagtatgtgcatctcaccaatgtggccgtgcagaagaccagtccagactaccaccctaagaagctccatcctaccgttggtcccctctgcatacattcccctgaaaatggatctttgtctgtgactccttggccgtgggacgcgcatatgggctgcaaatggactttacaacgtttccggcaatacctcgcttcaaagcatggaccagaagctgtcgagactttgtttagagatatcgacaacatcttcgtcaaaagtttacagtctgtccagaaagtgatcattagtgacaaacactgttttgaactctatgggtacgacattttaatcgatcaggacctcaaaccctggctgctggaggtgaacgcaagtcccagtctgaccgccagttctcaggaggactacgaactgaagacatgcctccttgaggatactctgcacgtggtggatatggaggcctccttttcgcccatcataccagctgaggtttag

SEQ ID NO: 321229 - protein, 347 aa, Artificial Sequence
  derived and/or modified sequence
MNTLMDVLRHRPGWVEVKDEGEWDFYWCDVSWLRENFDHTYMDEHVRISHFRNHYELTRKNYMVKNLKRFRKQLEREAGKLEAAKCDFFPKTFEMPCEYHLFVEEFRKNPGITWIMKPVARSQGKGIFLFRRLKDIVDWRKDTRSSDDQKDDIPVENYVAQRYIENPYLIGGRKFDLRVYVLVMSYIPLRAWLYRDGFARFSNTRFTLNSIDDQYVHLTNVAVQKTSPDYHPKKGCKWTLQRFRQYLASKHGPEAVETLFRDIDNIFVKSLQSVQKVIISDKHCFELYGYDILIDQDLKPWLLEVNASPSLTASSQEDYELKTCLLEDTLHVVDMEARSLRADSPCW

SEQ ID NO: 321230 - DNA, 1447 bp, Artificial Sequence
  derived and/or modified sequence
gaggtgggggcgggggccttaccccaccctggcaccggcaggcgcgggcggatggggggatgtcgcctagagccccccggccggcccacaaactcccgtcccccttccggctctgcctggacgtccctgcgggccccgggggaaagcacccaacttctcccgcctcggcttctagcagaaacgtgacggggctggactttgatcgccgagggctctctgctcttcagagtctgcttggaacgggataagagggatggtgccatccagggaagctctgctgggaccaggcacaactgccattaggtgccccaagaaattacagaaccaaaattacaagggccatggattgtcaaagggaaaagagcgagagcagagagcatcgatccggttcaagaccaccctcatgaacacactcatggacgtccttcgccacaggccaggatgggtggaagtgaaggacgaaggggagtgggatttctactggtgtgacgtcagctggctccgggagaacttcgaccacacctacatggatgaacatgtgcggatcagtcacttccggaaccactatgagctgacccggaagaactacatggtgaagaacctgaagcggttccggaagcagctggagcgtgaggcaggaaagctggaggcagccaagtgtgacttcttccccaaaacctttgagatgccttgcgagtaccacctgtttgtagaggagtttcgcaaaaacccaggaatcacctggatcatgaagcctgtagcccggtctcaagggaaaggcatcttcctcttccgtaggctgaaggacatcgtggactggaggaaggacacaagaagctctgacgaccagaaagatgatattcccgtggagaactatgtggctcagcgttacattgaaaatccttacctgataggaggccgcaagtttgacctgcgtgtctatgtgctggtgatgtcgtacatcccgctgcgggcctggctctaccgggatggctttgcccgattctccaacacccgcttcacactgaacagcattgatgaccagtatgttcacctcaccaacgtggctgtgcaaaaaacatctcccgactaccacccaaagaagggctgcaagtggacgctgcagcgcttccggcagtacctggcgtccaaacacgggcccgaggcagtggagacactcttcagggacatcgacaacatctttgtcaaaagcctgcagagtgtgcagaaggtgatcatcagtgacaagcactgcttcgagctgtacggctatgacatcctcatcgaccaggacctcaagccgtggctcctggaggtcaatgcgtccccatcactgacagccagcagccaggaagactatgagctcaagacctgcctcctggaagacaccctgcatgttgtggacatggaagcgagaagtttgagggctgattctccttgctggtaa

SEQ ID NO: 321231 - DNA, 2402 bp, Artificial Sequence
  derived and/or modified sequence
gaggtgggggcgggggccttaccccaccctggcaccggcaggcgcgggcggatggggggatgtcgcctagagccccccggccggcccacaaactcccgtcccccttccggctctgcctggacgtccctgcgggccccgggggaaagcacccaacttctcccgcctcggcttctagcagaaacgtgacggggctggactttgatcgccgagggctctctgctcttcagagtctgcttggaacgggataagagggatggtgccatccagggaagctctgctgggaccaggcacaactgccattaggtgccccaagaaattacagaaccaaaattacaagggccatggattgtcaaagggaaaagagcgagagcagagagcatcgatccggttcaagaccaccctcatgaacacactcatggacgtccttcgccacaggccaggatgggtggaagtgaaggacgaaggggagtgggatttctactggtgtgacgtcagctggctccgggagaacttcgaccacacctacatggatgaacatgtgcggatcagtcacttccggaaccactatgagctgacccggaagaactacatggtgaagaacctgaagcggttccggaagcagctggagcgtgaggcaggaaagctggaggcagccaagtgtgacttcttccccaaaacctttgagatgccttgcgagtaccacctgtttgtagaggagtttcgcaaaaacccaggaatcacctggatcatgaagcctgacacaagaagctctgacgaccagaaagatgatattcccgtggagaactatgtggctcagcgttacattgaaaatccttacctgataggaggccgcaagtttgacctgcgtgtctatgtgctggtgatgtcgtacatcccgctgcgggcctggctctaccgggatggctttgcccgattctccaacacccgcttcacactgaacagcattgatgaccagtatgttcacctcaccaacgtggctgtgcaaaaaacatctcccgactaccacccaaagaaggtggctcctggaggtcaatgcgtccccatcactgacagccagcagccaggaagactatgagctcaagacctgcctcctggaagacaccctgcatgttgtggacatggaagcgaggctcacgggaagggagaagcgagtcgggggctttgacctcatgtggaatgatggccctgttagcagagaggagggggctcctgacctgtcgggaatgggaaactttgtgaccaacacacatctcggctgcgtcaacgatcggaagaaacaactgaggcagctcttctgctcccttcaagttcagaagaaagcttccagttgatccccagctgccaggaggaaatcagccttagcaggccttgtgtttgagattgggagctgagccagaaaccggaaaaccctgggctcatgggcaggacagcttcgggagttgagtgtcaagcccgaagggaagacttttggaaggaaaatactggcaaatccaagaagtgaaccagccgactttaggaaagccagaagccaggctactctagaccttctgccttcagagcatgaggacttctcccactcatccctgtacctgaggcacaccaacccagacaggtccaggcatggactccaggttccctatttccagaaggaatgcgattagctttttttggcccagcacccaccctgccagggaggaaggggcaattttccagtgatgaaattgtgaatcaggcagtcacactggacaacatctagcaaggtgaattctgcaactccctactttatttacattttaaaataagcaatatattcatacggtttaaaatccaaagtttacaaaagggtatagggtgacatctccttccctcccacctgtgcgccccaaccctgcaggtgctgttctgagggaatcacactgtgcttgcacaaaaattattagcttataagacaccagccttccccttgctttcctcacttgatgtatcttggagcttgttccttattcttgattatagttgtatggtattgcactatctggagctaacacctgtgacccacactcatgttttaaaagtttctgcattagtcaaaaatatttaaaaggagattcaacttcacaacccatatgtctagcttctcttgaaaacacgtaagaactggccatgacagcctgtgtttctatgtaactatgagccagagccaaggagcggggggaccaggagaggtgtgcccctgccatgctgccatttgttatcacccgcctgtcaaatcacaggtttatttcaaggcaagaaccatgttcataggttgtattctaaatggagtggcgtgcccttactgaaggactagatgaggcaaataaagactagttgctgctatt

SEQ ID NO: 321232 - protein, 230 aa, Artificial Sequence
  derived and/or modified sequence
MNTLMDVLRHRPGWVEVKDEGEWDFYWCDVSWLRENFDHTYMDEHVRISHFRNHYELTRKNYMVKNLKRFRKQLEREAGKLEAAKCDFFPKTFEMPCEYHLFVEEFRKNPGITWIMKPDTRSSDDQKDDIPVENYVAQRYIENPYLIGGRKFDLRVYVLVMSYIPLRAWLYRDGFARFSNTRFTLNSIDDQYVHLTNVAVQKTSPDYHPKKVAPGGQCVPITDSQQPGRL

SEQ ID NO: 321233 - DNA, 693 bp, Artificial Sequence
  derived and/or modified sequence
atgaacaccctgatggacgtgctgagacacagacccggctgggtggaggtgaaggacgagggcgagtgggacttctactggtgcgacgtgagctggctgagagagaacttcgaccacacctacatggacgagcacgtgagaatcagccacttcagaaaccactacgagctgaccagaaagaactacatggtgaagaacctgaagagattcagaaagcagctggagagagaggccggcaagctggaggccgccaagtgcgacttcttccccaagaccttcgagatgccctgcgagtaccacctgttcgtggaggagttcagaaagaaccccggcatcacctggatcatgaagcccgacaccagaagcagcgacgaccagaaggacgacatccccgtggagaactacgtggcccagagatacatcgagaacccctacctgatcggcggcagaaagttcgacctgagagtgtacgtgctggtgatgagctacatccccctgagagcctggctgtacagagacggcttcgccagattcagcaacaccagattcaccctgaacagcatcgacgaccagtacgtgcacctgaccaacgtggccgtgcagaagaccagccccgactaccaccccaagaaggtggcccccggcggccagtgcgtgcccatcaccgacagccagcagcccggcagactgtag

SEQ ID NO: 321234 - DNA, 693 bp, Artificial Sequence
  derived and/or modified sequence
atgaataccctgatggacgttcttcgccatcggcccggctgggttgaggtaaaggacgaaggtgaatgggacttttactggtgcgacgtgtcctggctccgcgagaacttcgatcacacctatatggatgagcatgtgcgaattagccactttagaaaccactatgagctgactcgcaaaaattacatggtgaaaaacctcaagcggtttaggaagcagctggagagggaggctggcaagctggaggcggccaaatgcgacttttttccaaagacatttgagatgccgtgcgagtaccacctctttgtggaggaattcagaaagaatccggggatcacctggataatgaaacctgacacaaggtcaagtgacgatcagaaagacgacataccagtcgagaactatgtagctcaaagatacatcgagaatccatatctcataggagggcggaaatttgacctgagagtatacgtgttggtgatgtcttatataccactgcgcgcctggctgtacagagacggcttcgctcggttctccaacacccgttttacattgaacagtatagatgatcagtatgtacatcttacaaacgtggcagttcagaaaacctcacccgactaccatccaaaaaaagtcgccccaggcggtcagtgcgtgccaattaccgatagccaacagccgggtcggctctag

SEQ ID NO: 321235 - DNA, 693 bp, Artificial Sequence
  derived and/or modified sequence
atgaacaccctgatggatgtgctgcggcaccggcccggctgggtggaggtgaaggatgaaggagagtgggacttctactggtgtgatgtgtcctggctgagagaaaattttgaccacacctacatggatgaacatgtgcgcatcagccacttcaggaaccactatgagctgaccaggaagaactacatggtgaagaacctgaagcgcttcaggaagcagctggagcgggaggccggcaagctggaggccgccaagtgtgacttcttccccaagacctttgagatgccctgtgagtaccacctgtttgtggaggagttcaggaagaaccctggcatcacctggatcatgaagccagacaccaggagcagtgatgaccagaaggatgacatccctgtggagaactacgtggcccagcgctacatcgagaacccctacctgattggaggcaggaagtttgacctgcgggtgtatgtgctggtgatgagctacatccccctgcgggcctggctgtacagagatggctttgcccgcttcagcaacacccgcttcaccctgaacagcattgatgaccagtatgtgcacctgaccaacgtggccgtgcagaagaccagcccagactaccaccccaagaaggtggcccctgggggccagtgtgtgcccatcacagacagccagcagcccggccgcctgtag

SEQ ID NO: 321236 - DNA, 693 bp, Artificial Sequence
  derived and/or modified sequence
atgaacaccctgatggacgtgctgcggcaccggcccggctgggtggaggttaaggatgagggagagtgggacttctattggtgcgacgtttcatggttgagggagaattttgatcatacctatatggacgagcatgtgaggattagtcatttccggaatcactatgaactcactagaaaaaattacatggtgaaaaacttaaaaagattcaggaagcagctggagagagaagccggaaaattagaggctgccaagtgcgatttcttcccaaaaacatttgaaatgccatgcgaatatcatctcttcgtcgaggagttcagaaaaaacccaggaatcacgtggattatgaagcccgacacccggtctagcgatgaccagaaggatgacatcccagtggagaattacgtcgcacagcggtatattgagaacccgtatcttatcgggggccgaaagtttgatttaagagtctacgtcctcgttatgagctatatccccctccgcgcatggctgtatcgcgatggctttgcccgtttctcgaacacaagattcacgctcaacagtatcgacgaccagtacgtacatttgacgaatgttgcggtccagaagactagcccggactatcatcccaaaaaagtggcgcctggaggacagtgtgtgcccattactgacagccagcagcccggaaggctgtag

SEQ ID NO: 321237 - DNA, 693 bp, Artificial Sequence
  derived and/or modified sequence
atgaatacactaatggatgtgctcaggcataggccaggttgggtggaagtcaaggacgaaggcgaatgggatttttactggtgtgacgtctcctggctcagagagaattttgatcacacctacatggatgagcacgtgcggatttcgcattttcggaaccactacgagcttacaaggaagaattacatggtgaaaaacctgaaaaggttccgaaaacagctggaacgcgaggctggcaagctcgaagctgccaaatgtgacttttttcccaaaacctttgagatgccttgcgaatatcacctgtttgtggaagaattcaggaaaaatccagggatcacctggatcatgaagcctgatacaaggtcaagcgacgatcaaaaggacgacatcccggtggagaactatgttgcacaaagatacattgagaatccttatctaattgggggacgcaaatttgatttgagagtgtacgtactcgtaatgtcctatatcccccttcgggcatggctataccgcgatggtttcgctaggttctccaatacaaggttcacgctgaactctatagatgaccaatatgtgcaccttacaaacgtggctgtgcaaaagacaagccccgattatcatcctaaaaaagtcgcaccgggaggccagtgtgtgccaattacggatagccaacagcctggcagactgtag

SEQ ID NO: 321238 - DNA, 4611 bp, Artificial Sequence
  derived and/or modified sequence
atgggcgtagtgaactttgtgtttcgagctagtgaggacctgcaggtactcgagaactactcagatgccccgatgacaccgaaacagattctccaggtcattgaagctgaaggattgaaggagatgtcggggacctcccctctggcatgtctcaatgccatgctgcatagcaatagtcgaggcggtgagggccttttttacaaattgcctggcagaatttcgctctttacgctcaaaaaggatgccctccagtggtcacgacatcccgcaaccgtagagggggaagagccagaagataccgccgacgtcgagtcatgtgggtccaacgaagcgagcaccgtgagcggggaaaatgatgtatctctcgacgaaacctcctccaacgctagctgtagcactgagtcacagtccagaccactgtcaaacccacgagacagctacagagcctccagccaggccaataaacagaaaaagaagaccggagtaatgctgcctagggttgtactgacccctttgaaggtcaatggcgcacacgtagagagcgccagcggtttctccggctgccatgctgatggagaatcaggcagtccttcctctagcagttcagggagtctggctctggggtccgctgccatccgcggccaggcagaagttactcaagatcctgcccctctgctccgcggatttagaaagccagccactggccagatgaagaggaatcggggcgaagagatcgactttgaaacccctggtagtatcctggtgaacacaaacttaagggcactcattaattcccgtaccttccacgcgcttccttctcacttccagcagcagctgctgttccttctacctgaagtggacagacaggtcgggacagatgggctgctgcggctgtctagtagcgccttgaacaatgagtttttcacgcatgccgcacaatcatggagagaaagactcgccgatggcgagtttactcacgagatgcaggtgcgtattcgccaggagatggagaaagagaaaaaagtggagcagtggaaagagaagttttttgaggactattatggccagaagttgggcctgactaaagaggaatcactacaacaaaacgtgggccaggaggaagcagaaatcaaatccggcctatgcgtgcccggcgaatcagtccggatacagagggggccggctacccgacaacgagacggtcacttcaagaagaggtcacggccagacctgcgaacccgagcacgccgaaatctgtacaaaaagcaggagtcagagcaagccggggtggctaaagacgcgaaaagcgtcgcatccgacgtgcctctgtacaaggacggcgaagccaagacagaccctgccggtttgtccagtccacacctcccagggaccagttccgctgctccagacctggaaggccccgaattccctgtcgaaagcgtcgcttcccggattcaggccgagccagataacctggcacgagcttccgccagtcctgatagaattccttcgctacctcaggagactgttgatcaagagcctaaagaccagaaacgaaagtcgtttgaacaggctgcgagcgccagcttcccagaaaagaaaccacgactggaagaccgccagagctttaggaacaccatcgagtctgtccacacagagaaacctcagcctaccaaagaagaaccgaaggtgccacccatccgcatccagctgtccagaatcaagccgccttgggtcgtgaaaggtcagcccacctatcaaatatgcccccggatcatacctactaccgagtcaagctgcagagggtggactggcgcccggactctagccgacattaaagctcgcgccttgcaggtgcgaggcgcacggggacaccactgtcacagagaggctgcaacaaccgccatcggaggcggcggcgggccaggtggcggcggcggcggcgccacggatgagggcggcgggcgggggagctcctctggagatggcggggaggcctgcggacatcccgaaccaaggggaggtccctcaacccccggaaaatgcacttctgacctgcagcgaacccagctactacccccgtatccgcttaatggcgaacatactcaagcgggcaccgctatgtccagagcccgtcgggaggacctcccatccctccggaaagaagagtcctgcctactccagcgggctactgtagggctgaccgatggcctgggcgacgcgagtcagcttcctgtggcgcctaccggcgatcaaccctgtcaggcactgcctctgttgagcagccagacatcagttgccgagagactcgtagagcagccgcagttgcatcccgacgtcagaacagaatgcgaaagcgggaccacgtcttgggaaagcgatgacgaggaacagggacctactgtgcccgccgataacggccctattctgtctctagttggagatgacactctggagaagggcaccgggcaggccttagactcgcatcccaccatgaaggatccagtgaacgtgaccccctcctccactcccgagagcagccccacggactgcctgcagaatcgcgccttcgatgacgagctcggactaggtggctcttgcccaccgatgcgagaaagcgatactagacaagagaacctgaaaactaaagccctcgtatcaaactccagtctgcactggattcctattccgtctaacgatgaggtggtgaaacagcctaaacccgagtcgcgggagcacataccctcggtagaaccccaggtgggagaggaatgggagaaagcagcgccaacaccacctgcactccccggtgaccttactgccgaggagggactggacccactggattcgttgactagcttatggaccgtgccctctcgtgggggctccgattcaaacggctcctactgccagcaggttgatattgagaagttaaagatcaacggcgattctgaagcattgagccctcacggcgagtcaactgatacggcttccgacttcgaaggccacctgacggaagatagctctgaagccgacacaagagaagctgcagtcaccaagggaagctccgttgataaggatgagaagcctaactggaaccagtcagcccccctgtcaaaggtaaacggcgatatgcgcctagtgacacggacggatgggatggtagcccctcagagttgggtctcccgggtgtgtgccgtacgtcagaagatccccgacagtctccttctggcatctactgagtatcagccacgggctgtttgcctctccatgccggggtctagcgtcgaagccaccaatccccttgtgatgcagcttctgcaaggcagcctacccctcgagaaagtgttgcctcccgctcacgacgattctatgtcagagtctccgcaggtgcccctgaccaaagaccagtcccacggcagtctgagaatggggagcttgcacggtctgggcaaaaacagtgggatggtggacgggagctccccgtcatcactgagggcacttaaagaaccattgttacccgattcctgtgagactggcacaggcctggctcggatcgaggcaactcaggctcctggggccccgcaaaaaaattgcaaagccgtgccctcttttgactcactgcatcccgtaactaatcccatcacaagtagccgcaaactggaggaaatggattcaaaggagcaattttcctctttttcttgtgaggaccagaaagaagtgcgcgctatgagccaagactcgaatagtaacgccgcccccggcaagtcccccggtgatctgacgacaagccggaccccccggtttagctccccaaacgtaatttcttttggccctgagcagacaggaagggccctgggtgatcagagcaatgtgaccggacagggcaagaagctgttcggaagtggcaacgtggctgccacactgcagagaccgcgacccgctgacccaatgcccctgcctgctgagattcccccagtgttcccctctggaaaactcggcccaagtaccaatagtatgtctggcggggtacagactccccgcgaggactgggctcccaaacctcacgcattcgtggggagtgtaaagaacgaaaagacctttgtggggggtcccttgaaggctaacgcagagaacaggaaagcaaccggccattccccgttggagctcgtgggacatctggagggtatgccattcgtgatggaccttccgttctggaaactcccaagggagccaggaaaaggcctgtcagaacctctagaacccagctctctgccaagtcagctctctatcaagcaggctttctatggcaaactgagtaaattacagctgtctagcacatcttttaactacagtagcagctctcccaccttccccaagggcctggcgggctccgtggtccagctgagtcataaggccaatttcggggctagccattctgccagtctttccctccagatgttcacggattcttctaccgtggaaagcattagtctacagtgtgcatgctccctgaaagcgatgatcatgtgccagggatgcggcgccttctgtcacgatgactgtattggaccgagtaaactttgtgtcctatgtcttgtcgtgcggtag

SEQ ID NO: 321239 - DNA, 6591 bp, Artificial Sequence
  derived and/or modified sequence
atgggggttgtgaattttgtgttcagagcgtcagaggacttgcaggtattagaaaactactcggatgctccaatgacaccaaaacagattctgcaggtcatagaggcagaaggactaaaggaaatgagtgggacttcccctctcgcatgcctcaatgctatgctacattccaattcaagaggaggagaggggttgttttataaactgcctggccgaatcagccttttcacgctcaagaaggatgccctgcagtggtctcgccatccagctacagtggagggagaggagccagaggacacggctgatgtggagagctgtgggtctaatgaagccagcactgtgagtggtgaaaacgatgtatctcttgatgaaacatcttcgaacgcatcctgttctacagaatctcagagtcgacctctttccaatcccagggacagctacagagcttcctcacaggcgaacaaacaaaagaaaaagactggggtgatgctgcctcgagttgtcctgactcctctgaaggtaaacggggcccacgtggaatctgcatcagggttctcgggctgccacgccgatggcgagagcggcagcccgtccagcagcagcagcggctctctggccctgggcagcgctgctattcgtggccaggccgaggtcacccaggaccctgccccgctcctgagaggcttccggaagccagccacaggtcaaatgaagcgcaacagaggggaagaaatagattttgagacacctgggtccattcttgtcaacaccaacctccgtgccctgatcaactctcggaccttccatgccttaccatcacacttccagcagcagctcctcttcctcctgcctgaagtagacagacaggtggggacggatggcctgttgcgtctcagcagcagtgcactaaataacgagttttttacccatgcggctcagagctggcgggagcgcctggctgatggtgaatttactcatgagatgcaagtcaggatacgacaggaaatggagaaggaaaagaaggtggaacaatggaaagaaaagttctttgaagactactatggacagaagctgggtttgaccaaagaagagtcattgcagcagaacgtgggccaggaggaggctgaaatcaaaagtggcttgtgtgtcccaggagaatcagtgcgtatacagcgtggtccagccacccgacagcgagatgggcattttaagaaacgctctcggccagatctccgaaccagagccagaaggaatctgtacaaaaaacaggagtcagaacaagcaggggttgctaaggatgcaaaatctgtggcctcagatgttcccctctacaaggatggggaggctaagactgacccagcagggctgagcagtccccatctgccaggcacatcctctgcagcacccgacctggagggtcccgaattcccagttgagtctgtggcttctcggatccaggctgagccagacaacttggcacgtgcctctgcatctccagacagaattcctagcctgcctcaggaaactgtggatcaggaacccaaggatcagaagaggaaatcctttgagcaggcggcctctgcatcctttcccgaaaagaagccccggcttgaagatcgtcagtcctttcgtaacacaattgaaagtgttcacaccgaaaagccacagcccactaaagaggagcccaaagtcccgcccatccggattcaactttcacgtatcaaaccaccctgggtggttaaaggtcagcccacttaccagatatgcccccggatcatccccaccacggagtcctcctgccggggttggactggcgccaggaccctcgcagacattaaagcccgtgctctgcaggtccgaggggcgagaggtcaccactgccatagagaggcggccaccactgccatcggaggggggggtggcccgggtggaggtggcggcggggccaccgatgagggaggtggcagaggcagcagcagtggtgatggtggtgaggcctgtggccaccctgagcccaggggaggcccgagcacccctggaaagtgtacgtcagatctacagcgaacacaactactgccgccttatcctctaaatggggagcatacccaggccggaactgccatgtccagagctaggagagaggacctgccttctctgagaaaggaggaaagctgcctactacagagggctacagttggactcacagatgggctaggagatgcctcccaactccccgttgctcccactggggaccagccatgccaggccttgcccctactgtcctcccaaacctcagtagctgagagattagtggagcagcctcagttgcatccggatgttagaactgaatgtgagtctggcaccacttcctgggaaagtgatgatgaggagcaaggacccaccgttcctgcagacaatggtcccattctgtctctagtgggagatgatacattagagaaaggaactggccaagctcttgacagtcatcccactatgaaggatcctgtaaatgtgacccccagttccacacctgaatcctcaccgactgattgcctgcagaacagagcatttgatgacgaattagggcttggtggctcatgccctcctatgagggaaagtgatactagacaagaaaacttgaaaaccaaggctctcgtttctaacagttctttgcattggatacccatcccatcgaatgatgaggtagtgaaacagcccaaaccagaatccagagaacacataccatctgttgagccccaggttggagaggagtgggagaaagctgctcccacccctcctgcattgcctggggatttgacagctgaggagggtctagatcctcttgacagccttacttcactctggactgtgccatctcgaggaggcagtgacagcaatggcagttactgtcaacaggtggacattgaaaagctgaaaatcaacggagactctgaagcactgagtcctcacggtgagtccacggatacagcctctgactttgaaggtcacctcacggaggacagcagtgaggctgacactagagaagctgcagtgacaaagggatcttcggtggacaaggatgagaaacccaattggaaccaatctgccccactgtccaaggtgaatggtgacatgcgtctggttacaaggacagatgggatggttgctcctcagagctgggtgtctcgagtatgtgcggtccgccaaaagatcccagattccctactgctggccagtactgagtaccagccaagagccgtgtgcctgtccatgcctgggtcctcagtggaggccactaacccacttgtgatgcagttgctgcagggtagcttgcccctagagaaggttcttccaccagcccacgatgacagcatgtcagaatccccacaagtaccacttacaaaagaccagagccatggctcgctacgcatgggatctttacatggtcttggaaaaaacagtggcatggttgatggaagcagccccagttctttaagggctttgaaggagcctcttctgccagatagctgtgaaacaggcactggtcttgccaggattgaggccacccaggctcctggagcaccccaaaagaattgcaaggcagtcccaagttttgactccctccatccagtgacaaatcccattacatcctctaggaaactggaagaaatggattccaaagagcagttctcttcctttagttgtgaagatcagaaggaagtccgtgctatgtcacaggacagtaattcaaatgctgctccaggaaagagcccaggagatcttactacctcgagaacacctcgtttctcatctccaaatgtgatctcctttggtccagagcagacaggtcgggccctgggtgatcagagcaatgttacaggccaagggaagaagctttttggctctgggaatgtggctgcaacccttcagcgccccaggcctgcggacccgatgcctcttcctgctgagatccctccagtttttcccagtgggaagttgggaccaagcacaaactccatgtctggtggggtacagactccaagggaagactgggctccaaagccacatgcctttgttggcagcgtcaagaatgagaagacttttgtggggggtcctcttaaggcaaatgccgagaacaggaaagctactgggcatagtcccctggaactggtgggtcacttggaagggatgccctttgtcatggacttgcccttctggaaattaccccgagagccagggaaggggctcagtgagcctctggagccttcttctctcccctcccaactcagcatcaagcaggcattttatgggaagctttctaaactccaactgagttccaccagctttaattattcctctagctctcccacctttcccaaaggccttgctggaagtgtggtgcagctgagccacaaagcaaactttggtgcgagccacagtgcatcactttccttgcaaatgttcactgacagcagcacggtggaaagcatctcgctccagtgtgcgtgcagcctgaaagccatgatcatgtgccaaggctgcggtgcgttctgtcacgatgactgtattggaccctcaaagctctgtgtattgtgccttgtggtgagataataaattatggccatgggaaacattgtatatttagtgtgtgtattttgataatgattgatcttaaatctgtatacagaatatcattgatataatactctttaggcaggagcactcttgccttcccccaaaatttacactgctaaagccctctgtcacttggcgacccttctggtcttgctggaggggtttcctgggtataacccattgggctgcccaaggccagccagcctgagctctcctgcaagacagagcctgatgtggcacggagtggggttgcggggggtggggggactgcctgactcccagagggacttgaaactgaagcaagaaggttgcattctccaccaagggagttaacctacctgaactaagtagaaatgccagtcttccactaccccctccctgccatcttttcttctgctactttggggagttgatggccaggaaagaagccagcacagggttaaagtaactcctggcattgcccaccagggggctggtgcacctgctgacctcagggtcacagttgagtcatttgccagttgacggagcaagtttgaccttggttctgttgctgaagcaaatttggaacttttctgtctcagtgtgatccactaacccacaggatcatttggaaccttgaatagctctgcttggacaatggggttggggaatagggttgtctttcctatgaaaatgccatctgtagaccttgtgagtcagccgtccagatgtttgcaggtgaattcctctgcttgacatcctccctgtcactttggaccctatgggagtgggcatctccacgcacctgtgtatgtgaaagtcattttacatttcaaagcagtgtgtgtttcttatttttatatttttaactctttattcttggatgtataaagtgaactttttggcttctgtaagtatgctctatgcacctctaatgttttatcatgtatttatatgttgtacacagtactggctgattctgtaaatggatgtattgtacagagaacatgaacgtctcttcctaattttacatcttcagcatcattgcattaaagtggtgtaatctccttctctacatctgttgtcagagccactgagtgctgtgctgctcgacgtgagggtgaaatgattgacttgtgacctgccaggttgcccgatgccctgttgggtcaccggctggacctgctgcagcctgcagagccacagtcagcctgcccacatgccaccgagcaaacgcatcttgcttttcacatctctcctcctacagccttaatggctgcttgctgccatatgtgacaaatcaccaccaccagtgttaagtgcttctggattcatgggtgagttccctgggcagcccccaggaaggccttccagatctggctccagggtcaccacctgtcacagcaatacctgggaccatgctctcctgggactgtgaggctccttttgacgtacttttgacatcaggcaggtttgggaagaaacaaagccatgcctgctcctgcctctctcccaacatgtttccagcaagtagatgcccctgtgtgtgttttcccttgccttgtttcctgccttatatcttgtatttcgacttattacagagttgagggttcttgcttaatttagatcaagtataaaatttgtatgacttcaagtctcattttatctgaaaggtttttttctcatttaatctgatgtggcattttcgtcatctgaagcatgagtgacaagttgggaatgatgtggtgatttagaatgcagtattggccaagtccaagttgtcaacttaagcgtctgtttaccaaagaccgggaacaggggcccaaacatgtccagtcctcttcttccctctgctggaacctttggggacactcaagggtacagtttgacactgatctggtccatgaggctgcccagagaaagcactgcttctgtatgtctcttgtggtattggaacaataaacccgtacaacctgc

SEQ ID NO: 321240 - DNA, 4611 bp, Artificial Sequence
  derived and/or modified sequence
atgggcgtggtgaactttgtgttccgggccagcgaggacctgcaggtgctggagaactacagtgatgcccccatgacccccaagcagatcctgcaggtgattgaggccgagggcctgaaggagatgagcggcaccagccccctggcctgcctgaatgccatgctgcacagcaacagcagaggaggagagggcctcttctacaagctgcccggccgcatcagcctcttcaccctgaagaaggatgccctgcagtggagccgccacccagccaccgtggagggggaggagcctgaggacacagcagatgtggagagctgtggcagcaatgaggccagcacagtgtctggagaaaatgatgtgtccctggatgagaccagcagcaatgccagctgcagcacagagagccagagccggcccctgagcaacccccgggacagctaccgggccagcagccaggccaacaagcagaagaagaagacaggagtgatgctgccccgggtggtgctgacccccctgaaggtgaatggagcccacgtggagagcgccagcggcttcagcggctgccacgcagatggagagagcggcagccccagcagcagcagcagcggcagcctggccctgggcagcgctgccatccggggccaggccgaggtgacccaggaccctgcccccctgctgcggggcttcaggaagccagccaccggccagatgaagaggaacagaggagaggagattgactttgagaccccaggcagcatcctggtgaacaccaacctgcgggccctgatcaacagcaggaccttccacgccctgcccagccacttccagcagcagctgctcttcctgctgcctgaggtggaccggcaggtgggcacagatggcctgctgcggctgagcagcagcgccctgaacaatgagttcttcacccatgctgcccagagctggagggagcggctggctgatggagagttcacccatgagatgcaggtgcgcatccggcaggagatggagaaggagaagaaggtggagcagtggaaggagaagttctttgaggactactacggccagaagctgggcctgaccaaggaggagagcctgcagcagaatgtgggccaggaggaggccgagatcaagagcggcctgtgtgtgcctggagagagcgtgcgcatccagaggggccctgccacccggcagagagatggccacttcaagaagaggagcaggccagacctgcggacccgggcccggaggaacctgtacaagaagcaggagagcgagcaggccggcgtggccaaggatgccaagtctgtggccagtgatgtgcccctgtacaaggatggagaggccaagacagatcctgctggcctgagcagcccccacctgcccggcaccagcagcgctgccccagacctggagggccctgagttccctgtggagagcgtggccagccgcatccaggccgagccagacaacctggcccgggccagcgccagcccagaccgcatccccagcctgccccaggagaccgtggaccaggagcccaaggaccagaagaggaagagctttgagcaggccgccagcgccagcttccctgagaagaagccccggctggaggaccggcagagcttcaggaacaccattgaatctgtgcacacagagaagccccagcccaccaaggaggagcccaaggtgccccccatccgcatccagctgagccgcatcaagccaccctgggtggtgaagggccagcccacctaccagatctgcccccgcatcatccccaccacagagagcagctgccggggctggacaggagcccggaccctggccgacatcaaggcccgggccctgcaggtgcggggggcccggggccaccactgccaccgggaggccgccaccacagccatcggcggcggcggcggccctgggggcggcggcggcggggccacagatgaaggaggcggccggggcagcagcagtggagatggaggagaggcctgtggccaccctgagccccggggcggccccagcaccccaggcaagtgcaccagtgacctgcagaggacccagctgctgcccccctaccccctgaatggagagcacacccaggccggcacagccatgagccgggcccggcgggaggacctgcccagcctgaggaaggaggagagctgcctgctgcagagggccaccgtgggcctgacagatggcctgggagatgccagccagctgcctgtggcccccactggagaccagccctgccaggccctgcccctgctgagcagccagacctctgtggccgagcggctggtggagcagccccagctgcacccagatgtgaggacagaatgtgagagcggcaccacctcctgggagagtgatgatgaggagcagggccccaccgtgcctgctgacaatggccccatcctgagcctggtgggagatgacaccctggagaagggcaccggccaggccctggacagccaccccaccatgaaggaccctgtgaatgtgacccccagcagcaccccagagagcagccccacagactgcctgcagaacagagcctttgatgatgagctgggcctgggcggcagctgcccccccatgagggagagtgacacccggcaggagaacctgaagaccaaggccctggtgagcaacagcagcctgcactggatccccatccccagcaatgatgaggtggtgaagcagcccaagccagagagccgggagcacatccccagcgtggagccccaggtgggggaggagtgggagaaggccgcccccaccccaccagccctgcccggggacctgacagctgaggagggcctggaccccctggacagcctgaccagcctgtggacagtgcccagcagaggaggcagtgacagcaatggcagctactgccagcaggtggacatcgagaagctgaagatcaatggagacagcgaggccctgagcccccacggggagagcacagacacagccagtgactttgagggccacctgacagaggacagcagcgaggccgacacccgggaggccgctgtgaccaagggcagctctgtggacaaggatgagaagcccaactggaaccagagcgcccccctgagcaaggtgaatggagacatgaggctggtgaccaggacagatggcatggtggccccccagagctgggtgtcccgggtgtgtgctgtgcggcagaagatcccagacagcctgctgctggccagcacagagtaccagcccagggctgtgtgcctgtccatgcctggcagctctgtggaggccaccaaccccctggtgatgcagctgctgcagggcagcctgcccctggagaaggtgctgcccccagcccatgatgacagcatgtctgagagcccccaggtgcccctgaccaaggaccagagccacggcagcctgaggatgggcagcctgcacggcctgggcaagaacagcggcatggtggatggcagcagccccagcagcctgcgggccctgaaggagcccctgctgcctgacagctgtgaaacaggaacaggcctggcccgcatcgaggccacccaggcccctggggccccccagaagaactgcaaggctgtgcccagctttgacagcctgcaccctgtgaccaaccccatcaccagcagcaggaagctggaggagatggacagcaaggagcagttcagcagcttcagctgtgaggaccagaaggaggtgcgggccatgagccaggacagcaacagcaatgctgcccctgggaagagccctggggacctgaccaccagcaggaccccccgcttcagcagccccaacgtcatcagctttggacctgagcagacaggccgggccctgggggaccagagcaatgtgacaggccagggcaagaagctgtttggcagcggaaatgtggccgccaccctgcagaggcccaggcctgctgaccccatgcccctgcctgctgagatcccccctgtgttccccagcggcaagctgggccccagcaccaacagcatgtctggaggagtgcagaccccccgggaggactgggcccccaagccccacgcctttgtgggctctgtgaagaatgagaagacctttgtgggcggccccctgaaggccaatgctgagaacaggaaggccaccggccacagccccctggagctggtgggccacctggagggcatgccctttgtgatggacctgcccttctggaagctgccccgggagcccgggaagggcctgtctgagcccctggagcccagcagcctgcccagccagctgagcatcaagcaggccttctacggcaagctgagcaagctgcagctgagcagcaccagcttcaactacagcagcagcagccccaccttccccaagggcctggccggctctgtggtgcagctgagccacaaggccaactttggagccagccacagcgccagcctgagcctgcagatgttcacagacagcagcacagtggagagcatcagcctgcagtgtgcctgcagcctgaaggccatgatcatgtgccagggctgtggggccttctgccatgatgactgcatcggccccagcaagctgtgtgtgctgtgcctggtggtgaggtag

SEQ ID NO: 321241 - DNA, 4611 bp, Artificial Sequence
  derived and/or modified sequence
atgggcgtggtgaacttcgtgttccgggccagcgaggacctgcaggtgctggaaaactactcggacgcccctatgacacctaaacaaatcctccaggtaatcgaggcagaaggactgaaggagatgagtggaacaagtccactcgcgtgcctgaatgcaatgctgcacagcaatagcaggggcggagaaggcctgttctacaagctgcctggtaggataagcttgtttacgctgaagaaagacgcacttcaatggtctagacaccccgccacggtggaaggcgaagagccggaagataccgcagatgtggaaagctgtggatctaatgaggcctcaaccgtctccggagagaacgacgttagcctcgacgagacctcctccaacgcatcatgttcaacagagagtcagtcacgccccctgtcgaatccgcgcgacagctacagagcctcgtctcaggccaataaacagaaaaaaaagacaggagttatgctgccccgggtagtgctgacccccttgaaagtcaacggggctcacgtggagtcagcatcaggcttctctgggtgccatgctgacggagagagtggctctccaagcagctctagcagcggatcccttgctctgggttctgctgccatcagggggcaagcagaagtgactcaggaccccgcaccactgctgagaggattcagaaagcctgctacaggacagatgaagcgaaaccggggcgaagaaatcgacttcgagaccccaggttcaatcctggtgaacacgaacctgagagcgctgataaatagtcgcacattccacgcactgccaagtcactttcagcagcagctgcttttcctgctgcccgaagtcgataggcaggttggcacagatgggttgctacggctgtcatccagcgcactcaataatgagtttttcacacacgcagctcagtcctggagagagcgactcgcagacggagaattcacccatgaaatgcaagtgagaatccggcaagagatggagaaagagaagaaggtggagcagtggaaggagaaattctttgaggattactacggacagaagcttgggttgaccaaggaggagtcccttcagcaaaatgtgggccaagaggaggctgaaataaagtctggcctgtgcgtccctggggagtccgttagaatccaacgcggcccggccacacgacagcgggacggtcactttaagaagaggtcaaggcctgacttacgtactcgtgcgcgccgtaatctatacaagaagcaggaatctgaacaggcgggagtggccaaagacgctaaatccgtagcctcggatgtacctctgtacaaggacggtgaggccaaaacagacccagccggattgtcctcccctcatttgccggggaccagcagtgctgcccccgatctggaagggcccgaattccctgtcgagtccgttgccagccgtatacaggctgagcccgacaatctagcacgggcatccgcgtctcctgatcgcatacccagcctgccccaggagaccgtagatcaggaaccaaaagaccaaaagaggaagtcatttgaacaggccgcatccgcatccttccctgaaaagaaacccaggcttgaggatagacagtccttccggaataccatagagagtgtacacaccgaaaagccgcagcctacaaaggaagaacccaaggtgccccccatcagaatccagttgtcacgtatcaagccaccttgggtggtgaagggtcagcctacctaccagatttgtccaaggatcatccctactaccgaatcttcttgcaggggctggaccggcgccaggactctcgctgacataaaggccagggccttgcaggttaggggcgccagagggcatcactgccaccgtgaggccgccacaacggcaatcgggggggggggaggaccagggggagggggcgggggcgccacagacgagggcggagggaggggcagcagctctggcgatgggggtgaggcctgtggacaccccgaaccacgaggcggcccgtctactcccggtaaatgtaccagtgacctgcagcggacacagctgctccctccctaccccctcaacggagaacacacccaggccggcaccgcaatgtcccgagcccgtagagaggatcttccttctttaagaaaggaagaatcctgtctactgcagagagctaccgtgggactcactgacggtctgggtgacgcaagtcaactcccagttgcaccgacgggagaccaaccctgtcaggctttaccattgttgtcctcacaaaccagtgtcgccgagagactggtggaacagccacagcttcatcccgacgtccgcaccgagtgcgaatctggtaccacgagctgggagtcagatgacgaggagcaggggccaacggttcctgcagacaatggacctatactgagcctcgtgggggatgacaccctcgagaaaggaaccgggcaggccctggactcacaccccaccatgaaggacccagtaaacgtcactccaagttctacccctgagtctagcccgacggactgtctgcagaacagagcattcgatgatgaactgggtttgggtggtagctgtccccccatgcgggagagtgatacacggcaggagaacctgaaaactaaagctcttgtcagcaatagctcgctgcattggataccaattccctccaatgatgaagtggtgaagcaaccaaagcccgaatccagagagcacattccttccgtggaaccacaggtaggcgaagagtgggaaaaagcagcgcccaccccaccagctcttccaggcgacttaacggctgaggaaggactggatccactcgattcattgacttccctgtggaccgtgccttcccgcggagggagcgattcgaacggatcgtactgccagcaggttgacatcgagaagttgaaaattaatggagactccgaggcactgagccctcacggtgagagcacggatactgcatctgattttgagggccatctgacggaggattcatctgaggctgataccagggaggccgcagtaaccaagggctcatcggtcgataaagacgagaagccaaactggaatcaatccgctccgttgtccaaagtgaatggcgatatgagactagtgaccaggacagatgggatggtggccccccagtcctgggtgtcaagagtgtgtgctgtgcgccagaagattcccgactcactgttattggccagtacggaataccagccaagagcagtgtgtctcagcatgcctggatcctccgtggaggccaccaacccactcgttatgcagttgctgcaggggagtcttcctttggaaaaagtgctgcctccagcccatgatgactccatgtccgaatctcctcaggtgcccctgactaaggaccagagtcacggatctcttagaatgggatctctacacgggttgggaaaaaattcagggatggttgacggctcatctccatcctcactgcgagcccttaaggaaccccttctgcctgacagttgtgagaccgggaccggattggctcgcatcgaagccactcaggcccctggcgccccccaaaaaaattgcaaagcagtaccttccttcgattctctgcacccagtgaccaatcctattacatcctctaggaaactggaagagatggattccaaagagcagttttcctccttcagctgtgaagatcaaaaggaggtcagagcaatgagtcaagactccaactccaatgcggctccagggaagtcacccggggacttgaccaccagccgcacacccagattttcctctccaaacgtgatttccttcggaccagagcagaccgggagagcattaggggaccagagcaacgtgacagggcaaggcaagaagctgtttggcagtgggaatgttgctgccaccctgcaaaggccaaggcccgctgaccccatgccactgccggcggagatccctcccgtattccccagcggaaaactcggaccaagcacgaactcaatgtcaggaggtgtgcagaccccaagagaagattgggcgcctaagccccatgctttcgtgggctctgtgaagaacgagaaaacctttgtgggtgggcctcttaaagccaatgccgagaatagaaaggcaaccggacattcgcccttggaattggtcggccacctggaggggatgcccttcgtgatggatttgcccttctggaagctcccgagggagccaggaaagggactgagtgaacctctcgagccctccagtctgccttctcagttatccattaaacaggccttctatgggaaactgtccaagttacaactgagctctacaagcttcaattatagcagctcatcacccacattcccaaaaggtctcgcaggatccgtggttcagctgagccataaggcaaacttcggcgcctcccattccgcaagtctcagcttgcaaatgttcacggactccagtactgttgaatccatttctttgcagtgcgcctgctcgctgaaggctatgattatgtgccaggggtgcggtgctttttgccacgatgattgcatcgggccctctaaattatgtgtgctgtgcctggttgtccgttag

SEQ ID NO: 321242 - DNA, 4611 bp, Artificial Sequence
  derived and/or modified sequence
atgggtgtggtgaacttcgtgtttcgagcctccgaggacttgcaggtactcgagaactacagtgatgcgccaatgaccccaaagcagattctccaggtcatcgaagccgaaggtctcaaagagatgtccggaacctctcccctcgcctgcctgaacgctatgctccacagcaactcgaggggcggagaaggcctgttctacaagctgccgggacgtatttccctgtttacgctaaagaaagatgcactacaatggtcccggcaccctgcaactgtggagggcgaggagcctgaggataccgctgatgtcgagagctgtggatccaacgaagctagtaccgtaagtggcgagaacgacgtgtccctagatgagacttcctccaacgccagttgcagtacagagagtcaatctagacctttgtctaacccccgtgatagttaccgcgcaagcagtcaggctaacaagcagaagaagaagaccggtgtgatgttgcctcgtgtggtgcttactcccctgaaggtgaacggcgcacatgtggaatcagcctcggggttttcgggctgccatgccgatggagagtcaggatcacctagcagctcaagctccgggagtcttgcactggggagcgcagccatcagagggcaggcagaagtaacgcaggatccggctcctctgctgcgtggatttcgcaaacccgcaacaggccagatgaagcggaatcgtggcgaagagattgatttcgaaacacctggctccatcctggtgaacaccaatttgcgtgctctcattaattctaggacctttcacgctttgccctcgcactttcagcagcagctgctgtttctgctgcccgaggtagaccggcaggtggggacggacgggttgctgaggcttagctcaagtgctttgaataacgagttctttacacacgctgcacaatcctggagggaacgcctcgccgacggtgaatttacacatgagatgcaagttagaattaggcaagaaatggagaaggagaagaaggtagaacagtggaaagaaaagttctttgaggactactatggccagaaactgggactgacaaaggaggaatccctgcagcagaacgttggacaggaagaggcggaaattaaaagcgggttgtgtgtgcccggagagtccgtgcgcattcagcgtggccctgcaacacgccaacgcgacggacatttcaaaaagagatctagaccggatcttagaacccgggctagaaggaatctctataagaaacaggagtctgaacaagcgggagttgctaaggatgccaagtccgtggcatctgacgtcccgctatataaagacggcgaggccaaaactgatcctgcaggcctcagctcccctcacctaccgggtacatcctcggccgctccagacttggagggcccagaatttccagtagagtccgtcgcctctcgaattcaggctgagcctgacaacctcgccagagcttctgccagtcccgatcgaattccctcattaccccaggaaacagtcgatcaggagcccaaggaccagaagagaaaaagttttgaacaagcggcatcagcgtcttttcccgagaaaaagccacgtctggaagaccggcaatccttccgcaataccattgagtcagtacacaccgagaagccgcagcctaccaaagaggagccaaaggtgccacccatccgtattcagcttagccgcataaaacctccctgggtagtaaaaggacagccaacctaccaaatatgcccgcgaatcattccaactacagagtcctcctgtcgtggatggacgggagccaggactttagcggacatcaaggcaagggccctacaggtgagaggcgcacgcggacaccattgtcacagagaggccgcaacaacggctattggcggtggtggagggccaggcggaggtgggggaggggcaacagacgagggaggcggaagaggttcgagcagcggggacgggggagaggcttgcgggcacccggaacccagaggcggtccaagcacccctgggaaatgcactagcgaccttcagcgcacacagctcttgcccccttaccctcttaacggggagcatacccaggccggaaccgctatgagccgagctaggcgcgaagatctaccatcactgcggaaagaggagtcgtgtctgttacagcgagccaccgtcggtctcactgatggcctgggagacgcctcccaactgccagtcgcgcctactggggaccagccctgccaggccttgccactgctatcctctcaaactagtgtggcagagcggctcgtggagcagccacagctacacccagacgtgcggacagagtgcgaaagtgggacaacatcttgggaatcggatgacgaagagcagggcccaacagtgcctgccgacaatgggccaatcctgagcctggttggagatgacacacttgaaaaagggacgggtcaagctctcgatagtcatcccactatgaaggatcctgtcaacgtgactccatcctcgacccccgagtcatccccaacagattgtctccagaacagggcctttgacgacgagttggggctcggcggaagctgcccacccatgcgcgagtcagacacgcggcaggagaatctgaagacaaaggccctggtgtccaactccagcctgcattggatcccaatccctagcaatgacgaggtggtgaagcagcctaagcccgagtctcgagaacacatcccctcagtcgaaccacaggtgggggaggagtgggagaaagcggctccaactccccctgccttgcccggagatctgactgccgaagagggccttgacccgttggatagcttgacctccctgtggacagtgcctagccgcggtggctccgactccaacggctcatattgccagcaggttgatatcgaaaaactcaaaatcaatggtgattctgaggccctctctcctcatggcgagtcgaccgacaccgcctcagactttgaagggcacctgaccgaggactcctcagaggcagatactcgcgaggctgccgtaacaaagggatctagcgtcgataaggatgagaagcctaactggaaccaatccgcaccattgagtaaggttaacggcgatatgagactcgttacacgcacagatggtatggtcgccccacaatcttgggtgtccagggtttgtgccgtgaggcagaaaattcctgattccttgttactggcctcgactgagtatcagcccagagctgtgtgcctctcaatgccaggatcatccgtggaagctacaaacccattagtgatgcagttgctgcagggaagccttcccctcgagaaggtcctaccaccggcacacgatgacagcatgagtgaatctccgcaggtccccttaacgaaagatcaaagtcacggttccctgcggatgggctcgctccacggactggggaagaattctggcatggtagatggatccagcccatcttcactgcgcgctctgaaggagcccctactacccgattcttgtgaaacgggcactgggctggctcggatagaggctacacaggccccaggagctcctcagaaaaattgcaaggcagtacccagcttcgattctttacaccctgttaccaatcccatcacctcttcgcggaagctggaagaaatggattcaaaggaacaattttctagtttctcttgtgaagaccagaaagaagtgagagccatgtctcaggactcaaactccaatgctgcccctggaaagagcccgggagacttgaccacatccaggactcctcgctttagttccccaaatgttatctcctttggacccgaacagacaggacgcgctctgggggatcagagcaatgtcaccggccaggggaaaaagctatttggctcgggtaacgtcgctgcaaccctccagaggccacgaccagcggacccaatgcctctgcctgccgagattcctccagtcttccccagcggcaaactggggcctagcaccaattctatgtcgggaggcgtgcaaacccccagggaagattgggcgcctaagcctcatgctttcgtgggcagtgtcaagaatgagaaaacattcgttggtggccctctcaaggctaatgcagagaaccgcaaggctacagggcattctccactggaactcgtgggtcatctggaaggtatgccattcgtaatggatttgcccttttggaagcttcccagagaaccaggcaaggggttgtcagagccccttgagccttcaagcctcccttcgcagttatctattaagcaggccttctacggcaagctgtcaaagctgcagctctccagtacatctttcaactacagctcctcttccccgacattccccaaggggttagccggatctgttgtgcaattatcccacaaggcaaactttggcgcttcccacagcgcctccctttctttacagatgtttacggattcctctactgttgaaagcatctctctgcagtgcgcatgctcattaaaagcaatgatcatgtgccaggggtgcggcgcattttgtcacgatgactgtatcggcccatctaagttgtgcgtcctgtgtctggtggtgagatag

SEQ ID NO: 321243 - DNA, 4611 bp, Artificial Sequence
  derived and/or modified sequence
atgggcgtggtgaacttcgtgttcagagccagcgaggacctgcaggtgctggagaactacagcgacgcccccatgacccccaagcagatcctgcaggtgatcgaggccgagggcctgaaggagatgagcggcaccagccccctggcctgcctgaacgccatgctgcacagcaacagcagaggcggcgagggcctgttctacaagctgcccggcagaatcagcctgttcaccctgaagaaggacgccctgcagtggagcagacaccccgccaccgtggagggcgaggagcccgaggacaccgccgacgtggagagctgcggcagcaacgaggccagcaccgtgagcggcgagaacgacgtgagcctggacgagaccagcagcaacgccagctgcagcaccgagagccagagcagacccctgagcaaccccagagacagctacagagccagcagccaggccaacaagcagaagaagaagaccggcgtgatgctgcccagagtggtgctgacccccctgaaggtgaacggcgcccacgtggagagcgccagcggcttcagcggctgccacgccgacggcgagagcggcagccccagcagcagcagcagcggcagcctggccctgggcagcgccgccatcagaggccaggccgaggtgacccaggaccccgcccccctgctgagaggcttcagaaagcccgccaccggccagatgaagagaaacagaggcgaggagatcgacttcgagacccccggcagcatcctggtgaacaccaacctgagagccctgatcaacagcagaaccttccacgccctgcccagccacttccagcagcagctgctgttcctgctgcccgaggtggacagacaggtgggcaccgacggcctgctgagactgagcagcagcgccctgaacaacgagttcttcacccacgccgcccagagctggagagagagactggccgacggcgagttcacccacgagatgcaggtgagaatcagacaggagatggagaaggagaagaaggtggagcagtggaaggagaagttcttcgaggactactacggccagaagctgggcctgaccaaggaggagagcctgcagcagaacgtgggccaggaggaggccgagatcaagagcggcctgtgcgtgcccggcgagagcgtgagaatccagagaggccccgccaccagacagagagacggccacttcaagaagagaagcagacccgacctgagaaccagagccagaagaaacctgtacaagaagcaggagagcgagcaggccggcgtggccaaggacgccaagagcgtggccagcgacgtgcccctgtacaaggacggcgaggccaagaccgaccccgccggcctgagcagcccccacctgcccggcaccagcagcgccgcccccgacctggagggccccgagttccccgtggagagcgtggccagcagaatccaggccgagcccgacaacctggccagagccagcgccagccccgacagaatccccagcctgccccaggagaccgtggaccaggagcccaaggaccagaagagaaagagcttcgagcaggccgccagcgccagcttccccgagaagaagcccagactggaggacagacagagcttcagaaacaccatcgagagcgtgcacaccgagaagccccagcccaccaaggaggagcccaaggtgccccccatcagaatccagctgagcagaatcaagcccccctgggtggtgaagggccagcccacctaccagatctgccccagaatcatccccaccaccgagagcagctgcagaggctggaccggcgccagaaccctggccgacatcaaggccagagccctgcaggtgagaggcgccagaggccaccactgccacagagaggccgccaccaccgccatcggcggcggcggcggccccggcggcggcggcggcggcgccaccgacgagggcggcggcagaggcagcagcagcggcgacggcggcgaggcctgcggccaccccgagcccagaggcggccccagcacccccggcaagtgcaccagcgacctgcagagaacccagctgctgcccccctaccccctgaacggcgagcacacccaggccggcaccgccatgagcagagccagaagagaggacctgcccagcctgagaaaggaggagagctgcctgctgcagagagccaccgtgggcctgaccgacggcctgggcgacgccagccagctgcccgtggcccccaccggcgaccagccctgccaggccctgcccctgctgagcagccagaccagcgtggccgagagactggtggagcagccccagctgcaccccgacgtgagaaccgagtgcgagagcggcaccaccagctgggagagcgacgacgaggagcagggccccaccgtgcccgccgacaacggccccatcctgagcctggtgggcgacgacaccctggagaagggcaccggccaggccctggacagccaccccaccatgaaggaccccgtgaacgtgacccccagcagcacccccgagagcagccccaccgactgcctgcagaacagagccttcgacgacgagctgggcctgggcggcagctgcccccccatgagagagagcgacaccagacaggagaacctgaagaccaaggccctggtgagcaacagcagcctgcactggatccccatccccagcaacgacgaggtggtgaagcagcccaagcccgagagcagagagcacatccccagcgtggagccccaggtgggcgaggagtgggagaaggccgcccccaccccccccgccctgcccggcgacctgaccgccgaggagggcctggaccccctggacagcctgaccagcctgtggaccgtgcccagcagaggcggcagcgacagcaacggcagctactgccagcaggtggacatcgagaagctgaagatcaacggcgacagcgaggccctgagcccccacggcgagagcaccgacaccgccagcgacttcgagggccacctgaccgaggacagcagcgaggccgacaccagagaggccgccgtgaccaagggcagcagcgtggacaaggacgagaagcccaactggaaccagagcgcccccctgagcaaggtgaacggcgacatgagactggtgaccagaaccgacggcatggtggccccccagagctgggtgagcagagtgtgcgccgtgagacagaagatccccgacagcctgctgctggccagcaccgagtaccagcccagagccgtgtgcctgagcatgcccggcagcagcgtggaggccaccaaccccctggtgatgcagctgctgcagggcagcctgcccctggagaaggtgctgccccccgcccacgacgacagcatgagcgagagcccccaggtgcccctgaccaaggaccagagccacggcagcctgagaatgggcagcctgcacggcctgggcaagaacagcggcatggtggacggcagcagccccagcagcctgagagccctgaaggagcccctgctgcccgacagctgcgagaccggcaccggcctggccagaatcgaggccacccaggcccccggcgccccccagaagaactgcaaggccgtgcccagcttcgacagcctgcaccccgtgaccaaccccatcaccagcagcagaaagctggaggagatggacagcaaggagcagttcagcagcttcagctgcgaggaccagaaggaggtgagagccatgagccaggacagcaacagcaacgccgcccccggcaagagccccggcgacctgaccaccagcagaacccccagattcagcagccccaacgtgatcagcttcggccccgagcagaccggcagagccctgggcgaccagagcaacgtgaccggccagggcaagaagctgttcggcagcggcaacgtggccgccaccctgcagagacccagacccgccgaccccatgcccctgcccgccgagatcccccccgtgttccccagcggcaagctgggccccagcaccaacagcatgagcggcggcgtgcagacccccagagaggactgggcccccaagccccacgccttcgtgggcagcgtgaagaacgagaagaccttcgtgggcggccccctgaaggccaacgccgagaacagaaaggccaccggccacagccccctggagctggtgggccacctggagggcatgcccttcgtgatggacctgcccttctggaagctgcccagagagcccggcaagggcctgagcgagcccctggagcccagcagcctgcccagccagctgagcatcaagcaggccttctacggcaagctgagcaagctgcagctgagcagcaccagcttcaactacagcagcagcagccccaccttccccaagggcctggccggcagcgtggtgcagctgagccacaaggccaacttcggcgccagccacagcgccagcctgagcctgcagatgttcaccgacagcagcaccgtggagagcatcagcctgcagtgcgcctgcagcctgaaggccatgatcatgtgccagggctgcggcgccttctgccacgacgactgcatcggccccagcaagctgtgcgtgctgtgcctggtggtgagatag

SEQ ID NO: 321244 - DNA, 4632 bp, Artificial Sequence
  derived and/or modified sequence
aaattccggcggaggggcgagctggcaggccggctcctcccactctgggcagcggggtcccgcgtcccctcccccactatttggcagcgtctgggggtctggggcagcttcgttcattcacccgggggagttgggtttccgggaagggtcggaagctcctccctcgcttcctggtgggtaatggggtggtgcctttgactccgggggtggaaaagcgaccccacattcaaggacgccaatggcatgttgagctttcccaatctaaaccaggtattagaaaactactcggatgctccaatgacaccaaaacagattctgcaggtcatagaggcagaaggactaaaggaaatgagcagtgggacttcccctctcgcatgcctcaatgctatgctacattccaattcaagaggaggagaggggttgttttataaactgcctggccgaatcagccttttcacgctcaagaaggatgccctgcagtggtctcgccatccagctacagtggagggagaggagccagaggacacggctgatgtggagagctgtgggtctaatgaagccagcactgtgagtggtgaaaacgatgtatctcttgatgaaacatcttcgaacgcatcctgttctacagaatctcagagtcgacctctttccaatcccagggacagctacagagcttcctcacaggcgaacaaacaaaagaaaaagactggggtgatgctgcctcgagttgtcctgactcctctgaaggtaaacggggcccacgtggaatctgcatcaggtcaaatgaagcgcaacagaggggaagaaatagattttgagacacctgggtccattcttgtcaacaccaacctccgtgccctgatcaactctcggaccttccatgccttaccatcacacttccagcagcagctcctcttcctcctgcctgaagtagacagacaggtggggacggatggcctgttgcgtctcagcagcagtgcactaaataacgagttttttacccatgcggctcagagctggcgggagcgcctggctgatggtgaatttactcatgagatgcaagtcaggatacgacaggaaatggagaaggaaaagaaggtggaacaatggaaagaaaagttctttgaagactactatggacagaagctgggtttgaccaaagaagagtcattgcagcagaacgtgggccaggaggaggctgaaatcaaaagtggcttgtgtgtcccaggagaatcagtgcgtatacagcgtggtccagccacccgacagcgagatgggcattttaagaaacgctctcggccagatctccgaaccagagccagaaggaatctgtacaaaaaacaggagtcagaacaagcaggggttgctaaggatgcaaaatctgtggcctcagatgttcccctctacaaggatggggaggctaagactgacccagcagggctgagcagtccccatctgccaggcacatcctctgcagcacccgacctggagggtcccgaattcccagttgagtctgtggcttctcggatccaggctgagccagacaacttggcacgtgcctctgcatctccagacagaattcctagcctgcctcaggaaactgtggatcaggaacccaaggatcagaagaggaaatcctttgagcaggcggcctctgcatcctttcccgaaaagaagccccggcttgaagatcgtcagtcctttcgtaacacaattgaaagtgttcacaccgaaaagccacagcccactaaagaggagcccaaagtcccgcccatccggattcaactttcacgtatcaaaccaccctgggtggttaaaggtcagcccacttaccagatatgcccccggatcatccccaccacggagtcctcctgccggggttggactggcgccaggaccctcgcagacattaaagcccgtgctctgcaggtccgaggggcgagaggtcaccactgccatagagaggccaccgatgagggaggtggcagaggcagcagcagtggtgatggtggtgaggcctgtggccaccctgagcccaggggaggcccgagcacccctggaaagtgtacgtcagatctacagcgaacacaactactgccgccttatcctctaaatggggagcatacccaggccggaactgccatgtccagagctaggagagaggacctgccttctctgagaaaggaggaaagctgcctactacagagggctacagttggactcacagatgggctaggagatgcctcccaactccccgttgctcccactggggaccagccatgccaggccttgcccctactgtcctcccaaacctcagtagctgagagattagtggagcagcctcagttgcatccggatgttagaactgaatgtgagtctggcaccacttcctgggaaagtgatgatgaggagcaaggacccaccgttcctgcagacaatggtcccattctgtctctagtgggagatgatacattagagaaaggaactggccaagctcttgacagtcatcccactatgaaggatcctgtaaatgtgacccccagttccacacctgaatcctcaccgactgattgcctgcagaacagagcatttgatgacgaattagggcttggtggctcatgccctcctatgagggaaagtgatactagacaagaaaacttgaaaaccaaggctctcgtttctaacagttctttgcattggatacccatcccatcgaatgatgaggtagtgaaacagcccaaaccagaatccagagaacacataccatctgttgagccccaggttggagaggagtgggagaaagctgctcccacccctcctgcattgcctggggatttgacagctgaggagggtctagatcctcttgacagccttacttcactctggactgtgccatctcgaggaggcagtgacagcaatggcagttactgtcaacaggtggacattgaaaagctgaaaatcaacggagactctgaagcactgagtcctcacggtgagtccacggatacagcctctgactttgaaggtcacctcacggaggacagcagtgaggctgacactagagaagctgcagtgacaaagggatcttcggtggacaaggatgagaaacccaattggaaccaatctgccccactgtccaaggtgaatggtgacatgcgtctggttacaaggacagatgggatggttgctcctcagagctgggtgtctcgagtatgtgcggtccgccaaaagatcccagattccctactgctggccagtactgagtaccagccaagagccgtgtgcctgtccatgcctgggtcctcagtggaggccactaacccacttgtgatgcagttgctgcagggtagcttgcccctagagaaggttcttccaccagcccacgatgacagcatgtcagaatccccacaagtaccacttacaaaagaccagagccatggctcgctacgcatgggatctttacatggtcttggaaaaaacagtggcatggttgatggaagcagccccagttctttaagggctttgaaggagcctcttctgccagatagctgtgaaacaggcactggtcttgccaggattgaggccacccaggctcctggagcaccccaaaagaattgcaaggcagtcccaagttttgactccctccatccagtgacaaatcccattacatcctctaggaaactggaagaaatggattccaaagagcagttctcttcctttagttgtgaagatcagaaggaagtccgtgctatgtcacaggacagtaattcaaatgctgctccaggaaagagcccaggagatcttactacctcgagaacacctcgtttctcatctccaaatgtgatctcctttggtccagagcagacaggtcgggccctgggtgatcagagcaatgttacaggccaagggaagaagctttttggctctgggaatgtggctgcaacccttcagcgccccaggcctgcggacccgatgcctcttcctgctgagatccctccagtttttcccagtgggaagttgggaccaagcacaaactccatgtctggtggggtacagactccaagggaagactgggctccaaagccacatgcctttgttggcagcgtcaagaatgagaagacttttgtggggggtcctcttaaggcaaatgccgagaacaggaaagctactgggcatagtcccctggaactggtgggtcacttggaagggatgccctttgtcatggacttgcccttctggaaattaccccgagagccagggaaggggctcagtgagcctctggagccttcttctctcccctcccaactcagcatcaagcaggcattttatgggaagctttctaaactccaactgagttccaccagctttaattattcctctagctctcccacctttcccaaaggccttgctggaagtgtggtgcagctgagccacaaagcaaactttggtgcgagccacagtgcatcactttccttgcaaatgttcactgacagcagcacggtggaaagcatctcgctccagtgtgcgtgcagcctgaaagccatgatcatgtgccaaggctgcggtgcgttctgtcacgatgactgtattggaccctcaaagctctgtgtattgtgccttgtggtgagataa

SEQ ID NO: 321245 - DNA, 2313 bp, Artificial Sequence
  derived and/or modified sequence
atgaagggagacacccggcatctgaacggggaagaggacgctgggggtcgcgaggattcgatactggtgaacggggcgtgctcagaccagtctagtgattctcccccaattcttgaagccataaggacgcctgagatccgaggaagacgaagcagcagtcggctttctaagagggaagtgagttccctcctgagctatacacaggatctcactggagacggcgacggtgaggatggggacggttccgacacccccgtaatgccaaagctttttagggaaacccggactcgcagtgaatcccccgccgtgcgaacacgcaacaacaactcagtctcttctcgtgaaagacataggccatcacccaggtctacaaggggaagacaggggcggaatcacgtggacgaatccccagttgaattccctgctactaggtcactcaggcgcagagctacagcttccgctggtaccccatggccttctcctccatcaagctatctcacaatcgatctcacagatgacaccgaagatacacatggcacccctcaaagctcttctacaccttatgcccgccttgcacaggatagccagcaggggggcatggagtccccgcaagtcgaagccgattcaggagatggagactcatcagaatatcaggatggaaaggaatttggtattggcgaccttgtatggggtaaaatcaaagggttctcttggtggccagctatggtggtgtcatggaaagccacctccaaaaggcaggccatgtcaggaatgagatgggtccaatggtttggcgatggaaagttctccgaagtatcagccgacaagttagtggctcttggcctgttctcccagcatttcaatctcgctacattcaataagttagtatcttatcggaaggccatgtatcacgctcttgagaaagctcgcgtacgcgccggcaaaaccttcccctctagcccgggggattctttagaggatcagctgaaacctatgcttgaatgggcacatggaggttttaaacctaccggtatcgagggcctgaaacctaataatactcagcccgaaaataaaacccgaagacgaaccgctgacgatagcgcaacgtctgactactgtccagctcctaagaggctgaagaccaactgttataataatggcaaagaccgaggcgatgaggatcagtcacgtgagcagatggcatccgacgtggccaataataaatcttctctggaggatggatgtctgtcctgcggacgaaaaaatccagtgagtttccatcccctgtttgagggagggctgtgtcaaacctgccgggaccgcttcctagaattgttctatatgtacgatgatgatggctatcagtcatactgcaccgtgtgctgtgaaggtagagagttactgctttgtagcaacacttcctgctgccgctgcttttgcgtagaatgtcttgaagtgttagtcggaaccggaacagccgccgaggctaaattacaggaaccatggtcttgctatatgtgtctccctcagagatgtcacggcgtattacggagacgcaaagattggaatgtcaggctccaagctttcttcacctctgatactgggctcgaatatgaggctccaaagctctacccagctattccagcggctagacgacgcccaatcagggtgctgtccctttttgatgggattgccactggatacctcgttttgaaagagctcggtattaaggtcgggaagtatgttgcatccgaagtgtgtgaggaatcaatcgccgtgggtaccgtcaaacacgaggggaacattaaatacgtcaacgacgtacggaacatcacaaagaagaacatagaggagtgggggccctttgacctggtcatcggagggtccccctgcaacgacctgtccaacgtcaaccctgcacgcaaaggcctgtacgaaggaaccggcaggcttttctttgaattctatcatctgctgaactattccagacccaaagagggcgacgatcgcccctttttctggatgttcgaaaatgttgtggccatgaaggtgggcgacaaacgagatatctcacgttttctggaatgtaatccggtgatgatcgatgctattaaggtttctgctgcccaccgcgcccgctatttctggggcaatctgccaggaatgaacagaatcttcggctttcccgttcactataccgacgtaagcaacatggggaggggcgcgagacagaagttgctaggccgttcctggtctgtgcctgtcatcaggcacttgtttgctcccctgaaggattacttcgcatgcgagtag

SEQ ID NO: 321246 - DNA, 1701 bp, Artificial Sequence
  derived and/or modified sequence
ggtcgatcaccccgggggaggagtgaacgcccacccaccgatggcacagggtccctggcggtcggtagggctggtggcaatgccgccagaccggctgcattaggcctgtctggcccttctaaaccttcaagtgcaataggcgccggcgacagccgcgctcagcgcccggcacgcccccccgccggcttgccccccgcatcaccagatccaaggctccggcggccagcggcacctcagccggcccttcggcaagagtctatgaagggggatacacgccatttgaacggtgaagaggacgccgggggtagagaagactcaatactggtaaatggagcatgttcagaccagagctctgacagtccccccatccttgaggccattaggacacccgagattcgaggaaggcggagttcctctagattgtcaaaacgagaggtgagctccctcctttcttacactcaggacctcacgggcgacggagatggcgaggacggagacggctccgacacacctgttatgcctaagctgttcagggagactaggacacgaagtgagagcccagcagtgcgtacaagaaacaacaatagtgtatccagccgtgagagacatcgtccctcccccagatccactcgtggccggcagggacggaaccacgttgatgagtccccggtcgaattccccgcgacaagaagtctacgaagaagagccacagcctccgccggcacaccatggcccagcccccctagctcctatcttacaatcgatcttactgacgacaccgaggatacccacgggactccgcagtcctcctcaactccctatgcccggctcgcccaggacagccagcaaggcggcatggagtcccctcaagtggaggccgactccggtgatggagattcctctgagtatcaggacggaaaggaatttggcatcggagatctggtgtggggaaaaatcaaaggcttcagttggtggcccgccatggtggtatcctggaaagccactagcaagagacaagctatgtctggaatgcgctgggtgcaatggttcggcgatgggaagtttagcgaggtctcagccgacaaactggttgccctcggtctgtttagccagcattttaacctcgctacatttaacaagttggtgtcttaccgtaaagcgatgtaccacgctctggagaaggcgcgtgtgcgcgccggcaaaactttccctagcagccctggcgattccttagaggatcagctgaagcccatgctggaatgggcccatgggggatttaagccaactgggatcgaggggctcaagcccaataacacccagcctgaaaataagacgaggcgcagaacagccgatgactccgctaccagcgactactgccccgcccctaagagactcaagactaattgttataacaacggtaaggaccggggggatgaggaccaaagcagggaacagatggccagtgacgtggcgaataacaaaagtagcctggaagatggatgtttgtcttgtggccgcaagaaccctgtttcatttcacccgttgtttgaggggggactctgccaaacttgcagacatctgtgtggggactcagtgaagcccactcacccctcttgtctcgcactttgtctgtggggaagaatgggcgattcatgtcaccggggccagtggcatgccggtcactctcagcttagtttctag

SEQ ID NO: 321247 - DNA, 2313 bp, Artificial Sequence
  derived and/or modified sequence
atgaagggggacaccaggcacctgaatggagaggaggatgctgggggccgggaggacagcatcctggtgaatggagcctgcagcgaccagagcagtgacagcccccccatcctggaggccatccgcaccccagagatccggggcagaagaagcagcagccggctgagcaagcgggaggtgagcagcctgctgagctacacccaggacctgactggagatggagatggagaagatggagatggcagtgacacccctgtgatgcccaagctgttccgggagaccaggaccaggtctgagagccctgctgtgaggaccaggaacaacaacagcgtgagcagccgggagcggcaccggcccagccccaggagcacccggggccggcagggcaggaaccacgtggatgagagccctgtggagttccctgccaccaggagcctgcggcggcgggccacagccagcgctggcaccccctggcccagcccccccagcagctacctgaccatcgacctgacagatgacacagaggacacccacggcaccccccagagcagcagcaccccctatgcccggctggcccaggacagccagcagggcggcatggagagcccccaggtggaggccgacagcggagatggagacagcagcgagtaccaggacggcaaggagtttggaattggagacctggtgtggggcaagatcaagggcttctcctggtggccagccatggtggtgtcctggaaggccaccagcaagaggcaggccatgagcggcatgcgctgggtgcagtggtttggagatggcaagttcagcgaggtgtctgctgacaagctggtggccctgggcctcttcagccagcacttcaacctggccaccttcaacaagctggtgtcctacaggaaggccatgtaccacgccctggagaaggcccgggtgcgggccggcaagaccttccccagcagccctggggacagcctggaggaccagctgaagcccatgctggagtgggcccatggaggcttcaagcccactggaattgagggcctgaagcccaacaacacccagcctgagaacaagaccaggagaagaacagcagatgattctgccaccagtgactactgcccagcccccaagaggctgaagaccaactgctacaacaacgggaaggacagaggagatgaggaccagagccgggagcagatggccagtgatgtggccaacaacaagagcagcctggaggatggctgcctgagctgtggcaggaagaaccctgtgtccttccaccccctgtttgagggcggcctgtgccagacctgccgggaccgcttcctggagctgttctacatgtatgatgatgatggctaccagagctactgcaccgtgtgctgtgagggccgggagctgctgctgtgcagcaacaccagctgctgccgctgcttctgtgtggagtgcctggaggtgctggtgggcaccggcacagctgctgaggccaagctgcaggagccctggagctgctacatgtgcctgccccagcgctgccacggcgtgctgcggcggaggaaggactggaatgtgcggctgcaggccttcttcaccagtgacaccggcctggagtatgaggcccccaagctgtacccagccatcccagctgcccggcggcggcccatccgggtgctgagcctgtttgatggcatcgccaccggctacctggtgctgaaggagctgggcatcaaggtgggcaagtatgtggccagcgaggtgtgtgaggagagcattgctgtgggcaccgtgaagcatgagggcaacatcaagtatgtgaatgatgtgaggaacatcaccaagaagaacatcgaggagtggggcccctttgacctggtgattggaggcagcccctgcaatgacctgagcaatgtgaacccagccaggaagggcctgtatgagggcaccggccgcctcttctttgagttctaccacctgctgaactacagccggcccaaggagggagatgaccggcccttcttctggatgtttgaaaatgtggtggccatgaaggtgggggacaagagggacatcagccgcttcctggagtgcaaccctgtgatgattgatgccatcaaggtgtctgctgcccaccgggcccgctacttctggggcaacctgcccggcatgaaccgcatcttcggcttccctgtgcactacacagatgtgagcaacatgggccgcggggcccggcagaagctgctgggccgctcctggagcgtgcctgtgatccgccacctgtttgcccccctgaaggactactttgcctgtgagtag

SEQ ID NO: 321248 - DNA, 1701 bp, Artificial Sequence
  derived and/or modified sequence
ggccgcagcccccggggccgctctgagaggcctcccacagatggcaccggcagcctggccgtgggccgggccggcggcaatgctgcccggcctgctgccctgggcctgagcggccccagcaagcccagcagcgccatcggggccggggacagccgggcccagaggcctgcccggcccccagctggcctgcccccagccagcccagacccccggctgcggcggcctgctgccccccagcctgccctgcggcaggagagcatgaagggggacaccaggcacctgaatggagaggaggatgctgggggccgggaggacagcatcctggtgaatggagcctgcagcgaccagagcagtgacagcccccccatcctggaggccatccgcaccccagagatccggggcagaagaagcagcagccggctgagcaagcgggaggtgagcagcctgctgagctacacccaggacctgactggagatggagatggagaagatggagatggcagtgacacccctgtgatgcccaagctgttccgggagaccaggaccaggtctgagagccctgctgtgaggaccaggaacaacaacagcgtgagcagccgggagcggcaccggcccagccccaggagcacccggggccggcagggcaggaaccacgtggatgagagccctgtggagttccctgccaccaggagcctgcggcggcgggccacagccagcgctggcaccccctggcccagcccccccagcagctacctgaccatcgacctgacagatgacacagaggacacccacggcaccccccagagcagcagcaccccctatgcccggctggcccaggacagccagcagggcggcatggagagcccccaggtggaggccgacagcggagatggagacagcagcgagtaccaggacggcaaggagtttggaattggagacctggtgtggggcaagatcaagggcttctcctggtggccagccatggtggtgtcctggaaggccaccagcaagaggcaggccatgagcggcatgcgctgggtgcagtggtttggagatggcaagttcagcgaggtgtctgctgacaagctggtggccctgggcctcttcagccagcacttcaacctggccaccttcaacaagctggtgtcctacaggaaggccatgtaccacgccctggagaaggcccgggtgcgggccggcaagaccttccccagcagccctggggacagcctggaggaccagctgaagcccatgctggagtgggcccatggaggcttcaagcccactggaattgagggcctgaagcccaacaacacccagcctgagaacaagaccaggagaagaacagcagatgattctgccaccagtgactactgcccagcccccaagaggctgaagaccaactgctacaacaacgggaaggacagaggagatgaggaccagagccgggagcagatggccagtgatgtggccaacaacaagagcagcctggaggatggctgcctgagctgtggcaggaagaaccctgtgtccttccaccccctgtttgagggcggcctgtgccagacctgccgccacctgtgtggggacagcgtgaagcccacccaccccagctgcctggccctgtgcctgtggggccgcatgggagacagctgccaccggggccagtggcatgctggccacagccagctgtccttctag

SEQ ID NO: 321249 - DNA, 2313 bp, Artificial Sequence
  derived and/or modified sequence
atgaagggcgacacccggcacctgaacggcgaggaggacgccggcggtagggaggactcgattctggtgaacggcgcctgcagcgatcagtcgtcagactcccccccaattctagaggctataaggacacccgaaatccggggaagacgatcctccagtaggctgtcaaaacgagaagtgtcctcgctgctttcctatacacaggacctgaccggtgacggggatggcgaagacggagatggaagcgacacaccagttatgcctaagttatttagagagacgcgaacacggagcgagagccctgccgtgcgcacgagaaataacaattccgtgagcagcagggaacggcataggccgtcaccccgttccactagaggacgccaggggaggaatcacgtcgacgagagcccggtcgaattccctgccaccaggtccctccggcggagagcaaccgcctcagcaggcacgccatggccatcaccaccatcaagttaccttaccattgatttgactgacgacacagaagatacacatggcaccccacagtcatcctccaccccctacgcccgccttgctcaggactctcagcagggcggtatggagagtccgcaagtggaggccgactcgggcgatggggatagctccgagtaccaggatggaaaggagttcgggataggggatcttgtgtggggtaaaatcaaaggtttctcatggtggcccgccatggtggtaagctggaaggccacctctaagcggcaagccatgtctggtatgcgctgggttcagtggtttggagatggaaaattctccgaggtttctgctgacaaactcgtggctctggggcttttttcccagcactttaatctggctacatttaataaattggtgagttacaggaaggctatgtatcacgccctggagaaggcacgcgtgcgcgcaggaaagaccttcccaagttcacctggagactcacttgaagaccaacttaagcctatgctggaatgggcacatggcggatttaaacccactggaatcgagggattgaagcccaataacacacagccagagaataaaacgcgcaggcgcactgccgatgattctgctacttccgactattgcccagcgcctaagagactcaagaccaactgctacaacaacggtaaagaccgtggtgatgaagaccaatcgcgggagcagatggcctcagacgtggctaacaataagagtagcctggaggatgggtgtctgtcttgcggcaggaagaacccggtatctttccatccgctctttgaaggaggcctgtgccagacctgccgcgataggttcctcgagctcttctatatgtacgacgacgatggctatcagagctattgcacagtgtgctgtgagggcagagagctactgctgtgttcaaacacaagctgttgcaggtgtttctgcgtggagtgcctagaagtgctagtcggtacaggcaccgcagccgaggctaaattgcaggaaccctggagttgctacatgtgcctgccgcaacgctgccacggggtgctgaggcgcaggaaggactggaatgtcagacttcaagcgtttttcaccagcgatacggggttggaatatgaggccccgaaattgtatccagccatcccggcggctcgtagacgccctatccgtgtgctgagcctgtttgacggcatcgccactggctatctcgtcctgaaagagttaggcattaaggtagggaagtacgttgcgagtgaggtatgcgaggaaagcattgcagtgggaaccgttaaacacgagggcaatatcaagtacgtgaacgacgtaaggaacattacaaagaaaaatatagaggaatggggaccctttgatctagtgattggaggttcgccttgcaacgatctatccaatgtcaaccccgcccggaagggcctttacgagggcaccggacgactgtttttcgagttttaccaccttctcaactatagccgacccaaggagggcgacgaccgcccgttcttttggatgtttgagaatgtcgttgcgatgaaagtgggtgacaaacgggacatcagccgctttcttgaatgtaacccggtgatgatcgatgctatcaaggtgtctgcagcacaccgagctagatacttttggggaaacctgccgggaatgaacagaattttcggtttcccagtgcactacactgacgtgtccaacatggggaggggagcccgccaaaagttgctgggacggtcctggtccgtgccagtcatccgtcatctcttcgcccccctcaaagactatttcgcttgcgaatag

SEQ ID NO: 321250 - DNA, 1701 bp, Artificial Sequence
  derived and/or modified sequence
ggccggagcccccggggccggagcgagcggccccccaccgacggcacgggaagtttagccgtaggccgcgccggggggaatgccgctcgtccagcagcgctcggcctgtccgggcctagtaaaccaagttcggccatcggagcaggagactcccgagctcagcgtcccgctagaccaccagctggactgcccccagcttcacccgacccccgcttgcgccgtcccgccgctccccaacctgctctgaggcaggagtcaatgaagggcgatacgagacacctgaatggggaggaggacgccggaggcagggaagacagtatacttgtcaacggcgcttgctccgaccagagctccgactcaccccccattcttgaagctataaggacacctgagattaggggtcgacggagttcctctcgactgagtaaacgagaagtgagctctctgttatcttacacccaggacttgaccggagatggggacggagaggatggtgacggaagcgacactcccgtgatgcctaaattgtttcgcgaaacaagaaccaggtccgaaagcccggccgtgaggactcggaataacaattccgtcagcagcagagaacggcatcgcccctcgccaagatccactcgagggcgacagggccgtaaccatgtagacgaatcccctgttgagtttcctgccacaaggagtctccggagacgagctaccgccagcgccggcaccccttggcctagtcccccgagctcctacctaactatagacctcacagatgacaccgaggacacccatgggactccccagtcttcgagtacaccttacgcacgcctcgcacaagacagccaacagggaggtatggaaagtccgcaggttgaggccgactctggagatggcgatagcagtgaataccaggatgggaaagaatttgggatcggcgatctcgtgtggggcaagataaaaggcttcagttggtggcctgcgatggtggtttcctggaaggctacatctaaaaggcaggccatgtccggcatgagatgggtccagtggttcggcgacgggaagttcagtgaggtgagcgcagataaacttgtggctcttggcctctttagccaacacttcaacttagcaaccttcaataagcttgtctcataccgcaaagcaatgtaccatgctctggagaaggcacgcgtccgtgccggcaagacatttcccagctcgccaggcgactctcttgaggaccaactgaaacctatgttggaatgggctcatggcgggttcaaacccactggaatcgaaggcctgaaaccaaacaatacccaacccgagaataaaacccggcggaggacagccgatgattcagctactagtgactattgtccagctcctaagcgcctgaaaactaactgttataacaatggcaaggaccgcggagacgaagatcagtccagagaacagatggcctccgatgtcgcaaacaacaagagtagcctggaagatggatgcctcagctgcggacgcaagaacccagtttccttccaccccctgttcgaagggggcctttgccagacatgcagacatctatgcggcgatagcgtgaaaccaactcatccgtcctgccttgccttgtgcctgtgggggagaatgggcgactcctgtcacagagggcaatggcacgcggggcattcgcaactctctttctag

SEQ ID NO: 321251 - DNA, 2313 bp, Artificial Sequence
  derived and/or modified sequence
atgaagggcgacacccggcatctgaacggcgaggaggacgcagggggacgggaagattccattctagtaaatggggcttgctcagatcagagctctgacagtccccctatcttggaggcaattcgaacccccgaaattcgcggacgccgatcctccagccgattgagtaagagagaggtgagctcactgctgtcctacacccaagatttgaccggagatggtgacggcgaagacggcgatggctcagacactccagttatgcccaagcttttccgagaaacccgaacgcgatcggaaagtcctgccgtgcgaaccagaaacaacaattccgtctcatcccgagagcggcacaggcccagccccagaagcacaaggggcaggcagggcaggaatcacgtggacgagtcacccgtggaatttccggcaacgagatccctacgcagaagggccacggcatcagccggaacaccttggccatccccccctagcagttatctgaccattgatcttactgacgataccgaagacacacatggaactccgcagtccagtagcactccatatgccagacttgctcaagatagtcaacaagggggaatggaatcccctcaggtcgaggctgacagtggtgatggggactcaagtgagtaccaggacggcaaagaattcggaattggggacctagtctggggcaagatcaagggcttctcttggtggccagctatggtggtctcatggaaggcgacatccaagcgtcaagccatgagcggtatgaggtgggtccagtggttcggggacggaaaatttagcgaggtctcagcagacaagttggtggcactgggcctgttctcccagcactttaatctggccacatttaataagctggtgtcctatcgaaaagctatgtaccacgcactggagaaagcaagagttagagcaggcaaaacattcccttcctcgcccggagatagcctcgaagaccagctgaaacctatgctggaatgggctcatggcggtttcaagcccaccggtatcgaggggctcaaacccaacaatacacagccagagaacaaaaccaggcgaagaactgccgatgactccgctacatctgactattgtcccgcacccaagcgattgaaaactaactgttacaataacggcaaagaccgaggagatgaagatcagtctcgggaacagatggcctccgacgtggctaataacaaaagttctctcgaagacggttgccttagctgcggaagaaaaaaccctgtttcatttcacccactgttcgaaggaggcctgtgccagacctgccgcgataggttcctagaattgttttatatgtacgatgatgacggctatcagtcttactgcactgtctgttgcgagggtcgcgagctgctgctttgtagtaatacatcttgctgccgctgcttttgcgttgagtgcctagaggtgctggtgggcaccggtacagctgccgaggctaagttacaggaaccatggtcttgctatatgtgtctgccccaacggtgtcatggcgtcttacgacgcaggaaggactggaacgtgcgactgcaagctttttttactagtgacacaggactggaatacgaggcaccaaagctttacccggctattcccgcagccagaaggcggcctattcgggtgctgtcactttttgatggaattgcaactggctatctggtgctgaaagaactcggcattaaggttggaaagtatgtggcctcagaagtttgcgaagagagcatcgccgtcggtacagttaagcatgagggcaacattaaatatgtcaatgacgtgaggaatatcaccaagaagaacattgaggaatgggggccattcgacctggtaattggcggatcaccttgcaacgacctcagtaatgtaaacccggcacgcaaaggactctatgagggtaccggcaggcttttcttcgagttctaccacctgctcaactactcgaggcccaaggaaggagacgatcggccatttttctggatgttcgagaacgttgttgcaatgaaggtgggagataaacgcgatatttctcgattcctcgaatgcaatcctgtgatgattgatgccatcaaagtctctgccgctcatagagcccgatatttttggggaaatctgcccggtatgaacagaatttttggtttccctgtgcactatacagacgtttccaacatgggcagaggagcccgacagaaactcctgggacgaagctggagcgttcccgtgattcgccacctgtttgctccactcaaggactattttgcctgtgaatag

SEQ ID NO: 321252 - DNA, 1701 bp, Artificial Sequence
  derived and/or modified sequence
gggcgtagtccacggggtcggtctgaacgcccacccaccgatggcaccggctcactcgctgtgggtcgtgcaggcggtaacgccgctaggcccgcagccctcgggctctctggcccatcaaagccgagtagcgcgatcggagccggagatagccgggcacaaagaccagcacgccctccagccggactgccccctgcgtctccagacccccgactgagacgccctgccgctccccaaccagcactacggcaagagagtatgaaaggtgatacccggcacttaaatggagaggaggacgctggcggaagggaggactctatattagtcaacggggcttgcagcgaccagagcagtgattccccccctattctggaagctatccgaacacccgagatccgcggacggcgaagctcaagcagactgtccaagcgggaggtctcatccctgctgtcctatacacaggacctgacaggcgacggggacggggaggacggcgatggctccgacactccagtgatgcccaagctgttccgtgagacccgcactcggagtgagtcacctgccgttcgaacgcgcaacaacaatagcgtgtcttcccgcgagagacataggcccagccctagatctacacgagggcgacaagggaggaatcacgtagacgagagtcctgtggagtttcccgctacacgctcactccgtaggagagccaccgcctccgctggtaccccttggccctcgccaccatcctcctacctcactattgatctgaccgacgacactgaagacacgcacggaacaccacaatcaagcagcactccatacgcacgcctggcccaggatagccaacagggaggtatggaatccccacaggttgaggccgattccggagacggggactcatcggaatatcaagacggtaaggagtttgggatcggggatctggtgtgggggaaaatcaagggttttagctggtggcccgcaatggtggtgtcttggaaggccacatccaagagacaggccatgtcaggaatgagatgggttcagtggtttggggatggcaagtttagtgaagtatccgcggacaagttagtggccttgggcctgttctcacagcattttaacttggcaacattcaacaagctcgtgtcatatcggaaagctatgtaccatgctctcgaaaaagccagagttagggcaggtaagaccttcccctccagtccaggcgactctctggaggatcagctcaagccaatgctggaatgggctcatggcggattcaagccaacaggtattgagggcctaaagccgaacaatactcagccagaaaacaaaacccgccgtcgtacagctgacgactcagccaccagtgattattgtcccgctccaaagagattgaagactaactgttacaataacggtaaagatagaggcgacgaggatcagtcacgggaacagatggcttccgatgtcgccaacaataagagctccctggaggacgggtgcctcagctgtggacgtaaaaacccagtatcttttcatcctttgttcgaggggggactgtgccagacatgtaggcacctgtgtggtgactctgtgaagcccacccacccatcttgcctggcgctgtgcctatggggacgaatgggcgacagttgtcatagggggcagtggcacgccggacacagccagctcagtttctag

SEQ ID NO: 321253 - DNA, 2313 bp, Artificial Sequence
  derived and/or modified sequence
atgaagggcgacaccagacacctgaacggcgaggaggacgccggcggcagagaggacagcatcctggtgaacggcgcctgcagcgaccagagcagcgacagcccccccatcctggaggccatcagaacccccgagatcagaggcagaagaagcagcagcagactgagcaagagagaggtgagcagcctgctgagctacacccaggacctgaccggcgacggcgacggcgaggacggcgacggcagcgacacccccgtgatgcccaagctgttcagagagaccagaaccagaagcgagagccccgccgtgagaaccagaaacaacaacagcgtgagcagcagagagagacacagacccagccccagaagcaccagaggcagacagggcagaaaccacgtggacgagagccccgtggagttccccgccaccagaagcctgagaagaagagccaccgccagcgccggcaccccctggcccagcccccccagcagctacctgaccatcgacctgaccgacgacaccgaggacacccacggcaccccccagagcagcagcaccccctacgccagactggcccaggacagccagcagggcggcatggagagcccccaggtggaggccgacagcggcgacggcgacagcagcgagtaccaggacggcaaggagttcggcatcggcgacctggtgtggggcaagatcaagggcttcagctggtggcccgccatggtggtgagctggaaggccaccagcaagagacaggccatgagcggcatgagatgggtgcagtggttcggcgacggcaagttcagcgaggtgagcgccgacaagctggtggccctgggcctgttcagccagcacttcaacctggccaccttcaacaagctggtgagctacagaaaggccatgtaccacgccctggagaaggccagagtgagagccggcaagaccttccccagcagccccggcgacagcctggaggaccagctgaagcccatgctggagtgggcccacggcggcttcaagcccaccggcatcgagggcctgaagcccaacaacacccagcccgagaacaagaccagaagaagaaccgccgacgacagcgccaccagcgactactgccccgcccccaagagactgaagaccaactgctacaacaacggcaaggacagaggcgacgaggaccagagcagagagcagatggccagcgacgtggccaacaacaagagcagcctggaggacggctgcctgagctgcggcagaaagaaccccgtgagcttccaccccctgttcgagggcggcctgtgccagacctgcagagacagattcctggagctgttctacatgtacgacgacgacggctaccagagctactgcaccgtgtgctgcgagggcagagagctgctgctgtgcagcaacaccagctgctgcagatgcttctgcgtggagtgcctggaggtgctggtgggcaccggcaccgccgccgaggccaagctgcaggagccctggagctgctacatgtgcctgccccagagatgccacggcgtgctgagaagaagaaaggactggaacgtgagactgcaggccttcttcaccagcgacaccggcctggagtacgaggcccccaagctgtaccccgccatccccgccgccagaagaagacccatcagagtgctgagcctgttcgacggcatcgccaccggctacctggtgctgaaggagctgggcatcaaggtgggcaagtacgtggccagcgaggtgtgcgaggagagcatcgccgtgggcaccgtgaagcacgagggcaacatcaagtacgtgaacgacgtgagaaacatcaccaagaagaacatcgaggagtggggccccttcgacctggtgatcggcggcagcccctgcaacgacctgagcaacgtgaaccccgccagaaagggcctgtacgagggcaccggcagactgttcttcgagttctaccacctgctgaactacagcagacccaaggagggcgacgacagacccttcttctggatgttcgagaacgtggtggccatgaaggtgggcgacaagagagacatcagcagattcctggagtgcaaccccgtgatgatcgacgccatcaaggtgagcgccgcccacagagccagatacttctggggcaacctgcccggcatgaacagaatcttcggcttccccgtgcactacaccgacgtgagcaacatgggcagaggcgccagacagaagctgctgggcagaagctggagcgtgcccgtgatcagacacctgttcgcccccctgaaggactacttcgcctgcgagtag

SEQ ID NO: 321254 - DNA, 1701 bp, Artificial Sequence
  derived and/or modified sequence
ggcagaagccccagaggcagaagcgagagaccccccaccgacggcaccggcagcctggccgtgggcagagccggcggcaacgccgccagacccgccgccctgggcctgagcggccccagcaagcccagcagcgccatcggcgccggcgacagcagagcccagagacccgccagaccccccgccggcctgccccccgccagccccgaccccagactgagaagacccgccgccccccagcccgccctgagacaggagagcatgaagggcgacaccagacacctgaacggcgaggaggacgccggcggcagagaggacagcatcctggtgaacggcgcctgcagcgaccagagcagcgacagcccccccatcctggaggccatcagaacccccgagatcagaggcagaagaagcagcagcagactgagcaagagagaggtgagcagcctgctgagctacacccaggacctgaccggcgacggcgacggcgaggacggcgacggcagcgacacccccgtgatgcccaagctgttcagagagaccagaaccagaagcgagagccccgccgtgagaaccagaaacaacaacagcgtgagcagcagagagagacacagacccagccccagaagcaccagaggcagacagggcagaaaccacgtggacgagagccccgtggagttccccgccaccagaagcctgagaagaagagccaccgccagcgccggcaccccctggcccagcccccccagcagctacctgaccatcgacctgaccgacgacaccgaggacacccacggcaccccccagagcagcagcaccccctacgccagactggcccaggacagccagcagggcggcatggagagcccccaggtggaggccgacagcggcgacggcgacagcagcgagtaccaggacggcaaggagttcggcatcggcgacctggtgtggggcaagatcaagggcttcagctggtggcccgccatggtggtgagctggaaggccaccagcaagagacaggccatgagcggcatgagatgggtgcagtggttcggcgacggcaagttcagcgaggtgagcgccgacaagctggtggccctgggcctgttcagccagcacttcaacctggccaccttcaacaagctggtgagctacagaaaggccatgtaccacgccctggagaaggccagagtgagagccggcaagaccttccccagcagccccggcgacagcctggaggaccagctgaagcccatgctggagtgggcccacggcggcttcaagcccaccggcatcgagggcctgaagcccaacaacacccagcccgagaacaagaccagaagaagaaccgccgacgacagcgccaccagcgactactgccccgcccccaagagactgaagaccaactgctacaacaacggcaaggacagaggcgacgaggaccagagcagagagcagatggccagcgacgtggccaacaacaagagcagcctggaggacggctgcctgagctgcggcagaaagaaccccgtgagcttccaccccctgttcgagggcggcctgtgccagacctgcagacacctgtgcggcgacagcgtgaagcccacccaccccagctgcctggccctgtgcctgtggggcagaatgggcgacagctgccacagaggccagtggcacgccggccacagccagctgagcttctag

SEQ ID NO: 321255 - DNA, 4048 bp, Artificial Sequence
  derived and/or modified sequence
cgcagcagctgctcccggctccgcggccgcagcccgcgtggacgctccgagcgccccccgacggacgggaccggctccctggcggtcgggcgagcgggcggcaacgctgcccggccggcagcgctggggttaagtggcccaagtaaacctagctcggcgatcggcgccggagattcgcgagcccagcgccctgcacggccgccagccggcctcccgccagccagccccgacccgcggctccgccgcccagccgcgccccagccagccctgcggcaggaaagcatgaagggagacaccaggcatctcaatggagaggaggacgccggcgggagggaagactcgatcctcgtcaacggggcctgcagcgaccagtcctccgactcgcccccaatcctggaggctatccgcaccccggagatcagaggccgaagatcaagctcgcgactctccaagagggaggtgtccagtctgctaagctacacacaggacttgacaggcgatggcgacggggaagatggggatggctctgacaccccagtcatgccaaagctcttccgggaaaccaggactcgttcagaaagcccagctgtccgaactcgaaataacaacagtgtctccagccgggagaggcacaggccttccccacgttccacccgaggccggcagggccgcaaccatgtggacgagtcccccgtggagttcccggctaccaggtccctgagacggcgggcaacagcatcggcaggaacgccatggccgtcccctcccagctcttaccttaccatcgacctcacagacgacacagaggacacacatgggacgccccagagcagcagtaccccctacgcccgcctagcccaggacagccagcaggggggcatggagtccccgcaggtggaggcagacagtggagatggagacagttcagagtatcaggatgggaaggagtttggaataggggacctcgtgtggggaaagatcaagggcttctcctggtggcccgccatggtggtgtcttggaaggccacctccaagcgacaggctatgtctggcatgcggtgggtccagtggtttggcgatggcaagttctccgaggtctctgcagacaaactggtggcactggggctgttcagccagcactttaatttggccaccttcaataagctcgtctcctatcgaaaagccatgtaccatgctctggagaaagctagggtgcgagctggcaagaccttccccagcagccctggagactcattggaggaccagctgaagcccatgttggagtgggcccacgggggcttcaagcccactgggatcgagggcctcaaacccaacaacacgcaaccagagaacaagactcgaagacgcacagctgacgactcagccacctctgactactgccccgcacccaagcgcctcaagacaaattgctataacaacggcaaagaccgaggggatgaagatcagagccgagaacaaatggcttcagatgttgccaacaacaagagcagcctggaagatggctgtttgtcttgtggcaggaaaaaccccgtgtccttccaccctctctttgagggggggctctgtcagacatgccgggatcgcttccttgagctgttttacatgtatgatgacgatggctatcagtcttactgcactgtgtgctgcgagggccgagagctgctgctttgcagcaacacgagctgctgccggtgtttctgtgtggagtgcctggaggtgctggtgggcacaggcacagcggccgaggccaagcttcaggagccctggagctgttacatgtgtctcccgcagcgctgtcatggcgtcctgcggcgccggaaggactggaacgtgcgcctgcaggccttcttcaccagtgacacggggcttgaatatgaagcccccaagctgtaccctgccattcccgcagcccgaaggcggcccattcgagtcctgtcattgtttgatggcatcgcgacaggctacctagtcctcaaagagttgggcataaaggtaggaaagtacgtcgcttctgaagtgtgtgaggagtccattgctgttggaaccgtgaagcacgaggggaatatcaaatacgtgaacgacgtgaggaacatcacaaagaaaaatattgaagaatggggcccatttgacttggtgattggcggaagcccatgcaacgatctctcaaatgtgaatccagccaggaaaggcctgtatgagggtacaggccggctcttcttcgaattttaccacctgctgaattactcacgccccaaggagggtgatgaccggccgttcttctggatgtttgagaatgttgtagccatgaaggttggcgacaagagggacatctcacggttcctggagtgtaatccagtgatgattgatgccatcaaagtttctgctgctcacagggcccgatacttctggggcaacctacccgggatgaacaggatctttggctttcctgtgcactacacagacgtgtccaacatgggccgtggtgcccgccagaagctgctgggaaggtcctggagcgtgcctgtcatccgacacctcttcgcccctctgaaggactactttgcatgtgaatagttccagccaggccccaagcccactggggtgtgtggcagagccaggacccaggaggtgtgattcctgaaggcatccccaggccctgctcttcctcagctgtgtgggtcataccgtgtacctcagttccctcttgctcagtgggggcagagccacctgactcttgcaggggtagcctgaggtgccgcctccttgtgcacaaatcagacctggctgcttggagcagcctaacacggtgctcattttttcttctcctaaaactttaaaacttgaagtaggtagcaacgtggctttttttttttcccttcctgggtctaccactcagagaaacaatggctaagataccaaaaccacagtgccgacagctctccaatactcaggttaatgctgaaaaatcatccaagacagttattgcaagagtttaatttttgaaaactggctactgctctgtgtttacagacgtgtgcagttgtaggcatgtagctacaggacatttttaagggcccaggatcgttttttcccagggcaagcagaagagaaaatgttgtatatgtcttttacccggcacattccccttgcctaaatacaagggctggagtctgcacgggacctattagagtattttccacaatgatgatgatttcagcagggatgacgtcatcatcacattcagggctattttttcccccacaaacccaagggcaggggccactcttagctaaatccctccccgtgactgcaatagaaccctctggggagctcaggaaggggtgtgctgagttctataatataagctgccatatattttgtagacaagtatggctcctccatatctccctcttccctaggagaggagtgtgaagcaaggagcttagataagacaccccctcaaacccattccctctccaggagacctaccctccacaggcacaggtccccagatgagaagtctgctaccctcatttctcatctttttactaaactcagaggcagtgacagcagtcagggacagacatacatttctcataccttccccacatctgagagatgacagggaaaactgcaaagctcggtgctccctttggagattttttaatccttttttattccataagaagtcgtttttagggagaacgggaattcagacaagctgcatttcagaaatgctgtcataatggtttttaacaccttttactcttcttactggtgctattttgtagaataaggaacaacgttgacaagttttgtggggctttttatacactttttaaaatctcaaacttctatttttatgtttaacgttttcattaaaattttttttgtaactggagccacgacgtaacaaatatggggaaaaaactgtgccttgtttcaacagtttttgctaatttttaggctgaaagatgacggatgcctagagtttaccttatgtttaattaaaatcagtatttgtcta

SEQ ID NO: 321256 - DNA, 1764 bp, Artificial Sequence
  derived and/or modified sequence
acccactcccgctgccccgtccggcccgcgccgcttcctcgcagcagctgctcccggctccgcggccgcagcccgcgtggacgctccgagcgccccccgacggacgggaccggctccctggcggtcgggcgagcgggcggcaacgctgcccggccggcagcgctggggttaagtggcccaagtaaacctagctcggcgatcggcgccggagattcgcgagcccagcgccctgcacggccgccagccggcctcccgccagccagccccgacccgcggctccgccgcccagccgcgccccagccagccctgcggcaggaaagcatgaagggagacaccaggcatctcaatggagaggaggacgccggcgggagggaagactcgatcctcgtcaacggggcctgcagcgaccagtcctccgactcgcccccaatcctggaggctatccgcaccccggagatcagaggccgaagatcaagctcgcgactctccaagagggaggtgtccagtctgctaagctacacacaggacttgacaggcgatggcgacggggaagatggggatggctctgacaccccagtcatgccaaagctcttccgggaaaccaggactcgttcagaaagcccagctgtccgaactcgaaataacaacagtgtctccagccgggagaggcacaggccttccccacgttccacccgaggccggcagggccgcaaccatgtggacgagtcccccgtggagttcccggctaccaggtccctgagacggcgggcaacagcatcggcaggaacgccatggccgtcccctcccagctcttaccttaccatcgacctcacagacgacacagaggacacacatgggacgccccagagcagcagtaccccctacgcccgcctagcccaggacagccagcaggggggcatggagtccccgcaggtggaggcagacagtggagatggagacagttcagagtatcaggatgggaaggagtttggaataggggacctcgtgtggggaaagatcaagggcttctcctggtggcccgccatggtggtgtcttggaaggccacctccaagcgacaggctatgtctggcatgcggtgggtccagtggtttggcgatggcaagttctccgaggtctctgcagacaaactggtggcactggggctgttcagccagcactttaatttggccaccttcaataagctcgtctcctatcgaaaagccatgtaccatgctctggagaaagctagggtgcgagctggcaagaccttccccagcagccctggagactcattggaggaccagctgaagcccatgttggagtgggcccacgggggcttcaagcccactgggatcgagggcctcaaacccaacaacacgcaaccagagaacaagactcgaagacgcacagctgacgactcagccacctctgactactgccccgcacccaagcgcctcaagacaaattgctataacaacggcaaagaccgaggggatgaagatcagagccgagaacaaatggcttcagatgttgccaacaacaagagcagcctggaagatggctgtttgtcttgtggcaggaaaaaccccgtgtccttccaccctctctttgagggggggctctgtcagacatgccggcacctgtgtggagactcagtgaagcccactcatcccagctgccttgcactctgcctctggggcaggatgggggacagctgtcacagaggccaatggcacgcaggtcacagccagttgtccttttaa

SEQ ID NO: 321257 - DNA, 2187 bp, Artificial Sequence
  derived and/or modified sequence
atgaaaggagataccaggcatctgaacggagaggaagacgccggcggcagagaggatagcatccttgtgaatggggcctgttctgatcagtcctccgactctccccctattctcgaggccattcggactcctgagatccgtggcaggagatcaagttctcgcttgtctaagagggaggtctcctctctactcagctacacgcaggacctcacaggagacggggatggagaagatggtgacggatcagatacccccgtgatgcccaagctttttcgcgagaccaggacccgctctgaaagccctgccagcctgcggagacgagctaccgccagcgctggtaccccatggccgagcccaccctcttcctacctcactattgacctcacagacgataccgaagacactcatggcactccgcagtcttccagcaccccatatgccagactagctcaggacagccagcaaggcgggatggaatccccacaagtggaagctgatagtggagacggagattcctcggaataccaggacggaaaggagtttggaattggcgatctggtgtgggggaaaatcaaaggcttcagttggtggcctgccatggtggtttcatggaaggccacgagcaagcggcaggcaatgtctggtatgcgctgggtgcagtggttcggtgacggaaaattcagcgaagtgagcgccgataagcttgtggcccttggcttattttctcagcacttcaatctcgcgacctttaacaaactcgtttcttataggaaggcaatgtaccacgccttggaaaaggcccgcgtcagagctgggaagacatttcctagctccccgggtgatagccttgaagaccagctgaaacccatgctagagtgggcacacgggggattcaagcctacaggtatcgaaggcctgaaacctaacaacacccaaccagagaacaaaactagaaggagaactgcagacgacagcgccacttccgattactgcccagcccctaagaggcttaagaccaattgttataacaatggcaaggataggggagacgaggatcagtcccgcgagcaaatggcaagtgacgttgccaataataagagctctcttgaggacggttgtctctcctgcggccgcaagaatcccgtgtcctttcaccccctgttcgagggagggctgtgccagacatgtagagaccgctttctggagttgttctatatgtatgacgacgacgggtatcagtcatactgtacagtttgctgtgaaggccgggagcttttactgtgctccaatactagttgttgtcggtgtttttgtgtggaatgtctggaggtattggtaggcactgggacggcagcagaagcaaaactgcaagagccatggtcctgttacatgtgccttccacagcgctgccatggagtcttgcgccgtcggaaggactggaacgtcaggctgcaggcgttctttaccagcgatacagggctggagtacgaagcgccaaaactttatcctgccatccctgctgcccgtcgccgccctatcagggtcctgtcactgtttgacgggattgctacggggtaccttgtacttaaagagctcggaatcaaggtcggcaaatatgtcgccagcgaggtgtgtgaagagagcatcgctgtggggaccgtaaaacatgaagggaatatcaagtatgttaacgacgtacgtaatatcaccaagaagaacattgaagaatggggcccatttgacttagtcatcgggggtagtccctgcaacgacttgtctaacgttaatcctgcacgtaaaggtttatacgagggcacgggacgcctattttttgagttctatcacctgttaaattattcacgccctaaagaaggggacgaccgaccatttttctggatgtttgaaaatgtggtggccatgaaagtcggcgataagagagatatcagccgtttcctggagtgcaatccagtcatgattgacgccatcaaggtttcagcggcccaccgggcacggtacttttgggggaatctgcccggaatgaacaggatatttggcttccccgtgcactataccgatgtgtcaaatatgggccgtggtgcccggcagaagctgctggggcggtcatggagcgtccctgtgattcgccacctgttcgcaccccttaaagattactttgcttgtgagtag

SEQ ID NO: 321258 - DNA, 2187 bp, Artificial Sequence
  derived and/or modified sequence
atgaagggggacaccaggcacctgaatggagaggaggatgctgggggccgggaggacagcatcctggtgaatggagcctgcagcgaccagagcagtgacagcccccccatcctggaggccatccgcaccccagagatccggggcagaagaagcagcagccggctgagcaagcgggaggtgagcagcctgctgagctacacccaggacctgactggagatggagatggagaagatggagatggcagtgacacccctgtgatgcccaagctgttccgggagaccaggaccaggtctgagagccctgccagcctgcggcggcgggccacagccagcgctggcaccccctggcccagcccccccagcagctacctgaccatcgacctgacagatgacacagaggacacccacggcaccccccagagcagcagcaccccctatgcccggctggcccaggacagccagcagggcggcatggagagcccccaggtggaggccgacagcggagatggagacagcagcgagtaccaggacggcaaggagtttggaattggagacctggtgtggggcaagatcaagggcttctcctggtggccagccatggtggtgtcctggaaggccaccagcaagaggcaggccatgagcggcatgcgctgggtgcagtggtttggagatggcaagttcagcgaggtgtctgctgacaagctggtggccctgggcctcttcagccagcacttcaacctggccaccttcaacaagctggtgtcctacaggaaggccatgtaccacgccctggagaaggcccgggtgcgggccggcaagaccttccccagcagccctggggacagcctggaggaccagctgaagcccatgctggagtgggcccatggaggcttcaagcccactggaattgagggcctgaagcccaacaacacccagcctgagaacaagaccaggagaagaacagcagatgattctgccaccagtgactactgcccagcccccaagaggctgaagaccaactgctacaacaacgggaaggacagaggagatgaggaccagagccgggagcagatggccagtgatgtggccaacaacaagagcagcctggaggatggctgcctgagctgtggcaggaagaaccctgtgtccttccaccccctgtttgagggcggcctgtgccagacctgccgggaccgcttcctggagctgttctacatgtatgatgatgatggctaccagagctactgcaccgtgtgctgtgagggccgggagctgctgctgtgcagcaacaccagctgctgccgctgcttctgtgtggagtgcctggaggtgctggtgggcaccggcacagctgctgaggccaagctgcaggagccctggagctgctacatgtgcctgccccagcgctgccacggcgtgctgcggcggaggaaggactggaatgtgcggctgcaggccttcttcaccagtgacaccggcctggagtatgaggcccccaagctgtacccagccatcccagctgcccggcggcggcccatccgggtgctgagcctgtttgatggcatcgccaccggctacctggtgctgaaggagctgggcatcaaggtgggcaagtatgtggccagcgaggtgtgtgaggagagcattgctgtgggcaccgtgaagcatgagggcaacatcaagtatgtgaatgatgtgaggaacatcaccaagaagaacatcgaggagtggggcccctttgacctggtgattggaggcagcccctgcaatgacctgagcaatgtgaacccagccaggaagggcctgtatgagggcaccggccgcctcttctttgagttctaccacctgctgaactacagccggcccaaggagggagatgaccggcccttcttctggatgtttgaaaatgtggtggccatgaaggtgggggacaagagggacatcagccgcttcctggagtgcaaccctgtgatgattgatgccatcaaggtgtctgctgcccaccgggcccgctacttctggggcaacctgcccggcatgaaccgcatcttcggcttccctgtgcactacacagatgtgagcaacatgggccgcggggcccggcagaagctgctgggccgctcctggagcgtgcctgtgatccgccacctgtttgcccccctgaaggactactttgcctgtgagtag

SEQ ID NO: 321259 - DNA, 2187 bp, Artificial Sequence
  derived and/or modified sequence
atgaagggcgacacccggcacctgaacggcgaggaggacgccggcggtcgcgaagacagtatcttggttaatggggcttgcagcgaccaaagctccgactctccacccatactggaagccatccgcaccccagaaattagggggcgccgcagcagtagcagactgtcaaagcgcgaggtgtcatctttgctatcatacacacaggacctcacgggtgacggtgatggcgaggacggagatggttctgacaccccagtgatgccaaaactgttcagagaaacgcggacacggtccgagtcaccggcaagcctgcgaaggcgcgctacagcctctgctggcacaccttggccctcgccaccttcctcatacctcaccattgatctgactgatgataccgaggacactcacggaacgccacagagttcttctaccccctacgcccgactcgctcaggattctcagcagggcgggatggagtcgcctcaggtggaggctgattctggagatggggatagctcagagtatcaggatggcaaagagttcgggattggagatttagtctggggcaagatcaaaggcttttcatggtggcctgccatggtggttagttggaaagcgacatccaagcggcaggccatgagtggcatgcgctgggtacagtggtttggagatggtaagtttagcgaagtgtcagccgacaagttagtggctctgggcctcttttctcaacattttaatttagccaccttcaacaagctggtaagctatagaaaagccatgtatcacgcgctggagaaagctagagtcagggctggcaaaacctttcccagctcacctggcgactccttggaagaccagcttaaacccatgctggaatgggcccacggagggttcaagcccactgggattgaggggctaaagccaaacaacacacagcctgagaataaaactcgccgacggactgccgacgattcagccactagtgattactgtccagcaccgaagcgcctgaaaaccaactgttataacaacggtaaagaccggggcgatgaagaccaatccagggaacagatggccagcgatgtcgctaataacaaatcttctctagaggatggctgcctgtcctgtggcagaaagaatcccgtgtcctttcatcctcttttcgagggagggttatgccagacgtgtcgggaccggtttctggagctcttctatatgtatgatgacgatggctatcaaagttactgtaccgtttgctgcgaaggtagggaactcctcctttgttcaaacacgagctgctgcaggtgtttctgtgtggagtgtctggaagtcctggtgggtaccggaactgcagccgaggccaagctgcaggagccttggtcgtgctacatgtgtctaccgcaacgctgccacggtgtgctgcgtagacggaaggattggaatgtccggttacaggcttttttcacatccgataccggattggaatatgaggctccaaagctgtatcccgcaattcccgccgcccgccggcgccccatccgggtactatccttatttgatggcattgcaactggttacttagttttaaaggagttaggaattaaagtggggaagtacgtggcttcagaagtttgtgaagagagtattgccgtcggaaccgtgaagcacgagggtaatattaaatacgttaatgacgtgcggaacataactaagaaaaatatagaagagtgggggccatttgatcttgtgatcgggggatcgccttgcaacgacctgtctaacgtgaatccagcacggaaaggtttgtacgaaggcactgggcggcttttcttcgagttctaccacctgttgaattactctcgcccgaaagagggcgacgaccgtccttttttttggatgtttgagaatgtcgtcgcgatgaaggtgggggacaagagggacatatcaaggtttttagagtgtaatccagtgatgatcgacgctatcaaggtttccgccgcgcacagggcacggtacttctggggcaacctccccggaatgaatcggatttttgggttccctgtgcattatacagatgtcagtaacatgggtcgcggtgctaggcaaaagctactcggcagatcctggtcagttcctgtgataagacacctgtttgccccgctcaaagactatttcgcttgcgagtag

SEQ ID NO: 321260 - DNA, 2187 bp, Artificial Sequence
  derived and/or modified sequence
atgaagggcgatacaagacacctgaacggagaagaggacgcaggcggacgggaagacagtattcttgtgaatggcgcatgctccgaccagtcctcggatagcccgcctattctggaggccattaggacgcccgaaattcgaggacgacgatcttcgtcccggttgagcaagcgggaggtgagttctttgctgtcttacacccaggatcttaccggggacggcgacggagaagatggcgacggatccgacacaccagtgatgcctaaactgtttcgcgagacacgcactcgctccgaatctcccgcaagcctgagacgcagagcaacagcctctgccggaacaccctggccatcacctcccagttcctatttgacaatcgacctgaccgacgacacagaggatacccacggaacccctcagagctccagtacaccatacgcaagactggcgcaagacagccagcaaggcggaatggaatccccgcaggtggaagctgattctggagatggcgactcatcagaataccaggacggaaaagaatttggtatcggagacctcgtttggggaaagattaaaggtttctcatggtggccagctatggttgtaagctggaaagccacgtcaaaacgtcaggcaatgtctggaatgagatgggtccagtggttcggcgatgggaagttctccgaagttagtgccgacaagctggtggcactgggactctttagccaacacttcaatcttgctaccttcaataagctagtatcgtataggaaggcgatgtatcacgccctagaaaaagctcgggtgcgcgctggtaagactttcccaagctcgccaggagactctctcgaagatcagctaaagcctatgctggagtgggcacacggaggttttaagcctactggcatcgagggactgaagcctaataatactcagcccgaaaacaaaacacggagacgcaccgcagacgactctgccacatccgactactgccccgctccaaagagattgaaaactaattgctataataacggcaaagacaggggagacgaagaccagagccgggagcagatggccagtgacgtggccaacaacaagtcttctttggaggatggatgtctgagctgcggcagaaagaaccccgtctcattccaccccttgtttgagggcggactgtgccagacttgtagggacagattcctggagctgttctatatgtatgacgatgatggatatcaaagttattgcaccgtgtgttgcgaaggccgagaactgttgctctgcagtaacaccagctgttgcaggtgcttctgcgtggaatgccttgaggtgctggtgggcacaggcaccgcagctgaggctaagctgcaggaaccctggagttgttatatgtgtctgccacagcggtgtcacggagtgctgaggcgccgaaaagactggaatgtgcggctccaggcgttcttcacctccgacactggactggaatatgaagctccaaagctctaccctgctataccagctgcaaggcggagaccgatccgggtcctgagcctttttgacgggatagccaccggttatctggtactgaaggaacttggaataaaggtcggtaaatatgtggccagtgaagtctgcgaggaatccattgctgtgggcacggtaaagcatgagggaaacattaagtatgtcaatgacgtacgaaatatcacaaaaaaaaacatcgaagaatgggggccattcgacttagtgatcggagggtctccctgtaacgacctgtcgaatgttaaccccgctcggaaaggtctgtatgaaggaaccgggcgactgttcttcgagttttaccacctgctcaactacagcaggcctaaagaaggagacgaccggccattcttctggatgttcgaaaacgtagtggccatgaaggtgggcgacaaacgggatatctctagatttttagagtgtaaccctgttatgatcgatgcaatcaaagtctcagccgctcatcgcgctaggtatttttggggaaatctgccaggaatgaatcggatttttggattccccgttcactatacggacgtgtccaatatgggccgaggggctcgtcagaagctgctgggcaggtcttggtccgtacctgtaatccgccacctcttcgctcctttgaaagattactttgcctgcgaatag

SEQ ID NO: 321261 - DNA, 2187 bp, Artificial Sequence
  derived and/or modified sequence
atgaagggcgacaccagacacctgaacggcgaggaggacgccggcggcagagaggacagcatcctggtgaacggcgcctgcagcgaccagagcagcgacagcccccccatcctggaggccatcagaacccccgagatcagaggcagaagaagcagcagcagactgagcaagagagaggtgagcagcctgctgagctacacccaggacctgaccggcgacggcgacggcgaggacggcgacggcagcgacacccccgtgatgcccaagctgttcagagagaccagaaccagaagcgagagccccgccagcctgagaagaagagccaccgccagcgccggcaccccctggcccagcccccccagcagctacctgaccatcgacctgaccgacgacaccgaggacacccacggcaccccccagagcagcagcaccccctacgccagactggcccaggacagccagcagggcggcatggagagcccccaggtggaggccgacagcggcgacggcgacagcagcgagtaccaggacggcaaggagttcggcatcggcgacctggtgtggggcaagatcaagggcttcagctggtggcccgccatggtggtgagctggaaggccaccagcaagagacaggccatgagcggcatgagatgggtgcagtggttcggcgacggcaagttcagcgaggtgagcgccgacaagctggtggccctgggcctgttcagccagcacttcaacctggccaccttcaacaagctggtgagctacagaaaggccatgtaccacgccctggagaaggccagagtgagagccggcaagaccttccccagcagccccggcgacagcctggaggaccagctgaagcccatgctggagtgggcccacggcggcttcaagcccaccggcatcgagggcctgaagcccaacaacacccagcccgagaacaagaccagaagaagaaccgccgacgacagcgccaccagcgactactgccccgcccccaagagactgaagaccaactgctacaacaacggcaaggacagaggcgacgaggaccagagcagagagcagatggccagcgacgtggccaacaacaagagcagcctggaggacggctgcctgagctgcggcagaaagaaccccgtgagcttccaccccctgttcgagggcggcctgtgccagacctgcagagacagattcctggagctgttctacatgtacgacgacgacggctaccagagctactgcaccgtgtgctgcgagggcagagagctgctgctgtgcagcaacaccagctgctgcagatgcttctgcgtggagtgcctggaggtgctggtgggcaccggcaccgccgccgaggccaagctgcaggagccctggagctgctacatgtgcctgccccagagatgccacggcgtgctgagaagaagaaaggactggaacgtgagactgcaggccttcttcaccagcgacaccggcctggagtacgaggcccccaagctgtaccccgccatccccgccgccagaagaagacccatcagagtgctgagcctgttcgacggcatcgccaccggctacctggtgctgaaggagctgggcatcaaggtgggcaagtacgtggccagcgaggtgtgcgaggagagcatcgccgtgggcaccgtgaagcacgagggcaacatcaagtacgtgaacgacgtgagaaacatcaccaagaagaacatcgaggagtggggccccttcgacctggtgatcggcggcagcccctgcaacgacctgagcaacgtgaaccccgccagaaagggcctgtacgagggcaccggcagactgttcttcgagttctaccacctgctgaactacagcagacccaaggagggcgacgacagacccttcttctggatgttcgagaacgtggtggccatgaaggtgggcgacaagagagacatcagcagattcctggagtgcaaccccgtgatgatcgacgccatcaaggtgagcgccgcccacagagccagatacttctggggcaacctgcccggcatgaacagaatcttcggcttccccgtgcactacaccgacgtgagcaacatgggcagaggcgccagacagaagctgctgggcagaagctggagcgtgcccgtgatcagacacctgttcgcccccctgaaggactacttcgcctgcgagtag

SEQ ID NO: 321262 - DNA, 2662 bp, Artificial Sequence
  derived and/or modified sequence
agcgccctgcacggccgccagccggcctcccgccagccagccccgacccgcggctccgccgcccagccgcgccccagccagccctgcggcaggaaagcatgaagggagacaccaggcatctcaatggagaggaggacgccggcgggagggaagactcgatcctcgtcaacggggcctgcagcgaccagtcctccgactcgcccccaatcctggaggctatccgcaccccggagatcagaggccgaagatcaagctcgcgactctccaagagggaggtgtccagtctgctaagctacacacaggacttgacaggcgatggcgacggggaagatggggatggctctgacaccccagtcatgccaaagctcttccgggaaaccaggactcgttcagaaagcccagcttccctgagacggcgggcaacagcatcggcaggaacgccatggccgtcccctcccagctcttaccttaccatcgacctcacagacgacacagaggacacacatgggacgccccagagcagcagtaccccctacgcccgcctagcccaggacagccagcaggggggcatggagtccccgcaggtggaggcagacagtggagatggagacagttcagagtatcaggatgggaaggagtttggaataggggacctcgtgtggggaaagatcaagggcttctcctggtggcccgccatggtggtgtcttggaaggccacctccaagcgacaggctatgtctggcatgcggtgggtccagtggtttggcgatggcaagttctccgaggtctctgcagacaaactggtggcactggggctgttcagccagcactttaatttggccaccttcaataagctcgtctcctatcgaaaagccatgtaccatgctctggagaaagctagggtgcgagctggcaagaccttccccagcagccctggagactcattggaggaccagctgaagcccatgttggagtgggcccacgggggcttcaagcccactgggatcgagggcctcaaacccaacaacacgcaaccagagaacaagactcgaagacgcacagctgacgactcagccacctctgactactgccccgcacccaagcgcctcaagacaaattgctataacaacggcaaagaccgaggggatgaagatcagagccgagaacaaatggcttcagatgttgccaacaacaagagcagcctggaagatggctgtttgtcttgtggcaggaaaaaccccgtgtccttccaccctctctttgagggggggctctgtcagacatgccgggatcgcttccttgagctgttttacatgtatgatgacgatggctatcagtcttactgcactgtgtgctgcgagggccgagagctgctgctttgcagcaacacgagctgctgccggtgtttctgtgtggagtgcctggaggtgctggtgggcacaggcacagcggccgaggccaagcttcaggagccctggagctgttacatgtgtctcccgcagcgctgtcatggcgtcctgcggcgccggaaggactggaacgtgcgcctgcaggccttcttcaccagtgacacggggcttgaatatgaagcccccaagctgtaccctgccattcccgcagcccgaaggcggcccattcgagtcctgtcattgtttgatggcatcgcgacaggctacctagtcctcaaagagttgggcataaaggtaggaaagtacgtcgcttctgaagtgtgtgaggagtccattgctgttggaaccgtgaagcacgaggggaatatcaaatacgtgaacgacgtgaggaacatcacaaagaaaaatattgaagaatggggcccatttgacttggtgattggcggaagcccatgcaacgatctctcaaatgtgaatccagccaggaaaggcctgtatgagggtacaggccggctcttcttcgaattttaccacctgctgaattactcacgccccaaggagggtgatgaccggccgttcttctggatgtttgagaatgttgtagccatgaaggttggcgacaagagggacatctcacggttcctggagtgtaatccagtgatgattgatgccatcaaagtttctgctgctcacagggcccgatacttctggggcaacctacccgggatgaacaggatctttggctttcctgtgcactacacagacgtgtccaacatgggccgtggtgcccgccagaagctgctgggaaggtcctggagcgtgcctgtcatccgacacctcttcgcccctctgaaggactactttgcatgtgaatagttccagccaggccccaagcccactggggtgtgtggcagagccaggacccaggaggtgtgattcctgaaggcatccccaggccctgctcttcctcagctgtgtgggtcataccgtgtacctcagttccctcttgctcagtgggggcagagccacctgactcttgcaggggtagcctgaggtgccgcctccttgtgcacaaatcagacctggctgcttggagcagcctaacacggtgctcattttttcttctcctaaaactttaaaacttgaagtaggtagcaacgtggctttttttttttcccttcctgggtctaccactcagagaaacaatggctaagataccaaaaccacagtgccgacagctctccaatactcag

SEQ ID NO: 321263 - DNA, 1215 bp, Artificial Sequence
  derived and/or modified sequence
atgcccggcttaatgcgcatgcgagaacgctattccgccagcaagcctctaaagggcgctcggattgcaggctgcctgcatatgaccgtggagacggctgtactgatcgagactctggtaactttgggagctgaagtgcagtggtcaagttgtaatatcttcagcacccaggaccatgctgcagcggctatcgcaaaagcaggaatcccagtgtatgcatggaaaggggagacagacgaagagtacttatggtgcatcgaacagacactgtacttcaaagatggacccctcaatatgatcctagacgatgggggggacctgactaatctgattcacacgaaatacccacagttactgccaggaatcaggggaatctccgaagagactacaactggagtacataacttatataagatgatggcgaacggtatattaaaggtgccagctatcaacgttaacgactctgtcaccaaatcaaaatttgataatctttacggctgtcgggaatctcttatcgatgggatcaagcgggctacagatgtgatgatcgctggcaaagttgcagtcgtggctggctacggcgatgtaggtaagggctgtgcccaggccctgcggggtttcggcgccagggttatcattaccgagatcgacccgatcaatgctctccaggccgcaatggagggctatgaggtcacaacgatggacgaagcctgtcaggaggggaacatcttcgtcaccacaaccggctgcattgatatcatcctcggacggcatttcgaacagatgaaagatgatgctatagtctgcaatattggacacttcgatgttgagattgatgttaagtggctgaacgagaacgcagtggagaaagtgaatatcaagccgcaggttgatcgatacaggctgaaaaacggacggcgcattatcctgttggccgagggccgcttggtgaacctgggctgtgccatgggtcacccaagctttgtgatgtctaattcattcactaatcaggtgatggcccaaattgagttgtggactcacccagacaaatatccagtcggagtccactttctcccaaaaaaactcgacgaagctgtggcagaagcacacctggggaagctgaacgtgaagctgacgaagctgacagagaagcaggcccaatacctagggatgtcttgtgacgggccattcaaaccggaccattaccggtactag

SEQ ID NO: 321264 - DNA, 1215 bp, Artificial Sequence
  derived and/or modified sequence
atgcctggcctgatgaggatgagggagcgctacagcgccagcaagcccctgaagggggccagaattgctggctgcctgcacatgacagtggagacagctgtgctgattgagaccctggtgaccctgggcgctgaggtgcagtggagcagctgcaacatcttcagcacccaggaccacgccgccgccgccatcgccaaggccggcatccctgtgtatgcctggaagggggagacagatgaggagtacctgtggtgcatcgagcagaccctgtacttcaaggatggccccctgaacatgatcctggatgatggaggagacctgaccaacctgatccacaccaagtacccccagctgctgcccggcatccggggcatcagcgaggagaccaccactggagtgcacaacctgtacaagatgatggccaacggcatcctgaaggtgcctgccatcaacgtgaatgattctgtgaccaagagcaagtttgacaacctgtatggctgccgggagagcctgattgatggcatcaagagggccacagatgtgatgattgctgggaaggtggccgtggtggccggctatggagatgtgggcaagggctgtgcccaggccctgcggggctttggagcccgggtcatcatcacagaaattgaccccatcaatgccctgcaggccgccatggagggctatgaggtgaccaccatggatgaggcctgccaggagggcaacatctttgtgaccaccaccggctgcatcgacatcatcctgggccgccactttgagcagatgaaggatgatgccatcgtgtgcaacatcggccactttgatgtggagattgatgtgaagtggctgaatgaaaatgctgtggagaaggtgaacatcaagccccaggtggaccgctaccgcctgaagaatggccgccgcatcatcctgctggccgagggccgcctggtgaacctgggctgtgccatgggccaccccagctttgtgatgagcaacagcttcaccaaccaggtgatggcccagatcgagctgtggacccacccagacaagtaccctgtgggcgtgcacttcctgcccaagaagctggatgaagctgtggccgaggcccacctgggcaagctgaatgtgaagctgaccaagctgacagagaagcaggcccagtacctgggcatgagctgtgatggccccttcaagccagaccactaccgctactag

SEQ ID NO: 321265 - DNA, 1215 bp, Artificial Sequence
  derived and/or modified sequence
atgcccggcctgatgcggatgcgggagcggtacagcgccagcaagccacttaagggagctcgcatcgctggttgtctccatatgacagtcgaaaccgctgtgctgatagagactctggtgacgcttggcgccgaagtgcagtggagctcctgcaacatttttagcacccaagaccacgctgccgccgctatagcaaaggcaggcatcccagtctacgcatggaagggagaaactgacgaagagtacctgtggtgtatcgagcaaacactgtacttcaaggatggccctctaaatatgattctggacgatgggggtgacctgaccaacttgatccacactaagtatccccagctgttgcccggcattaggggaatctccgaagaaactaccactggggtgcataacttgtataagatgatggctaacggaatcctaaaagtcccggcgattaacgtcaacgactccgtaacgaaaagtaagttcgataacctatacggctgccgtgagagtctgatcgacgggattaagagagctaccgatgtaatgatagctggtaaagttgcagtagtagccggatatggagacgtgggcaagggttgtgcccaggctctccgtggctttggcgctcgggtgattattacagaaattgacccgatcaatgcactccaggctgccatggaggggtatgaggtcaccaccatggatgaagcttgccaggaaggaaatatcttcgtgacaactacaggatgcatcgacataattctcgggagacacttcgagcagatgaaagatgacgcgatcgtgtgcaatattggtcactttgacgtggagattgacgtcaagtggttaaatgagaacgctgttgagaaggtaaatataaaaccacaggtggacagataccggctgaaaaatggacgcaggatcatcctgctggctgaaggccggcttgttaatctgggctgcgcgatggggcacccatccttcgtgatgtccaacagctttacgaaccaggttatggcccagatagagctatggacgcatcccgataagtacccggttggggtgcatttcctgcccaagaaactggatgaggctgtggctgaggcgcatcttggcaaactcaacgtgaagcttacgaagcttactgagaagcaggcccaatacctcgggatgagttgtgacggccctttcaagcctgaccactatagatattag

SEQ ID NO: 321266 - DNA, 1215 bp, Artificial Sequence
  derived and/or modified sequence
atgcccggactcatgcggatgcgcgaaaggtattccgcttccaagcctctgaaaggcgctaggattgccggatgcctgcatatgaccgtcgaaaccgccgtgctgatcgagactctagtgacactgggagcagaggtgcaatggagctcctgtaatattttttccacccaagatcatgccgcagctgcaattgcaaaagccggaatcccagtgtacgcttggaagggcgaaaccgacgaggagtatctgtggtgtatcgagcaaaccctgtactttaaagatggaccccttaacatgatactagatgacgggggagacctcaccaacttgattcataccaaataccctcagctcttgcccggtatcaggggtatcagtgaggaaacaacaaccggtgtccacaacctctataaaatgatggcaaacggcattttgaaagtacctgccatcaacgtgaatgactccgtgacgaagtcaaagttcgacaacttgtatggctgtagggaaagcctcatcgatggaatcaagcgggctacagacgtgatgatcgcaggcaaggtcgccgtcgtggccggttacggcgacgtaggtaagggctgcgcgcaggcgctcagaggtttcggggctcgagtcattattacagagattgatcccatcaacgcacttcaggcagccatggagggttatgaggtcacaacaatggatgaggcgtgtcaggagggtaacatttttgtcaccaccaccgggtgtatcgatatcatcctaggtcggcattttgaacagatgaaagatgacgcaatcgtgtgtaatattggtcatttcgacgtggagatcgatgtgaaatggctgaatgaaaacgctgtagaaaaagttaacattaaacctcaggtagacagatatcgcctcaagaacggccgacgcatcattctgctggctgaagggaggttggtcaatctgggatgcgccatgggacacccatctttcgtcatgagcaactcctttacaaaccaggtgatggcccagatcgagctatggacacaccctgataagtaccccgtaggggtccacttcctcccaaagaagttggatgaagcagtcgcagaggcacacctcggtaagttgaatgttaagctcaccaaattgaccgaaaagcaagctcaatacctgggcatgtcgtgcgacggcccttttaagcctgatcattaccggtattag

SEQ ID NO: 321267 - DNA, 1215 bp, Artificial Sequence
  derived and/or modified sequence
atgcccggcctgatgagaatgagagagagatacagcgccagcaagcccctgaagggcgccagaatcgccggctgcctgcacatgaccgtggagaccgccgtgctgatcgagaccctggtgaccctgggcgccgaggtgcagtggagcagctgcaacatcttcagcacccaggaccacgccgccgccgccatcgccaaggccggcatccccgtgtacgcctggaagggcgagaccgacgaggagtacctgtggtgcatcgagcagaccctgtacttcaaggacggccccctgaacatgatcctggacgacggcggcgacctgaccaacctgatccacaccaagtacccccagctgctgcccggcatcagaggcatcagcgaggagaccaccaccggcgtgcacaacctgtacaagatgatggccaacggcatcctgaaggtgcccgccatcaacgtgaacgacagcgtgaccaagagcaagttcgacaacctgtacggctgcagagagagcctgatcgacggcatcaagagagccaccgacgtgatgatcgccggcaaggtggccgtggtggccggctacggcgacgtgggcaagggctgcgcccaggccctgagaggcttcggcgccagagtgatcatcaccgagatcgaccccatcaacgccctgcaggccgccatggagggctacgaggtgaccaccatggacgaggcctgccaggagggcaacatcttcgtgaccaccaccggctgcatcgacatcatcctgggcagacacttcgagcagatgaaggacgacgccatcgtgtgcaacatcggccacttcgacgtggagatcgacgtgaagtggctgaacgagaacgccgtggagaaggtgaacatcaagccccaggtggacagatacagactgaagaacggcagaagaatcatcctgctggccgagggcagactggtgaacctgggctgcgccatgggccaccccagcttcgtgatgagcaacagcttcaccaaccaggtgatggcccagatcgagctgtggacccaccccgacaagtaccccgtgggcgtgcacttcctgcccaagaagctggacgaggccgtggccgaggcccacctgggcaagctgaacgtgaagctgaccaagctgaccgagaagcaggcccagtacctgggcatgagctgcgacggccccttcaagcccgaccactacagatactag

SEQ ID NO: 321268 - protein, 958 aa, Artificial Sequence
  derived and/or modified sequence
MSRSLDGAEFSRPASVSENHDAGPDGDKRDEDGESGGQRSEAEEGEVRTPTKIKELKPEQETTPRHKQEFLDKPEDVLLKHQASINELKRTLKEPNSKLIHRDRDWERERRLPSSPASPSPKGTPEKANESQRTQDISQRDLVPEPGAAAGLEVFTQKSLAASPEGSEHWVFIEREYTRPEELGLLKVTTMQQEERQAGLAGILANGRLSKVDVLVDKFKVEVATEEMVGNRRANTQQQGKMIASPEDFESVGEEGPWIRESPGGAALASGRTLAEKLLEGSELRADTREATIRNRCMSDGQPEGQTELRKGLEEPHTCGRPTAPGTRPAEVDVLSPASDKGGLQSFLLDPAHAEARAELSNETDTSFAERSFYLNYEEKDSEDQVLPPPLEERKGRLDAPPGGEPRPTLNSLDLRVSAAASSRSKDEAHMTSPKEGAGTPKNHGGPGDLKGSPAGQTFAEGWEDAQWGVEGEFPHLTASAAREEGTPVSGDLLGKAEESPTEELKKHPPHRGQGVHPDPQACALPRAIPLNVRKPVKPDRGNFPPKERGVVPTQKGGAELKDREASAFLHMEVIIPLPASPGHSEDLAALEEASPSPTSHGSGEPSELREPFLRHVHLSKASPEPKDQVGFVVSPATGGERRPPPITSRKPRVVPEEAEGRIPLGFGFPSGKRREMTSFQAGDQEGSLEDISKTSVANKIRIFETHGAETRRMSEGEARSLPNDVSSEAPVGQAEQQRSTLSDLGFAQLQPPGDFASPKATHSTVIPLATRHFREDTSASYQEAHTELEPVSPNSGCETTLAEATGTGNKSGDAVREEKRSTNLAANTPGKGGRLRFASPSGPQRAGLREGSEEKVKPPRPRAPESDTGDEDQDQERDTVFLKDNHLAIERKCSSITVSSTSSLEAEVDFTVIGDYHGSAFEDFSRSLPELDRDKSDSDTEGLLFSRDLNKGAPSQD

SEQ ID NO: 321269 - DNA, 114 bp, Artificial Sequence
  derived and/or modified sequence
atggaagagaaggattacagtgaagcagatggactctccgaaagaacaacaccaagcaaggcacagaaatctccccagaagatcgccaaaaagtacaaatcagccatctgctag

SEQ ID NO: 321270 - DNA, 114 bp, Artificial Sequence
  derived and/or modified sequence
atggaggagaaggactacagcgaggctgatggcctgtctgagaggaccacccccagcaaggcccagaagagcccccagaagatcgccaagaagtacaagagcgccatctgctag

SEQ ID NO: 321271 - DNA, 114 bp, Artificial Sequence
  derived and/or modified sequence
atggaggagaaggactacagcgaggccgacggcctgagcgagcggaccacacctagtaaagcacagaagtcaccccaaaaaatcgctaaaaagtacaaaagcgcaatctgttag

SEQ ID NO: 321272 - DNA, 114 bp, Artificial Sequence
  derived and/or modified sequence
atggaagaaaaagactattccgaagctgacggtctctcagaacgcacaacaccctcaaaggctcagaaaagtcctcaaaaaatagcaaagaaatataaaagcgcgatctgctag

SEQ ID NO: 321273 - DNA, 114 bp, Artificial Sequence
  derived and/or modified sequence
atggaggagaaggactacagcgaggccgacggcctgagcgagagaaccacccccagcaaggcccagaagagcccccagaagatcgccaagaagtacaagagcgccatctgctag

SEQ ID NO: 321274 - DNA, 210 bp, Artificial Sequence
  derived and/or modified sequence
ctttcagatgctatcttgggctcgctgaacacgggtgcctgactgacagaagttcttgcccccggggagctggtgtggacagaggagggagcctagacatggaggagaaggactacagtgaggccgatggcctttcggagaggaccacgcccagcaaggcccagaaatcgccccagaagattgccaagaaatacaagagtgccatctgcc

SEQ ID NO: 321275 - protein, 257 aa, Artificial Sequence
  derived and/or modified sequence
MEEKDYSEADGLSERTTPSKAQKSPQKIAKKYKSAICRVTLLDASEYECEVEKHGRGQVLFDLVCEHLNLLEKDYFGLTFCDADSQKNWLDPSKEIKKQIRSSPWNFAFTVKFYPPDPAQLTEDITRYYLCLQLRADIITGRLPCSFVTHALLGSYAVQAELGDYDAEEHVGNYVSELRFAPNQTRELEERIMELHKTYRGMTPGEAEIHFLENAKKLSMYGVDLHHAKDSEGIDIMLGVCANGLLIYRDRLRINRF

SEQ ID NO: 321276 - protein, 37 aa, Artificial Sequence
  derived and/or modified sequence
MEEKDYSEADGLSERTTPSKAQKSPQKIAKKYKSAIC

SEQ ID NO: 321277 - protein, 199 aa, Artificial Sequence
  derived and/or modified sequence
MEEKDYSEADGLSERTTPSKAQKSPQKIAKKYKSAICRVTLLDASEYECEVEKHGRGQVLFDLVCEHLNLLEKDYFGLTFCDADSQKNWLDPSKEIKKQIRSSPWNFAFTVKFYPPDPAQLTEDITRYYLCLQLRADIITGRLPCSFVTHALLGSYAVQAELGDYDAEEHVGNYVSELRFAPNQTRELEERIMELHKTY

SEQ ID NO: 321278 - DNA, 8421 bp, Artificial Sequence
  derived and/or modified sequence
agtcggcatccatcagcgggcgggggtgtcgccgaacaggctgctccgcagagcccgccgcgaccccgcgccgccccgccccgcggcctgcctgccagaggagccgagggggccgcccctcgcccaacctgcccgacatggggaaccccgggcccaggcgtgctggtcaccatgacaacagagacaggccccgactctgaggtgaagaaagctcaggaggaggccccgcagcagcccgaggctgctgccgctgtgaccacccctgtgacccctgcaggccacggccacccagaggccaactccaatgagaagcatccatcccagcaggacacgcggcctgctgaacagagcctagacatggaggagaaggactacagtgaggccgatggcctttcggagaggaccacgcccagcaaggcccagaaatcgccccagaagattgccaagaaatacaagagtgccatctgccgggtcactctgcttgatgcctcggagtatgagtgtgaggtggagaaacatggccggggccaggtgctgtttgacctggtctgtgaacacctcaacctcctagagaaggactacttcggcctgaccttctgtgatgctgacagccagaagaactggctggacccctccaaggagatcaagaagcagatccggagtagcccctggaattttgccttcacagtcaagttctacccgcctgatcctgcccagctgacagaagacatcacaagatactacctgtgcctgcagctgcgggcagacatcatcacgggccggctgccatgctcctttgtcacgcatgccctactgggctcctacgctgtgcaggctgagctgggtgactatgatgctgaggagcatgtgggcaactatgtcagcgagctccgcttcgcccctaaccagacccgggagctggaggagaggatcatggagctgcataagacatatagggggatgaccccgggagaagcagaaatccacttcttagagaatgccaagaagctttccatgtacggagtagacctgcaccatgccaaggactctgagggcatcgacatcatgttaggcgtttgtgccaatggcctgctcatctaccgggaccggctgagaatcaaccgctttgcctggcccaagatcctcaagatctcctacaagaggagtaacttctatatcaagatccggcctggggagtatgagcaatttgagagcacaattggctttaagctcccaaaccaccggtcagccaagagactgtggaaggtctgcatcgagcatcatacattcttccggctggtgtcccctgagcccccacccaagggcttcctggtgatgggctccaagttccggtacagtgggaggacccaggcacagactcgccaggccagcgccctcattgaccggcctgcacccttctttgagcgttcttccagcaaacggtacaccatgtcccgcagccttgatggagcagagttctcccgcccagcctcggtcagcgagaaccatgatgcagggcctgacggtgacaagcgggatgaggatggcgagtctggggggcaacggtcagaggctgaggagggagaggtcaggactccaaccaagatcaaggagctaaagccggagcaggaaaccacgccgagacacaagcaggagttcttagacaagccagaagatgtcttgctgaagcaccaggccagcatcaatgagctcaaaaggaccctgaaggagcccaacagcaaactcatccaccgggatcgagactgggaacgggagcgcaggctgccctcctcccccgcctccccctcccccaagggcacccctgagaaagccaatgagtcccagaggacccaggacatctctcagcgggacttggtacctgagcctggagcagccgcaggcttggaagtgttcactcagaaaagcctcgcagcatctcctgagggttcagagcattgggtatttatagaaagagagtacactaggccagaagagctcggtctcctaaaagtgaccaccatgcagcaggaagaaaggcaggcaggccttgctggtatccttgccaacggcagactctccaaggtagacgttctggtggacaagttcaaagtggaagtggccacagaagaaatggtgggaaacagaagagcaaacacccagcaacaaggaaaaatgattgcaagtcctgaagactttgagtcagtgggggaggaaggcccctggatcagggaaagcccaggaggggctgccctggcttccggccgcacattggcagaaaagctcctcgagggctctgagctcagggcagacaccagagaggcaaccatcaggaaccgctgcatgtcagatggtcagccggagggccagacagagctgaggaaggggctggaggagcctcacacttgtgggagacccactgctccagggaccaggccagcagaggtggacgtcctctctccagcctccgacaagggaggactccagtcgtttctattggatccagcccacgcagaagccagagctgagttgagcaatgaaactgatacttcctttgcagagaggagcttctatttaaattatgaagaaaaagactcagaagaccaagtcctccctccacccctggaggagagaaaagggcgcctggatgcccctcccggaggtgagcccaggccgacgctgaattccttagacctgagggtttctgctgctgcttccagcaggagcaaggacgaagcccacatgacttccccaaaggaaggggcagggacccccaagaaccatggaggacctggtgacctgaagggatctcccgcaggacagacgtttgctgaaggctgggaagatgcccagtggggagtggaaggagagtttccccacctgacagccagcgcagcccgagaggaagggacccccgtgagtggagatttgctgggaaaggctgaggaaagtcccacagaggaactgaagaagcaccctcctcacagaggacagggcgtgcatcccgacccccaggcctgcgcccttcctcgggccatccctctgaatgtcaggaagccagtcaaaccagacagaggcaacttcccacccaaagagaggggagtggttcccacccagaaaggaggggctgagctgaaggaccgcgaggcttcagcatttcttcacatggaggtgatcattcccctgccagcctcccctggtcattctgaggacctggcagctctggaggaagcttctccaagcccaacctcccatgggtcaggggagccttcggagctcagggagccctttcttagacatgtccatctttcgaaagccagcccagagcccaaggaccaagtagggtttgtggtgtcccctgccacaggaggtgagcgcaggcctcctcccatcaccagcagaaagcccagagtagtccctgaagaagctgaggggcgcatacctctggggtttgggttcccttcagggaagcgaagggagatgacctctttccaggctggggaccaagagggctccctagaagatattagcaagacctcagtggccaacaaaattcggatatttgagacccacggagctgaaactcgccgaatgagtgagggtgaagcaaggtcccttccaaatgacgtatcttcagaggcacccgtgggacaagcagagcagcagcggagtacgctctcagacctgggcttcgcccaactccagcccccaggggactttgccagccccaaagccacacattccacagtgatacctctggctaccagacacttcagggaggacacttctgcatcctaccaggaagcacacacggaactagagcccgtgtcccccaattcaggctgtgaaaccacgctggcagaagctactggaactgggaacaaatccggagatgcggtcagggaagagaagcgctccaccaacttagcagccaacacccctgggaagggggggcgcctgagatttgccagcccctcgggccctcagagagcagggctgagggagggctccgaggagaaagtcaaaccaccacgtccccgggccccagagagtgacacaggcgatgaggaccaggaccaggagagggacacggtgttcctgaaggacaaccacctggccattgagcgcaagtgctccagcatcacggtcagctctacgtctagcctggaggctgaggtggacttcacggtcattggtgactaccatggcagcgccttcgaagacttctcccgcagcctgcctgagctcgaccgggacaaaagcgactcggacactgagggcctgctgttctcccgggatctcaacaagggggcccccagccaggatgatgagtctgggggcattgaggacagcccggatcgaggggcctgctccaccccggatatgccccagtttgagcccgtgaaaacagaaaccatgactgtcagcagtctggccattagaaagaagattgagccggaggccgtactgcagaccagagtctccgctatggataacacccagcaggttgatgggagtgcctcagtggggagggagttcatagcaaccactccctccatcaccacggagaccatatcgaccaccatggagaacagtctcaagtccgggaagggggcagctgccatgatcccaggcccacagacggtggccacggaaatccgttctctttctccgatcatcgggaaagatgtcctcaccagcacctacggcgccactgcggaaaccctctcaacctccaccaccacccatgtcaccaaaactgtgaaaggagggttttctgagacaaggatcgagaagcgaatcatcattactggggatgaagatgtcgatcaagaccaggccctggctttggccatcaaggaggccaaactgcagcatcctgatatgctggtaaccaaagctgtcgtatacagagaaacagacccatccccagaggagagggacaagaagccacaggaatcctgacctctgtgaagagatcctggcatttctggtccaacccaagccagagaaccattaagaaggggccttcattctggattctccgacgcaacactgacgtcccagctgcgacgtactgtcactgatgagagactgggaagggaaaagcatatatatatagatatatagagatatagatatatatacaggaaacaccgcatccttgcactgctgctggggctggcagagcagttggctgacagcaacaaccgacatctgaacacctacatttcctttgcagacaaattgaagaactggtgggatttttttcaagaaaaaaaattatataataactataatcccttgctcacccctttcccccgccaaataagaaacgcaagccagaccacgatgattgtagaagtccctcccgccctggttctgcacgttacagttagcagacgagcaattccatttgttcttctccagcatctctaaggcccacttgaatgcaaaggaaaacacttgcacagcaaagcaagagaagtcacagcagcaagacacgcacagtcaaccattttccgagaaaaaaagaaaattccccacttggaaagaaagaggaggaacactggattcttactttctggatcttgacactgggctgcaaaacctaccttcctctctcccgcctcccctcaccctcaactctcaatgtcttgctgtcattttctgtctcggctccctcctcccccttcccccttcccccaccccacacccttcaccctctgtgtcctggtccttctgagggccactgcagatgactctcctttgaaatgagaaaaagaaaagaaagcaagaacagaaaacgaagccacaggaagggaagtagacattgtatgcttatggtttctcattatgaaggtgcagcttgtaggaggtttgtacggatgtgctttgaagttatgtatattacatataacaggaaaaaatattaaaataaacagtgctggtaagtatgaagctgacattctaaaattataattatctgactgtgattgatgtatcctgaggttcctagatctcactgaactggcccagctaaggagacctggactctgggtgtgggttggctcacagtaggggctgacgggttcagtgtagtaatactgtgtgtggtgtttgtaattggttgattggtggggaggggtggggggccctaatggagaggtgtgggtttggcaagaaagaagcaacacagatgtcgtccccaaaatgccagttcaagacaccttctccctgcccccctggtagtaacagtcagggcctggtctgtgctcaggtactgggtcccagtctgggactctgctgctgaagttgccacagtagaggtccctggcttagtccttatctccctacggggcttgccttggttttcagtcttctctctctttctctcttttttttttttttgccacattctgcccttccctgaccccattgtaataaccaactccatatccaaagggaggtggtgctctcagccattgtagaagatggtggctttaacctgactgtctaaaaattcccagctaagccttttcctctactctcttccttgttctgaatcatttcttcttctcaggccaaagtagccatggtaaggaggcttcatggggcagaccctgaaagatcaaaactgcatttgcaaagccctcccctgtcccaggacaaagctgagactgacgggtgatgttgctcataggctccagctctgcataagaccttggcttggagacctccctctcagtcaacagctgaactctgagcttgtgcccagaaattaccccaagaccacaggaacccttcaagaagctcccatcacaagcttggcattgctctctgccacacgtgggcttcctcaggcttgtctgccacaagctacttctctgagctcagaaagtgccccttgatgagggaaaatgtcccactgcactgcgaatttctcagttccattttacctcccagtcctccttctaaaccagttaataaattcattccacaagtatttactgattacctgcttgtgccagggactattctcaggctgaagaaggtgggaggggagggcggaacctgaggagccacctgagccagctttatatttcaaccatggctggcccatctgagagcatctccccactctcgccaacctatcggggcatagcccagggatgcccccaggcggcccaggttagatgcgtccctttggcttgtcagtgatgacatacaccttagctgcttagctggtgctggcctgaggcagggcaggaaatcagaatagcatttgcttctctgggcaaatgggaagttcagcggggcagcagaatcagtggcattccccctggtgcaggccggtgggtccactccaactccccctgagtgtagcagcacactttccatacaccaggttctttctacaatcctggtggaaaagccacagaaccttcttcctgcccttcttgagagttccccctctttctgggtcaagagctggagtggtggctccatcctctctgggccacttcggtctaggaactcatctttgcaggaaccaggagtcctgagcacactgaacacacctcagagggaggatccttgttgtggattttgcacctggctttggggcaggggtgaagtgaccaggcttagcttgtggagtttatgggccaccagggtttggggaaatcaccatcccgcggatgctgtgacctcccttctacggagatgcaggcagtgccacgagggaggaggggacctgcaaagctagaatctagggcactgtttcctccccatccttctctttgtagagaatagagacgtttgtcttgtctgtcttcaacctacttttccttttctcttttttgtttctcatcctctctgtgccacctctccacccaggaggccatgtagcatagtggaaaaagtccctgagggcggttaggagttctgggtgaccatcctggctcagctcctaactcaccatgtgacatcaggctatccccattccccctcttgggcctcagtttcccgacttgcaaaataagcagaaagaaccagatgctctccagggtctttttctactttgctatctcatgggtcttcattttctcttattttgttttctctggatcttttccatctgagggtacaggaagtaccaggacctgtttcagtttttgaatcctgcaagcacattccaagactggcctgaaactgcatgagcaacatcactcgaaataattttttttttcaaaagcaccttaacaaccaattgcgatgctgtcctgttcctttttactcacacccttctctcctttctcgtccccatgctcccccacctcagtgctccgtgctgtatgcgtgtgctctctgttcttgtatactcaatataagtgaaataaatgtgtttgatgctgaaccata

SEQ ID NO: 321279 - DNA, 2877 bp, Artificial Sequence
  derived and/or modified sequence
atgtcgagatcattggatggtgctgaattctcacggccagccagtgttagtgagaatcacgatgctgggcctgatggtgacaaaagagatgaggacggggagtccgggggccagcggtctgaggccgaggaaggagaagttcggacccctactaaaatcaaagagttgaaaccagaacaagagacaactccgcgccataagcaggaatttctggataagccagaggatgtgctgctgaaacatcaggcttcgataaatgagctcaagcgaacactgaaagaacccaatagcaagctgatccatcgcgacagagattgggaaagggagcgccggctccctagcagcccagcttccccttctccgaaggggacccccgagaaggctaacgaaagtcagagaacacaggatatctcgcagcgcgacctggtacccgagcccggggccgcggccgggttggaagtattcacacagaaatcccttgccgcaagccccgagggcagtgagcactgggtctttatcgaaagagaatacacacgacccgaagaactgggcttgcttaaagttacaacgatgcagcaggaggagaggcaggcaggcctggccggaatcttagctaacggccgtttatccaaggtggacgttttggtagataaattcaaagtagaagttgctaccgaggagatggtcggaaatcgaagggctaacacgcaacagcagggtaagatgatcgcctcacctgaggacttcgagtcagtaggtgaagagggaccgtggatcagggagtcacctgggggggcggccctggctagtggtagaacgctagccgaaaagttgctggaaggctctgaactgagggcggacacccgtgaagccactatacgaaacagatgcatgtctgatggccagcctgagggccaaaccgaactccgtaagggcctggaagaaccgcacacctgcgggaggcccaccgcacccggaacccgacccgctgaagtggacgtactgtctcctgctagcgacaagggagggctgcaatctttcctgctggatcctgcacatgccgaggcgcgcgcggagctgtccaacgagacagatacctccttcgccgagcgtagcttctatcttaactatgaggagaaagactctgaggaccaggttctgccaccccccctggaagagcgaaaggggagactggatgcacctcctggaggtgagcctcgccctacgctgaactctctcgacttgcgagtttctgccgcagctagcagccggtcaaaagacgaggcacatatgacctcccctaaggaaggggctggtacacccaaaaatcacgggggaccaggtgatctgaaaggatctcccgctggtcagacatttgctgagggctgggaagatgcacagtggggggtagaaggcgaatttcctcaccttacagctagtgccgcacgagaggaaggaacgccggtatccggagatctgttagggaaggctgaggagtctcccactgaagagctgaaaaagcatcctcctcacagaggtcaaggtgtccatcccgaccctcaagcctgtgctctgcccagggccatcccactcaacgtgcgaaaacccgtaaaaccggatcgcggtaactttccgccaaaagagcggggcgtggtccctacgcagaagggtggcgcagagctcaaagatcgagaggcttctgcttttctgcacatggaggtaattattccactgcccgcctcaccaggtcactcagaggatctcgcagcactggaggaggcatctcccagtcctacctctcatgggtctggggagccttccgagcttcgagaaccattcctaagacacgtgcacctgagcaaagccagcccagaacccaaagatcaggtgggcttcgtcgtgtcacccgccaccgggggagagcgccggcccccgcctatcacttcccggaagccccgtgtggttcccgaggaggccgaaggccggatcccacttggtttcggattcccctccggtaagcgcagagaaatgacaagcttccaggccggagaccaggaagggtccctagaggacatctcaaaaacctccgtggctaacaagatccgcatcttcgagacacacggggctgaaacccgcaggatgtcagaaggtgaagctcgcagcttgcccaacgacgtgtctagcgaggcacccgtgggccaagcggagcagcagcggtccacactgtctgaccttggtttcgcacaacttcagccaccaggggacttcgcctctcctaaggctacacactcaaccgtaatacctctcgcgacccggcattttagagaggacacaagtgcaagctaccaggaggctcataccgagctcgagcctgtttcaccaaattccgggtgtgaaaccacactggccgaggccacgggtactggcaacaaaagtggagatgcagtgagagaggagaagcggtccacaaacctcgccgcaaacacacccggcaaaggtgggcgccttagattcgcctcgccctccgggccacagcgggctggtctgcgggaaggaagtgaagagaaggtaaaacccccgcggcctcgcgcccctgaaagcgacaccggcgacgaagatcaagaccaagaacgcgatacagttttcttaaaggacaaccacctcgccatagagcgcaaatgtagcagcattactgtgagctccacctcaagtctcgaggctgaagtggatttcacagtgataggggactaccacggtagcgcgttcgaggacttcagccgttccctccctgagctagatagagataagagtgactcggacacagagggactgctgttcagccgcgatttaaacaagggcgccccaagccaggactag

SEQ ID NO: 321280 - DNA, 2877 bp, Artificial Sequence
  derived and/or modified sequence
atgagccgcagcctggatggagctgagttcagcaggcctgcctctgtgtctgagaaccatgatgctggcccagatggagacaagagagatgaagatggagagagcggcggccagaggtctgaggccgaggagggggaggtgaggacccccaccaagatcaaggagctgaagccagagcaggagaccacccccaggcacaagcaggagttcctggacaagccagaagatgtgctgctgaagcaccaggccagcatcaatgagctgaagaggaccctgaaggagcccaacagcaagctgatccaccgggaccgggactgggagcgggagcggcggctgcccagcagccctgccagccccagccccaagggcaccccagagaaggccaatgaaagccagaggacccaggacatcagccagagggacctggtgcctgagcccggggctgctgctggcctggaggtgttcacccagaagagcctggccgccagccctgagggcagcgagcactgggtgttcatcgagcgggagtacaccaggcctgaggagctgggcctgctgaaggtgaccaccatgcagcaggaggagcggcaggccggcctggccggcatcctggccaacggccgcctgagcaaggtggatgtgctggtggacaagttcaaggtggaggtggccacagaggagatggtgggcaacagaagagccaacacccagcagcagggcaagatgattgccagcccagaagattttgaatctgtgggggaggagggcccctggatccgggagagccctggaggagctgccctggccagcggccgcaccctggccgagaagctgctggagggcagcgagctgcgggctgacacccgggaggccaccatccggaaccgctgcatgtctgatggccagcctgagggccagacagagctgaggaagggcctggaggagccccacacctgtggccggcccacagcccctggcaccaggcctgctgaggtggatgtgctgagccctgccagtgacaagggcggcctgcagagcttcctgctggaccctgcccacgccgaggcccgggcagagctgagcaatgaaacagacaccagctttgctgagaggagcttctacctgaactatgaggagaaggacagcgaggaccaggtgctgcccccacccctggaggagaggaagggccgcctggatgcccctcctggaggagagccccggcccaccctgaacagcctggacctgcgggtgtctgctgctgccagcagccgcagcaaggatgaggcccacatgaccagccccaaggagggcgccggcacccccaagaaccacggcggccctggggacctgaagggcagccctgctggccagacctttgctgagggctgggaggatgcccagtggggcgtggagggggagttcccccacctgacagccagcgctgcccgggaggagggcacccctgtgtctggggacctgctgggcaaggccgaggagagccccacagaggagctgaagaagcaccccccccaccggggccagggcgtgcacccagacccccaggcctgtgccctgccccgggccatccccctgaatgtgaggaagcctgtgaagccagaccggggcaacttcccccccaaggagcggggcgtggtgcccacccagaagggcggcgctgagctgaaggaccgggaggccagcgccttcctgcacatggaggtgatcatccccctgcctgccagccctggccacagcgaggacctggccgccctggaggaggccagccccagccccaccagccacggcagcggggagcccagcgagctgcgggagcccttcctgcggcacgtgcacctgagcaaggccagccctgagcccaaggaccaggtgggctttgtggtgtccccagccaccggcggggagcggcggcccccacccatcaccagcaggaagccccgggtggtgcctgaggaggccgagggccgcatccccctgggcttcggcttccccagcggcaagaggcgggagatgaccagcttccaggccggggaccaggagggcagcctggaggacatcagcaagacctctgtggccaacaagatccgcatctttgagacccatggagctgagaccaggaggatgtctgagggggaggcccggagcctgcccaatgatgtgagcagcgaggcccctgtgggccaggccgagcagcagaggagcaccctgagtgacctgggctttgcccagctgcagcccccaggggactttgccagccccaaggccacccacagcaccgtcatccccctggccaccaggcacttccgggaggacaccagcgccagctaccaggaggcccacacagagctggagcctgtgagccccaacagcggctgtgagaccaccctggccgaggccaccggcaccggcaacaagtctggagatgctgtgcgggaggagaagaggagcaccaacctggccgccaacacccctgggaagggcggccgcctgcgctttgccagccccagcggcccccagagagctggcctgcgggagggcagcgaggagaaggtgaagccaccccggccccgggcccctgagagtgacacaggagatgaggaccaggaccaggagcgggacaccgtcttcctgaaggacaaccacctggccatcgagaggaagtgcagcagcatcaccgtgagcagcaccagcagcctggaggccgaggtggacttcaccgtcatcggggactaccacggcagcgcctttgaggacttcagccgcagcctgcctgagctggaccgggacaagagtgacagcgacacagagggcctgctcttcagccgggacctgaacaagggggcccccagccaggactag

SEQ ID NO: 321281 - DNA, 2877 bp, Artificial Sequence
  derived and/or modified sequence
atgagccggagcctggacggcgccgagttcagccggcccgccagcgtgtcagaaaatcacgacgctggcccagacggggacaaacgtgacgaagatggggagagcgggggccaaagatcagaagcggaggagggcgaagtaagaacacctaccaagatcaaggagttgaaacctgagcaagagacgactcccagacacaaacaggagttcttggataaaccagaggacgtgctcctgaaacaccaagccagcattaatgagctgaaaagaacgttgaaagaaccgaacagtaagctcatccaccgtgatagagattgggagcgcgaacgaaggcttcccagctcccctgcctcacctagcccaaagggcacaccagagaaagcaaatgagtcccaacgaacgcaggatatttcccagcgcgacctggttcccgagcctggggctgcagccggtttggaggttttcactcagaaatctttggccgcttccccagagggatccgagcactgggtgtttatcgagcgggaatatactaggccggaggagctcggccttctcaaagtgactaccatgcagcaggaggaacgccaagctggcctcgccgggattctggcaaacgggaggctatcaaaggtcgatgtgctagtggataagttcaaggttgaggtggcaaccgaggaaatggtggggaatagaagagcgaatactcaacagcaaggaaagatgatcgcctctccagaagattttgaatcagtgggagaggaaggtccttggataagagaatcaccaggaggagcagctttagcaagtgggagaaccttggccgaaaagctgctcgaaggttcagagctgagggccgacacccgggaggctaccatccggaaccggtgcatgagcgacgggcaaccagaggggcagaccgaattacggaaaggtttggaagagcctcacacgtgtggacggccgacggcccccggtacaaggcctgcagaagtggacgtcctgtccccggcctccgacaagggtggactgcaatcttttctgcttgaccctgcccatgctgaagctcgcgcggaactcagtaatgaaactgatactagctttgccgagcgaagcttctatcttaactacgaggagaaggattccgaagaccaggttctccctccacccttggaagagcgcaaaggtcgcttggacgcccccccagggggtgagcctcgtccaacccttaactctttagacctgcgggtgtctgcagccgcatcttcccggtcgaaggatgaggcccatatgacgagccccaaagaaggggccgggacccctaagaaccacggtggccctggcgacttgaaggggtccccggccggtcagacattcgctgagggatgggaggacgcgcagtggggagtagaaggagagtttccccacctgactgcctctgctgcaagggaggagggcactcctgttagtggcgacttactcggcaaggccgaggagagccccacagaggagttaaagaagcatcctccccaccggggccaaggcgtgcacccagatccccaggcctgcgcactgccccgggcaattcccctcaacgttcgcaagccagtcaaaccagaccggggaaactttccaccaaaggaacggggagtggttcccacacaaaaggggggagcagagttaaaggaccgcgaggcctcagccttcctgcacatggaagtgattatccctctcccggcttcacccggacatagtgaggacttggctgccttggaggaggccagtccttccccaaccagtcatggctctggggagccaagcgagctgcgagagccattcctgaggcatgtacatctcagcaaagcttcaccagagcctaaggaccaggtcgggttcgtagtatcacccgcaaccggaggggaaagacggcctcctccaattacttctaggaagccaagggttgtccccgaggaagcggaaggacgaattcccctgggctttggtttccctagcggaaaacgccgcgaaatgactagcttccaggcaggggatcaagaaggaagcttagaggacatctccaaaacatctgtggccaacaagatccgtatatttgaaacccatggcgctgagaccagaaggatgtcggaaggcgaggcccgaagcctgcccaacgatgtttcatccgaggcgccagtaggtcaggctgaacagcagcgtagtacgttgagcgatctgggcttcgcccagctacaaccgcctggagatttcgcctctcccaaggcaacgcactctaccgttatccccctcgcgactcgacactttagggaggacaccagtgccagctatcaggaagcccacaccgaactcgagcccgtttctccaaacagcggatgtgaaactacactggctgaggctactggcaccggaaacaaatcaggggacgctgtgagggaggaaaagcggagcaccaacctggcagccaatacgcctggaaaaggagggagactgcgcttcgcctcccccagtgggccacaaagagcagggcttcgggaaggctccgaggaaaaggtgaagcccccccgcccacgagcaccagagagtgacacaggggacgaggaccaagatcaggaacgggatactgtttttctcaaagacaatcacttggccattgagcgtaagtgtagctctatcaccgtgtccagcacttcgtctctagaggccgaagtggacttcacggtgataggcgattaccatggatcagcttttgaggattttagtaggtccctgcccgaacttgaccgcgacaaatcagattctgatactgaaggattgttatttagtcgcgacctgaacaaaggtgcaccaagtcaggactag

SEQ ID NO: 321282 - DNA, 2877 bp, Artificial Sequence
  derived and/or modified sequence
atgagtcgctccctcgatggcgctgaattcagccgcccagccagcgtgagcgaaaaccatgacgccggtcctgacggggataagcgggatgaggacggggagagcggcggacagagaagtgaggccgaagagggtgaggtccgcaccccgacaaagataaaagagctgaagcccgaacaggaaactactcctagacataagcaggaatttctggacaagcccgaggacgtgcttctgaagcatcaggcatcaatcaacgaactcaagcggacactgaaggaaccaaacagcaaactgattcatcgggaccgagattgggagagggaaagacgtttgccaagtagccctgcctcaccaagccccaaggggacacctgaaaaggccaacgagtcccaaaggacacaggacattagccagcgagacctcgttcccgaacctggcgcagcagcaggactagaggtgtttacacaaaagtcactggccgcaagccccgagggcagtgaacactgggtcttcattgagagggagtacaccaggcctgaggagctcggcctcttgaaagtgactacaatgcagcaggaggagagacaggctggattagctggaattctcgccaatgggaggctaagcaaagtggatgtgctagtagacaaatttaaggtggaggttgccaccgaagaaatggtcggaaaccgaagagcaaatactcaacaacagggaaaaatgatcgcaagccccgaagatttcgaatccgtgggagaggagggaccctggatcagagaatcccccggaggcgcagcgcttgccagcggtagaactttggcagagaaattgctggagggctccgagctaagagccgatacccgggaggccaccattagaaacaggtgcatgagcgatggtcagccagagggtcaaacggagttacggaagggactggaggagccacatacctgcgggaggccaaccgcgcctgggacacgcccagcagaggtagatgttttgtctcccgcttctgacaagggagggctgcagagctttctccttgacccggctcacgccgaggctcgtgctgagttaagcaacgagactgatacctcattcgctgaaaggagtttctatctgaattatgaggagaaagattcagaagaccaggtcctgcctcctccgttggaggagcgcaagggcaggctggatgcacccccaggcggagagcctcggcctactctcaactctcttgacctccgggtgtcagctgcagccagcagccggtccaaagatgaggctcacatgacctcccctaaggaaggagccggaactcccaaaaaccacggaggtcccggagacctaaaaggttctccggcaggccagacatttgctgagggctgggaggatgcgcaatggggggttgaaggcgagttcccgcatttgactgcatctgcggcaagggaggaggggacccccgtgagcggtgatttactaggcaaggcggaggagtctcccaccgaagagctgaagaagcacccgcctcatcgtggccagggagtacatcctgacccacaggcatgcgctcttcctagagcgatacctcttaatgtccggaaaccagtgaagcccgaccgcggaaatttccctcccaaagagcgaggcgtggtccccactcagaaaggtggtgccgaactcaaggacagggaagccagtgcctttctgcacatggaagtgatcattccacttccagcatcccctgggcatagtgaggatctggctgcgcttgaggaggcctccccaagccccacatcacacgggtctggcgagccaagtgagctccgcgaaccgttcttgcgtcatgttcacttatctaaggcttccccggagcccaaggaccaggtcggcttcgtcgtgagcccagcaaccggtggggaacggcgacctccaccaatcacatccaggaagccccgagttgtccctgaagaggccgaaggtcgtatcccccttggctttggcttcccatctggaaagcgtcgcgagatgacaagcttccaagccggagatcaagagggatctctggaagatatttcaaaaacatctgtcgcaaacaagattaggattttcgaaactcacggcgcagaaaccagacgtatgagcgagggtgaggctcgctctctacccaacgacgtgagcagcgaggcacctgttggtcaggccgaacagcagcgcagcacactgtccgacctgggctttgcacagctgcagccccctggcgatttcgcctctcctaaggccacgcacagcacagtcatcccactggcgacccgccatttcagggaggacacttccgcatcgtaccaggaagcccacacagaattagagcctgtgagtcccaacagcggatgcgaaacaaccctggcagaggcaaccggaaccggcaataagtctggcgatgcagttcgggaagaaaagagaagcactaatctggctgccaatacacctgggaaaggtggtaggctgcggttcgcaagcccttctggccctcagagggctggactccgagaagggtctgaggaaaaggttaaaccccctcggcctcgagcccctgagtccgataccggtgacgaagatcaagatcaggaaagagatactgtgttcttgaaagacaaccacctcgctatcgagagaaagtgttcctccataacagtgtcttctacatccagccttgaggccgaggtggatttcacagtgatcggcgactaccacggatctgccttcgaggacttctcgcggtcactgcctgaactggacagagacaagtctgactccgacactgagggcctgcttttttcacgggatctgaacaagggcgctccttcacaggattag

SEQ ID NO: 321283 - DNA, 2877 bp, Artificial Sequence
  derived and/or modified sequence
atgagcagaagcctggacggcgccgagttcagcagacccgccagcgtgagcgagaaccacgacgccggccccgacggcgacaagagagacgaggacggcgagagcggcggccagagaagcgaggccgaggagggcgaggtgagaacccccaccaagatcaaggagctgaagcccgagcaggagaccacccccagacacaagcaggagttcctggacaagcccgaggacgtgctgctgaagcaccaggccagcatcaacgagctgaagagaaccctgaaggagcccaacagcaagctgatccacagagacagagactgggagagagagagaagactgcccagcagccccgccagccccagccccaagggcacccccgagaaggccaacgagagccagagaacccaggacatcagccagagagacctggtgcccgagcccggcgccgccgccggcctggaggtgttcacccagaagagcctggccgccagccccgagggcagcgagcactgggtgttcatcgagagagagtacaccagacccgaggagctgggcctgctgaaggtgaccaccatgcagcaggaggagagacaggccggcctggccggcatcctggccaacggcagactgagcaaggtggacgtgctggtggacaagttcaaggtggaggtggccaccgaggagatggtgggcaacagaagagccaacacccagcagcagggcaagatgatcgccagccccgaggacttcgagagcgtgggcgaggagggcccctggatcagagagagccccggcggcgccgccctggccagcggcagaaccctggccgagaagctgctggagggcagcgagctgagagccgacaccagagaggccaccatcagaaacagatgcatgagcgacggccagcccgagggccagaccgagctgagaaagggcctggaggagccccacacctgcggcagacccaccgcccccggcaccagacccgccgaggtggacgtgctgagccccgccagcgacaagggcggcctgcagagcttcctgctggaccccgcccacgccgaggccagagccgagctgagcaacgagaccgacaccagcttcgccgagagaagcttctacctgaactacgaggagaaggacagcgaggaccaggtgctgcccccccccctggaggagagaaagggcagactggacgccccccccggcggcgagcccagacccaccctgaacagcctggacctgagagtgagcgccgccgccagcagcagaagcaaggacgaggcccacatgaccagccccaaggagggcgccggcacccccaagaaccacggcggccccggcgacctgaagggcagccccgccggccagaccttcgccgagggctgggaggacgcccagtggggcgtggagggcgagttcccccacctgaccgccagcgccgccagagaggagggcacccccgtgagcggcgacctgctgggcaaggccgaggagagccccaccgaggagctgaagaagcaccccccccacagaggccagggcgtgcaccccgacccccaggcctgcgccctgcccagagccatccccctgaacgtgagaaagcccgtgaagcccgacagaggcaacttcccccccaaggagagaggcgtggtgcccacccagaagggcggcgccgagctgaaggacagagaggccagcgccttcctgcacatggaggtgatcatccccctgcccgccagccccggccacagcgaggacctggccgccctggaggaggccagccccagccccaccagccacggcagcggcgagcccagcgagctgagagagcccttcctgagacacgtgcacctgagcaaggccagccccgagcccaaggaccaggtgggcttcgtggtgagccccgccaccggcggcgagagaagacccccccccatcaccagcagaaagcccagagtggtgcccgaggaggccgagggcagaatccccctgggcttcggcttccccagcggcaagagaagagagatgaccagcttccaggccggcgaccaggagggcagcctggaggacatcagcaagaccagcgtggccaacaagatcagaatcttcgagacccacggcgccgagaccagaagaatgagcgagggcgaggccagaagcctgcccaacgacgtgagcagcgaggcccccgtgggccaggccgagcagcagagaagcaccctgagcgacctgggcttcgcccagctgcagccccccggcgacttcgccagccccaaggccacccacagcaccgtgatccccctggccaccagacacttcagagaggacaccagcgccagctaccaggaggcccacaccgagctggagcccgtgagccccaacagcggctgcgagaccaccctggccgaggccaccggcaccggcaacaagagcggcgacgccgtgagagaggagaagagaagcaccaacctggccgccaacacccccggcaagggcggcagactgagattcgccagccccagcggcccccagagagccggcctgagagagggcagcgaggagaaggtgaagccccccagacccagagcccccgagagcgacaccggcgacgaggaccaggaccaggagagagacaccgtgttcctgaaggacaaccacctggccatcgagagaaagtgcagcagcatcaccgtgagcagcaccagcagcctggaggccgaggtggacttcaccgtgatcggcgactaccacggcagcgccttcgaggacttcagcagaagcctgcccgagctggacagagacaagagcgacagcgacaccgagggcctgctgttcagcagagacctgaacaagggcgcccccagccaggactag

SEQ ID NO: 321284 - protein, 772 aa, Artificial Sequence
  derived and/or modified sequence
MEEKDYSEADGLSERTTPSKAQKSPQKIAKKYKSAICRVTLLDASEYECEVENWLDPSKEIKKQIRSSPWNFAFTVKFYPPDPAQLTEDITRYYLCLQLRADIITGRLPCSFVTHALLGSYAVQAELGDYDAEEHVGNYVSELRFAPNQTRELEERIMELHKTYRGMTPGEAEIHFLENAKKLSMYGVDLHHAKDSEGIDIMLGVCANGLLIYRDRLRINRFAWPKILKISYKRSNFYIKIRPGEYEQFESTIGFKLPNHRSAKRLWKVCIEHHTFFRLVSPEPPPKGFLVMGSKFRYSGRTQAQTRQASALIDRPAPFFERSSSKRYTMSRSLDGAEFSRPASVSENHDAGPDGDKRDEDGESGGQRSEAEEGEVRTPTKIKELKFLDKPEDVLLKHQASINELKRTLKEPNSKLIHRDRDWERERRLPSSPASPSPKGTPEKANERAGLREGSEEKVKPPRPRAPESDTGDEDQDQERDTVFLKDNHLAIERKCSSITVSSTSSLEAEVDFTVIGDYHGSAFEDFSRSLPELDRDKSDSDTEGLLFSRDLNKGAPSQDDESGGIEDSPDRGACSTPDMPQFEPVKTETMTVSSLAIRKKIEPEAVLQTRVSAMDNTQQVDGSASVGREFIATTPSITTETISTTMENSLKSGKGAAAMIPGPQTVATEIRSLSPIIGKDVLTSTYGATAETLSTSTTTHVTKTVKGGFSETRIEKRIIITGDEDVDQDQALALAIKEAKLQHPDMLVTKAVVYRETDPSPEERDKKPQES

SEQ ID NO: 321285 - DNA, 2319 bp, Artificial Sequence
  derived and/or modified sequence
atggaggagaaagactactctgaagcggacggcctgtccgagaggactactccttcaaaggctcaaaagtccccgcagaaaatcgccaagaagtataaaagtgccatttgcagggtcaccttactagacgcttccgagtacgaatgcgaagtggagaattggctcgatcctagtaaggagatcaagaagcagattaggtccagtccatggaatttcgccttcacggtgaaattctacccccccgatcccgcccaactcacggaggatatcaccaggtactatctgtgcctgcagctgcgggccgatatcatcactggaaggctcccttgttctttcgttacacacgcattgttgggatcatatgccgtccaggctgaactcggcgactacgatgccgaagagcatgttggcaactatgtcagcgaactccggttcgcccccaatcagacaagagagctggaagagagaataatggagttgcacaaaacctatcgcgggatgacaccaggggaggccgaaatacacttcctggagaatgctaaaaagctgagcatgtatggcgtggatcttcatcacgctaaggactcggagggcatcgatattatgctcggggtgtgcgccaatggtctcctcatttatagggaccgccttcgcattaatcgtttcgcctggccaaaaatcttgaaaattagctacaaacggagcaatttttacatcaaaatacgccctggagagtacgaacagtttgagtccactattggatttaagctccctaaccatagaagcgcgaagcgactgtggaaggtgtgtatcgagcaccacactttctttcgcctggtgagcccagaaccaccccctaagggctttctggtaatgggttccaagttccgctattcaggaaggactcaggcgcagacaagacaggcgtcagctctgattgaccggccagccccttttttcgagcggagcagctccaaacgatacacaatgagtagatcattggatggtgcagagtttagtcgtcctgcttccgtgtccgaaaaccacgatgcgggacccgacggcgataaacgggatgaagatggagaaagcggtgggcagaggagcgaggcagaagagggcgaggtgcgaacgccaacaaaaattaaagagctcaaattcttggacaaaccagaggacgtcctgctgaagcaccaggcttccattaatgagctcaaacgcaccctgaaggaacctaactccaagctcattcaccgtgatcgcgattgggaacgagagcgccgcctgcccagttcaccagcaagtccttctcccaaaggcacaccagagaaagctaacgagagggctggacttagagagggctcggaggaaaaagttaagccaccaaggccccgggctccagagtccgacacaggtgacgaggaccaggaccaggaacgcgacaccgtctttctgaaggataaccatctggccatagagcgtaaatgcagctctattaccgtgtcttccacttcctcccttgaggctgaagtggactttaccgtgattggagattaccacgggtcagccttcgaggacttcagccgctcactccctgagctggatcgggataaatccgactcagacactgaggggctcctcttctcccgcgatctcaataagggcgctcccagccaagatgatgagtccggcggcatcgaggatagccccgacagaggggcctgttcgactccagatatgcctcagtttgagcccgtcaaaaccgagacaatgaccgtgtctagccttgccatccgcaagaaaattgaacccgaggccgtgttgcagaccagggtgtctgcaatggataatacacagcaggtggacggtagcgccagcgtgggtcgggagttcatcgcaaccacaccttctatcacgaccgagaccatttctacaaccatggaaaatagcctgaagagcggtaagggggccgccgctatgatcccggggccccagactgtagcgaccgagatccggagcctcagcccaatcatcggcaaggacgtcctgacctcgacctatggcgctactgccgaaactctaagcacaagcacaaccacccacgttacaaaaacggtcaagggtgggttctcggagacccggatcgaaaagagaattattatcacgggggacgaggacgtcgatcaagaccaagcacttgccttggccatcaaggaggcgaagctccaacatcccgatatgctcgtcaccaaggcagtcgtgtatcgcgaaaccgatccttctcctgaggagcgagataagaagccgcaagaatcctag

SEQ ID NO: 321286 - DNA, 2319 bp, Artificial Sequence
  derived and/or modified sequence
atggaagaaaaagactactcagaggcagacggtctaagtgaaaggaccacgcccagcaaagcccagaagagtccccagaagatcgcaaagaaatacaaatctgccatttgccgcgtcacactcctggatgcatctgagtacgagtgtgaagtggagaattggctggacccatccaaggagatcaagaagcaaatcagatcttccccttggaacttcgcctttactgtgaagttctatccgccagaccctgcccagctgaccgaggacattacccggtactacctttgtctccaacttagagccgatataattaccgggcgcctgccgtgttcttttgtaacccatgcgctcctggggtcctacgccgtgcaggccgaattaggcgactatgacgcggaagaacatgtgggaaactatgtgtctgagctgagattcgcaccaaatcaaacacgcgaattggaagagagaataatggagttacacaaaacatacagagggatgacaccaggcgaagctgagatccactttctggagaacgccaagaagttgtctatgtacggtgttgacctgcaccatgctaaagactccgagggcattgacataatgcttggcgtctgcgccaatggtctgctgatttacagggaccgactgagaattaatcggttcgcatggcctaagattcttaaaatttcctacaaacgcagtaatttctacataaagattagaccaggggagtatgaacagttcgagtcgaccatcggtttcaagctgccgaatcatcggtccgctaaacggctgtggaaagtctgcattgaacatcataccttctttcgacttgtgtctcctgagccgcctcccaagggctttctggtgatgggatcaaagttccggtactcaggtcggacacaggcgcagacgcgacaggcgtctgcactcatcgatagaccagcccctttttttgagcggagtagttcaaaacgctatacgatgtcgcggtcactggatggagccgagttctcacggccagccagtgtgagcgaaaaccacgacgcaggccccgatggtgacaagagggatgaggacggagagtctggggggcagcgtagtgaggctgaagaaggcgaggtgcggaccccaaccaagatcaaggagttaaaatttctcgataaacccgaggatgtgttgctcaaacatcaggcctcaataaatgaactgaaaaggactttgaaggaaccgaacagtaaactgattcatagagacagggactgggaacgagagcgacgcttgccgagcagccccgccagccccagccctaaaggaactcccgagaaggccaacgagcgagccgggctcagggaagggagtgaggagaaggtcaaacccccgcgaccgagggcacccgagtctgatacaggcgatgaagatcaggaccaggagcgtgatacagtgtttctgaaggataatcatcttgccatagaaagaaaatgctccagtattacagtttcttcaaccagcagcctagaagccgaggtcgactttacggtcattggtgactaccacggctctgccttcgaggacttctcccggtctcttcctgagctggaccgggacaagtctgactcagacacagaaggtcttctattttcacgagatttgaataaaggcgccccctcacaggacgatgaaagtgggggtattgaagactcccctgaccgcggcgcttgttcgaccccagatatgccccagttcgaaccagtgaagacagaaaccatgactgtgtcgtcactggccatcagaaagaaaatcgagccagaggctgtgctccagacacgggtatcggccatggacaatacccagcaggtggatgggtccgccagcgttggccgagaattcattgctactacaccatccattacaactgagaccatctccacaacaatggagaacagtttaaagagcggcaagggagccgctgccatgataccaggaccacagacagttgctacggaaattcgcagtctctcccctatcattggaaaggacgtgctgactagcacttatggagccacagccgaaaccctgagcacgtcaaccaccacacatgtcacgaagaccgttaaagggggattttctgaaaccaggattgaaaaaagaattattattaccggtgatgaagacgtggatcaggaccaggcgctcgccctcgccataaaagaagctaagctgcagcaccccgatatgctggttacaaaagctgtagtgtatcgggagaccgacccgtctcccgaagagcgggacaaaaaacctcaggagtcttag

SEQ ID NO: 321287 - DNA, 2319 bp, Artificial Sequence
  derived and/or modified sequence
atggaggagaaggactacagcgaggctgatggcctgtctgagaggaccacccccagcaaggcccagaagagcccccagaagatcgccaagaagtacaagagcgccatctgccgggtgaccctgctggatgcctctgaatatgaatgtgaggtggagaactggctggaccccagcaaggagatcaagaagcagatccgcagcagcccctggaactttgccttcaccgtgaagttctaccccccagaccctgcccagctgacagaggacatcacccgctactacctgtgcctgcagctgcgggctgacatcatcaccggccgcctgccctgcagctttgtgacccacgccctgctgggcagctatgctgtgcaggccgagctgggggactatgatgctgaggagcacgtgggcaactacgtgtctgagctgcgctttgcccccaaccagacccgggagctggaggagcgcatcatggagctgcacaagacctaccggggcatgaccccaggagaggccgagatccacttcctggagaatgccaagaagctgtccatgtatggagtggacctgcaccacgccaaggacagcgagggcatcgacatcatgctgggcgtgtgtgccaacggcctgctgatctacagagaccggctgcgcatcaacagatttgcctggcccaagatcctgaagatctcctacaagaggagcaacttctacatcaagatccggcctggagaatatgagcagtttgagagcaccatcggcttcaagctgcccaaccacaggtctgccaagaggctgtggaaggtgtgcatcgagcaccacaccttcttccggctggtgtccccagagcccccacccaagggcttcctggtgatgggcagcaagttccgctacagcggccgcacccaggcccagacccggcaggccagcgccctgattgacaggcctgcccccttctttgagaggagcagcagcaagcgctacaccatgagccgcagcctggatggagctgagttcagcaggcctgcctctgtgtctgaaaatcatgatgctggcccagatggagacaagagagatgaagatggagagagcggcggccagaggtctgaggccgaggagggggaggtgaggacccccaccaagatcaaggagctgaagttcctggacaagccagaagatgtgctgctgaagcaccaggccagcatcaatgagctgaagaggaccctgaaggagcccaacagcaagctgatccaccgggaccgggactgggagcgggagcggcggctgcccagcagccctgccagccccagccccaagggcaccccagagaaggccaatgaaagagctggcctgcgggagggcagcgaggagaaggtgaagccaccccggccccgggcccctgagagtgacacaggagatgaggaccaggaccaggagcgggacaccgtcttcctgaaggacaaccacctggccatcgagaggaagtgcagcagcatcaccgtgagcagcaccagcagcctggaggccgaggtggacttcaccgtcatcggggactaccacggcagcgcctttgaggacttcagccgcagcctgcctgagctggaccgggacaagagtgacagcgacacagagggcctgctcttcagccgggacctgaacaagggggcccccagccaggatgatgaaagtggcggcatcgaggacagcccagacagaggagcctgcagcaccccagacatgccccagtttgagcctgtgaagacagagaccatgacagtgagcagcctggccatcaggaagaagattgagcctgaggccgtgctgcagaccagggtgtctgccatggacaacacccagcaggtggatggcagcgcctctgtgggccgggagttcatcgccaccacccccagcatcaccacagagaccatcagcaccaccatggagaacagcctgaagtctggaaaaggagctgctgccatgatccctggcccccagacagtggccacagagatccgcagcctgagccccatcatcggcaaggatgtgctgaccagcacctatggagccacagctgagaccctgagcaccagcaccaccacccacgtgaccaagacagtgaagggcggcttcagcgagaccagaattgagaagaggatcatcatcactggagatgaagatgtggaccaggaccaggccctggccctggccatcaaggaggccaagctgcagcacccagacatgctggtgaccaaggctgtggtgtaccgggagacagaccccagccctgaggagcgggacaagaagccccaggagagctag

SEQ ID NO: 321288 - DNA, 2319 bp, Artificial Sequence
  derived and/or modified sequence
atggaggagaaggactacagcgaggccgacggcctgagcgagcggaccactcctagcaaggcccagaagagcccacagaagatcgccaagaaatacaaatccgcgatatgtcgtgtcaccctactggacgcctctgaatacgagtgtgaggtggagaattggcttgatccatccaaggaaattaagaaacagatcaggtcctccccctggaattttgccttcacagtgaaattctatcctccagatccagcccagcttacagaagacattactcgctactacctttgcctgcagctccgggccgatattattacaggccgactcccctgctcgttcgtgactcatgctttacttggttcctacgccgttcaggccgaattaggcgattatgacgctgaagaacatgtggggaattatgtgagcgagttaagattcgccccaaatcaaacacgggagctcgaagaaaggataatggaacttcacaagacctaccgggggatgacaccaggtgaggcggaaatccattttttggaaaatgccaagaagctgagcatgtacggcgtcgatctgcatcatgccaaggattctgaaggcatcgatatcatgctgggcgtgtgcgccaacggtttgctcatctaccgcgataggctgcgtatcaaccgctttgcttggcccaagattttaaagattagttacaaacggtcaaacttctatattaagatacgtcctggagagtacgagcagttcgaaagcacgatcggcttcaaactccccaaccataggtccgcgaaacggctgtggaaggtttgcatcgagcaccacacattctttaggcttgtctcccctgaacccccacccaagggctttttagtgatgggatcaaagttcaggtactcgggccgaactcaagcccagacacggcaggcctcagcgctcattgatcgcccggcaccattcttcgaacggtcaagcagcaaacgttatacaatgagtcggagtctggacggcgcggagttttccaggcctgccagcgtgtccgaaaaccatgacgccggccctgacggggataaacgcgacgaggacggagaaagtggtgggcaaaggtctgaagccgaagaaggggaggtaaggacgccaacgaagattaaggagttgaaatttctggacaaaccagaggacgtgctcctgaaacatcaagccagtattaatgagctgaagcgtactctgaaagaacctaactctaaattgattcatcgtgaccgcgactgggagcgcgagcggaggcttccttcttcgcccgcatctcccagccctaaggggactccagagaaggcaaatgagcgcgccggcctgagggaaggcagcgaggaaaaggtcaaacctcctaggccccgtgctcccgaaagcgataccggtgatgaggatcaggaccaagagagagacaccgtgtttctaaaagacaaccatctggccattgagagaaaatgcagctccataacagtcagtagcacgagctcattggaagctgaggtggattttaccgtgattggagattaccacggtagcgcatttgaggatttctctagaagccttcccgaattagacagggacaaaagcgattccgacaccgaaggcctgctcttctccagggacctgaataagggcgcccctagtcaggatgacgaatccggcggaatagaggattctcccgacagaggggcctgcagcacaccagatatgccccagttcgagcctgtgaagacagaaactatgaccgtgtcctcgctggcaatcagaaagaaaatcgaacccgaagccgtacttcagactagagttagcgcaatggacaacacccagcaagtcgacgggtctgcaagcgtgggccgggagtttatcgccaccacaccatctataaccaccgaaacaattagcaccacgatggagaatagtctgaagagcggcaaaggggccgctgcgatgattcccggaccccagacagtggccacagaaatccgaagcctgagtccgataataggcaaagacgtcctgaccagcacttatggtgccactgcagagactctctcgacgagtaccacaactcatgttaccaagactgtgaagggcggcttcagcgaaacccgcattgagaaacggatcataatcactggagacgaggatgtggaccaggaccaggctctcgccttagcaatcaaggaagccaagttgcaacatcctgacatgttggtgacaaaagccgttgtgtatcgggagacagatccctcacctgaggagcgagacaaaaagccacaagaatcttag

SEQ ID NO: 321289 - DNA, 2319 bp, Artificial Sequence
  derived and/or modified sequence
atggaggagaaggactacagcgaggccgacggcctgagcgagcggaccacaccttccaaggcccaaaagtcccctcagaagatcgctaagaagtacaagtccgcgatttgtcgtgtaactcttctggatgccagcgagtatgaatgtgaagtcgaaaactggctggatccttcaaaggaaatcaaaaaacagatcaggtcaagtccatggaactttgcattcactgttaagttttatcctcccgaccctgctcagctgactgaggatattacacggtactatctttgtctgcagttgagggcagatattattaccggtagactgccctgctcgttcgtaacccacgctctgctcggaagctacgcggttcaggctgagttaggcgactacgatgcagaggaacatgtgggcaactacgtatccgagctgcgattcgccccgaaccagacacgcgaattggaagagcgcattatggagctgcataagacgtaccggggcatgaccccaggggaagccgaaattcattttttggaaaatgccaaaaagctgtccatgtacggcgtcgacctgcatcatgccaaagactccgagggtatagacattatgctcggagtgtgtgccaacggactgttgatctatcgggaccgcttgagaattaatcgatttgcttggccaaagatcctgaaaattagctataagcgttctaatttttacatcaaaataagaccaggtgagtacgagcagtttgaatcgactatcggcttcaaactgcccaatcacagatccgctaagaggctgtggaaggtgtgtatcgagcaccacacattctttaggctggtctctcccgaacctccacccaaaggctttctcgttatgggatccaagtttcggtactctggtcgcactcaggctcagaccagacaagccagcgcgctcatcgacaggcctgcacctttcttcgagaggagctcctctaagaggtatactatgtcccggagtcttgatggggccgaatttagccgcccagcctccgtgagcgagaatcacgacgccggccccgatggcgataagcgcgatgaggacggagagtctggtgggcaacgaagcgaggcagaagagggagaagtgcggacccccacaaagattaaagagctaaagttcttggacaaacccgaagatgtcctactcaaacaccaggccagcataaacgagctgaagcggacactgaaggagcccaattccaagctgattcacagagaccgtgattgggagagagaacggaggctgccttccagccctgccagcccttcaccaaaggggacgcccgagaaagcgaacgagcgggcaggcctgagagagggcagcgaagagaaagttaaaccacctaggccccgggcgcccgaaagcgataccggtgacgaagaccaggatcaggaaagagacaccgtgttcctgaaagataaccaccttgccatagagagaaaatgtagcagtatcaccgtctccagcacttcaagcttggaagcagaagtagactttactgttatcggagactatcatggatccgcctttgaagactttagtagatccctacctgagcttgatcgggacaagtctgacagcgacacagaggggttgctgttttctagggacctaaataaaggtgctccatcccaagatgacgaatctgggggaattgaagactcccccgacagaggggcttgttccacgccagatatgccccagttcgagccggtgaagactgagaccatgactgtctcttctctggcaatcagaaagaagatcgaacctgaggcagtgctgcaaacacgcgtttcggccatggacaatactcagcaagtggatggctccgcctctgtggggcgggagttcatcgcgacaacaccatcaatcacgaccgagactatttcaaccacaatggaaaactccctgaaatccggcaaaggagcggccgccatgatcccaggcccgcagacagtcgccaccgagatccggtctctttcacctattatcgggaaagacgtgttaacctcaacttacggtgccactgctgaaactctcagcacaagcactacaacccatgtgactaaaacagtaaaaggcggcttcagtgaaacaaggatcgaaaaacgaattatcattaccggagacgaagacgtagaccaggatcaggccctggccttagccatcaaggaggctaaattgcagcaccccgacatgttggtaaccaaagcggtcgtgtatagagaaacagacccatcccctgaggagcgtgataaaaaaccccaagaatcgtag

SEQ ID NO: 321290 - DNA, 2319 bp, Artificial Sequence
  derived and/or modified sequence
atggaggagaaggactattctgaggctgatggtttatccgaaagaactaccccctccaaagcacagaaatcaccgcaaaagatcgccaagaagtataagtcagccatatgtcgcgtgacgctgcttgatgctagtgagtatgaatgtgaagtggagaattggttggacccgtctaaggagatcaaaaaacagatccggtcgtcaccgtggaacttcgccttcacagtgaagttctacccaccagacccagcacagctcaccgaggatatcacacggtactatctgtgtttgcagttacgggctgacatcattacggggaggctgccttgttcctttgtaacacatgccctgctaggcagctacgctgtccaagcggaactgggagactatgatgccgaggaacatgtggggaactatgtgagcgaactgcggttcgctcccaaccagaccagagaactggaagagcgcattatggagttacacaagacgtaccgcggaatgacccccggagaggctgagattcatttcctagaaaatgcaaaaaaactgtccatgtatggggttgatttacatcacgctaaggattcggagggaattgatatcatgctgggagtttgtgccaacggcttgctaatttatcgggatagactgaggatcaaccgattcgcttggcccaagattctcaaaatctcttacaagagatcgaacttttacatcaaaataagaccaggcgaatatgagcaattcgaatccactatcgggttcaagttacctaaccacaggagcgctaaacgcctttggaaggtgtgtatcgagcatcatactttttttagacttgtcagcccggaacctcccccaaaaggctttctcgtgatggggagcaagtttcgctactctggcagaactcaggcacaaacgagacaggcatctgccctaatcgaccggccagccccattctttgagagaagctctagcaagagatatacaatgtcccggtccttggacggggcagaattttcccgacccgcttccgtgtcagagaaccacgacgctgggcctgacggtgacaagcgagatgaggacggcgaaagtggtgggcagagatcggaggccgaagagggcgaggtgcgaactcccacaaagataaaagagttgaagttcctggacaagcccgaggacgtgctgctgaagcaccaggccagcatcaatgagttgaaacggactctgaaagagccaaattccaagctaatccaccgtgatagagactgggaacgcgaacgcagactgccgagcagtcccgcttcacccagccccaagggcacgccagagaaggccaacgagagggccggtttgagggagggctcagaggagaaagtcaaacctcccagacccagggcaccagagtccgacaccggtgacgaggaccaggatcaagagcgcgacacagtgttcttaaaggataaccacttggctatcgagaggaaatgtagcagcattactgtcagttccacatcatccctcgaggctgaagtggacttcaccgttattggagactaccacgggtcggcatttgaggacttttccaggtctctcccggagctggaccgggacaaaagcgatagtgacacggaggggctgctatttagccgggatctcaacaagggcgctcccagccaagacgacgaatctggtgggatagaggacagcccagatcgcggtgcgtgttccacccctgatatgccacagttcgaacccgtgaaaacagaaacaatgactgtttctagtcttgcaatccggaagaagatcgaacccgaggccgtgctgcaaacaagagtgtccgctatggataatacacagcaggtagatggaagtgcatcagtgggacgagaattcatagcgactacgccttcaatcacaaccgagacaataagcaccactatggagaatagcctcaagagcggaaagggcgctgccgcaatgataccaggtccacagaccgttgcgaccgagatccggtcgttgagccctatcattggaaaggacgtactgacctccacgtacggtgctactgccgagacgctgagtactagtactaccacacatgttactaaaaccgtaaagggaggtttctcagagacaagaatagaaaagaggattattatcaccggagatgaggatgtcgaccaggatcaagctctcgccttggctattaaagaggcaaagctgcaacatcccgacatgctggtcacaaaggccgtcgtctatcgcgagacagacccgtctcccgaggaacgagacaagaaaccgcaggagagttag

SEQ ID NO: 321291 - DNA, 2319 bp, Artificial Sequence
  derived and/or modified sequence
atggaagagaaggattatagcgaagctgacggcctgagtgagcggaccacccccagcaaggcccaaaaaagcccacaaaaaattgctaagaagtacaaaagcgccatttgtcgcgtgaccctccttgacgctagcgaatacgaatgcgaggtcgagaattggcttgacccctctaaggagattaaaaagcagatacgcagctctccttggaactttgccttcaccgttaaattctacccacccgatccagcccagctaacagaggacatcactcgatattatttgtgccttcagttgagagcagatattattactggcaggttgccttgtagttttgtcacccacgccttgctcggcagttatgccgtgcaggcggagctcggcgactatgacgccgaggagcatgtcggtaattacgtttccgagttgcggttcgcgccaaatcagacgagggagttggaagaacgcatcatggagctacataaaacataccgcggaatgacaccgggtgaggccgagattcattttctggaaaatgccaaaaaactgagtatgtacggcgtggatctccatcatgcaaaagactccgaaggcatcgatattatgctaggcgtctgcgccaacggtcttctcatttaccgcgacagactacgcattaatagattcgcttggcccaagatcttaaagatctcctacaagcggagtaacttctacattaagattaggcccggagaatacgaacagtttgagagtacaatcggatttaaactcccaaatcatagatccgccaaaaggctctggaaagtgtgcatcgaacatcatacctttttcaggctcgtaagccccgagccaccccctaaagggttcctcgtgatgggcagcaagttccggtacagtggtagaacacaggcccagactcgccaggcttcggcactcattgataggccagcaccctttttcgagaggagcagctctaaaagatataccatgtcacgatccctggacggcgcagagttttcccgcccagcctccgtatctgaaaaccacgatgccggacccgatggggataagcgcgacgaagatggagagagcggcggacaaagatcagaagctgaggaaggtgaagtgagaactcccactaagatcaaggaactcaaattcctggataagccggaggatgttcttttaaaacatcaggcctccatcaacgaacttaagaggactctaaaggaaccaaactctaaactgatccatcgggatcgcgattgggaacgcgaaagaaggctccctagctcacccgcatctccttcgcctaaaggtactcccgagaaagcaaacgaacgggcaggacttcgagaaggcagcgaggagaaggtgaaacctccccgaccacgcgctccagaatccgatacgggtgacgaagatcaggaccaggaacgagacactgtgtttttaaaggataatcacttggcaatcgagcgaaagtgttctagtattactgtcagctcaacatcaagtcttgaggcggaggtcgactttacagtcataggcgactaccacgggtctgctttcgaggacttctccagatccttgcccgagctagatcgtgacaaaagcgactcggataccgaaggcctcttattctcaagggaccttaacaaaggggctccttctcaggatgatgagtccgggggtattgaagactctcctgaccgcggagcatgttctacaccagatatgccacaattcgagcccgtgaagaccgagacgatgacagtcagctctcttgccattaggaaaaagatcgagccggaagccgtgctccagacaagggtctctgctatggataacacacaacaggtggacggttccgctagcgtcgggcgagaatttatagctacgactccctctataacaaccgagactatctccaccaccatggaaaattccctcaaaagcggcaagggcgctgccgctatgatcccaggtccccagacggtggccactgaaattaggagcctctccccgattatcggaaaggatgtgctgacttctacttatggcgctacagccgaaactctgtctaccagcacaacaacacacgtgactaaaacagtgaagggagggttcagcgagacaagaatagaaaaaagaatcatcatcacaggggatgaagatgtcgatcaggatcaggccctagctttggcaataaaggaggctaagctgcagcacccggatatgctcgtgactaaagcagtggtgtacagagagactgacccatccccggaggagcgtgataaaaaaccccaggagagctag

SEQ ID NO: 321292 - DNA, 2319 bp, Artificial Sequence
  derived and/or modified sequence
atggaggagaaggactacagcgaggccgacggcctgagcgagagaaccacccccagcaaggcccagaagagcccccagaagatcgccaagaagtacaagagcgccatctgcagagtgaccctgctggacgccagcgagtacgagtgcgaggtggagaactggctggaccccagcaaggagatcaagaagcagatcagaagcagcccctggaacttcgccttcaccgtgaagttctacccccccgaccccgcccagctgaccgaggacatcaccagatactacctgtgcctgcagctgagagccgacatcatcaccggcagactgccctgcagcttcgtgacccacgccctgctgggcagctacgccgtgcaggccgagctgggcgactacgacgccgaggagcacgtgggcaactacgtgagcgagctgagattcgcccccaaccagaccagagagctggaggagagaatcatggagctgcacaagacctacagaggcatgacccccggcgaggccgagatccacttcctggagaacgccaagaagctgagcatgtacggcgtggacctgcaccacgccaaggacagcgagggcatcgacatcatgctgggcgtgtgcgccaacggcctgctgatctacagagacagactgagaatcaacagattcgcctggcccaagatcctgaagatcagctacaagagaagcaacttctacatcaagatcagacccggcgagtacgagcagttcgagagcaccatcggcttcaagctgcccaaccacagaagcgccaagagactgtggaaggtgtgcatcgagcaccacaccttcttcagactggtgagccccgagcccccccccaagggcttcctggtgatgggcagcaagttcagatacagcggcagaacccaggcccagaccagacaggccagcgccctgatcgacagacccgcccccttcttcgagagaagcagcagcaagagatacaccatgagcagaagcctggacggcgccgagttcagcagacccgccagcgtgagcgagaaccacgacgccggccccgacggcgacaagagagacgaggacggcgagagcggcggccagagaagcgaggccgaggagggcgaggtgagaacccccaccaagatcaaggagctgaagttcctggacaagcccgaggacgtgctgctgaagcaccaggccagcatcaacgagctgaagagaaccctgaaggagcccaacagcaagctgatccacagagacagagactgggagagagagagaagactgcccagcagccccgccagccccagccccaagggcacccccgagaaggccaacgagagagccggcctgagagagggcagcgaggagaaggtgaagccccccagacccagagcccccgagagcgacaccggcgacgaggaccaggaccaggagagagacaccgtgttcctgaaggacaaccacctggccatcgagagaaagtgcagcagcatcaccgtgagcagcaccagcagcctggaggccgaggtggacttcaccgtgatcggcgactaccacggcagcgccttcgaggacttcagcagaagcctgcccgagctggacagagacaagagcgacagcgacaccgagggcctgctgttcagcagagacctgaacaagggcgcccccagccaggacgacgagagcggcggcatcgaggacagccccgacagaggcgcctgcagcacccccgacatgccccagttcgagcccgtgaagaccgagaccatgaccgtgagcagcctggccatcagaaagaagatcgagcccgaggccgtgctgcagaccagagtgagcgccatggacaacacccagcaggtggacggcagcgccagcgtgggcagagagttcatcgccaccacccccagcatcaccaccgagaccatcagcaccaccatggagaacagcctgaagagcggcaagggcgccgccgccatgatccccggcccccagaccgtggccaccgagatcagaagcctgagccccatcatcggcaaggacgtgctgaccagcacctacggcgccaccgccgagaccctgagcaccagcaccaccacccacgtgaccaagaccgtgaagggcggcttcagcgagaccagaatcgagaagagaatcatcatcaccggcgacgaggacgtggaccaggaccaggccctggccctggccatcaaggaggccaagctgcagcaccccgacatgctggtgaccaaggccgtggtgtacagagagaccgaccccagccccgaggagagagacaagaagccccaggagagctag

SEQ ID NO: 321293 - DNA, 3631 bp, Artificial Sequence
  derived and/or modified sequence
gcatttctgcgcagctctagcgcgcctcggagcccgccggggcagccgccggacaccaggaccgcgagccagacagctcccggaagccgcgccgccgccgccaggtgcctgactgacagaagttcttgcccccggggagctggtgtggacagaggaggggccctggaagtgaccactgggctgagtagctcatcagcttccccacactgaagcccgaggggtctcctgctggcttctgagagctgacggaacaggttccagcaaggcagaccctgacacagaagccagacctgtccagcagggaccccatacactgagcctagacatggaggagaaggactacagtgaggccgatggcctttcggagaggaccacgcccagcaaggcccagaaatcgccccagaagattgccaagaaatacaagagtgccatctgccgggtcactctgcttgatgcctcggagtatgagtgtgaggtggagaactggctggacccctccaaggagatcaagaagcagatccggagtagcccctggaattttgccttcacagtcaagttctacccgcctgatcctgcccagctgacagaagacatcacaagatactacctgtgcctgcagctgcgggcagacatcatcacgggccggctgccatgctcctttgtcacgcatgccctactgggctcctacgctgtgcaggctgagctgggtgactatgatgctgaggagcatgtgggcaactatgtcagcgagctccgcttcgcccctaaccagacccgggagctggaggagaggatcatggagctgcataagacatatagggggatgaccccgggagaagcagaaatccacttcttagagaatgccaagaagctttccatgtacggagtagacctgcaccatgccaaggactctgagggcatcgacatcatgttaggcgtttgtgccaatggcctgctcatctaccgggaccggctgagaatcaaccgctttgcctggcccaagatcctcaagatctcctacaagaggagtaacttctatatcaagatccggcctggggagtatgagcaatttgagagcacaattggctttaagctcccaaaccaccggtcagccaagagactgtggaaggtctgcatcgagcatcatacattcttccggctggtgtcccctgagcccccacccaagggcttcctggtgatgggctccaagttccggtacagtgggaggacccaggcacagactcgccaggccagcgccctcattgaccggcctgcacccttctttgagcgttcttccagcaaacggtacaccatgtcccgcagccttgatggagcagagttctcccgcccagcctcggtcagcgagaaccatgatgcagggcctgacggtgacaagcgggatgaggatggcgagtctggggggcaacggtcagaggctgaggagggagaggtcaggactccaaccaagatcaaggagctaaagttcttagacaagccagaagatgtcttgctgaagcaccaggccagcatcaatgagctcaaaaggaccctgaaggagcccaacagcaaactcatccaccgggatcgagactgggaacgggagcgcaggctgccctcctcccccgcctccccctcccccaagggcacccctgagaaagccaatgagagagcagggctgagggagggctccgaggagaaagtcaaaccaccacgtccccgggccccagagagtgacacaggcgatgaggaccaggaccaggagagggacacggtgttcctgaaggacaaccacctggccattgagcgcaagtgctccagcatcacggtcagctctacgtctagcctggaggctgaggtggacttcacggtcattggtgactaccatggcagcgccttcgaagacttctcccgcagcctgcctgagctcgaccgggacaaaagcgactcggacactgagggcctgctgttctcccgggatctcaacaagggggcccccagccaggatgatgagtctgggggcattgaggacagcccggatcgaggggcctgctccaccccggatatgccccagtttgagcccgtgaaaacagaaaccatgactgtcagcagtctggccattagaaagaagattgagccggaggccgtactgcagaccagagtctccgctatggataacacccagcaggttgatgggagtgcctcagtggggagggagttcatagcaaccactccctccatcaccacggagaccatatcgaccaccatggagaacagtctcaagtccgggaagggggcagctgccatgatcccaggcccacagacggtggccacggaaatccgttctctttctccgatcatcgggaaagatgtcctcaccagcacctacggcgccactgcggaaaccctctcaacctccaccaccacccatgtcaccaaaactgtgaaaggagggttttctgagacaaggatcgagaagcgaatcatcattactggggatgaagatgtcgatcaagaccaggccctggctttggccatcaaggaggccaaactgcagcatcctgatatgctggtaaccaaagctgtcgtatacagagaaacagacccatccccagaggagagggacaagaagccacaggaatcctgacctctgtgaagagatcctggcatttctggtccaacccaagccagagaaccattaagaaggggccttcattctggattctccgacgcaacactgacgtcccagctgcgacgtactgtcactgatgagagactgggaagggaaaagcatatatatatagatatatagagatatagatatatatacaggaaacaccgcatccttgcactgctgctggggctggcagagcagttggctgacagcaacaaccgacatctgaacacctacatttcctttgcagacaaattgaagaactggtgggatttttttcaagaaaaaaaattatataataactataatcccttgctcacccctttcccccgccaaataagaaacgcaagccagaccacgatgattgtagaagtccctcccgccctggttctgcacgttacagttagcagacgagcaattccatttgttcttctccagcatctctaaggcccacttgaatgcaaaggaaaacacttgcacagcaaagcaagagaagtcacagcagcaagacacgcacagtcaaccattttccgagaaaaaaagaaaattccccacttggaaagaaagaggaggaacactggattcttactttctggatcttgacactgggctgcaaaacctaccttcctctctcccgcctcccctcaccctcaactctcaatgtcttgctgtcattttctgtctcggctccctcctcccccttcccccttcccccaccccacacccttcaccctctgtgtcctggtccttctgagggccactgcagatgactctcctttgaaatgagaaaaagaaaagaaagcaagaacagaaaacgaagccacaggaagggaagtagacattgtatgcttatggtttctcattatgaaggtgcagcttgtaggaggtttgtacggatgtgctttgaagttatgtatattacatataacaggaaaaaatattaaaataaacagtgctggt

SEQ ID NO: 321294 - DNA, 3126 bp, Artificial Sequence
  derived and/or modified sequence
gcatttctgcgcagctctagcgcgcctcggagcccgccggggcagccgccggacaccaggaccgcgagccagacagctcccggaagccgcgccgccgccgccaggtgcctgactgacagaagttcttgcccccggggagctggtgtggacagaggaggggccctggaagtgaccactgggctgagtagctcatcagcttccccacactgaagcccgaggggtctcctgctggcttctgagagctgacggaacaggttccagcaaggcagaccctgacacagaagccagacctgtccagcagggaccccatacactgagcctagacatggaggagaaggactacagtgaggccgatggcctttcggagaggaccacgcccagcaaggcccagaaatcgccccagaagattgccaagaaatacaagagtgccatctgccgggtcactctgcttgatgcctcggagtatgagtgtgaggtggagaactggctggacccctccaaggagatcaagaagcagatccggagtagcccctggaattttgccttcacagtcaagttctacccgcctgatcctgcccagctgacagaagacatcacaagatactacctgtgcctgcagctgcgggcagacatcatcacgggccggctgccatgctcctttgtcacgcatgccctactgggctcctacgctgtgcaggctgagctgggtgactatgatgctgaggagcatgtgggcaactatgtcagcgagctccgcttcgcccctaaccagacccgggagctggaggagaggatcatggagctgcataagacatatagggggatgaccccgggagaagcagaaatccacttcttagagaatgccaagaagctttccatgtacggagtagacctgcaccatgccaaggactctgagggcatcgacatcatgttaggcgtttgtgccaatggcctgctcatctaccgggaccggctgagaatcaaccgctttgcctggcccaagatcctcaagatctcctacaagaggagtaacttctatatcaagatccggcctggggagtatgagcaatttgagagcacaattggctttaagctcccaaaccaccggtcagccaagagactgtggaaggtctgcatcgagcatcatacattcttccggctggtgtcccctgagcccccacccaagggcttcctggtgatgggctccaagttccggtacagtgggaggacccaggcacagactcgccaggccagcgccctcattgaccggcctgcacccttctttgagcgttcttccagcaaacggtacaccatgtcccgcagccttgatggagcagagttctcccgcccagcctcggtcagcgagaaccatgatgcagggcctgacggtgacaagcgggatgaggatggcgagtctggggggcaacggtcagaggctgaggagggagaggtcaggactccaaccaagatcaaggagctaaagttcttagacaagccagaagatgtcttgctgaagcaccaggccagcatcaatgagctcaaaaggaccctgaaggagcccaacagcaaactcatccaccgggatcgagactgggaacgggagcgcaggctgccctcctcccccgcctccccctcccccaagggcacccctgagaaagccaatgagagagcagggctgagggagggctccgaggagaaagtcaaaccaccacgtccccgggccccagagagtgacacaggcgatgaggaccaggaccaggagagggacacggtgttcctgaaggacaaccacctggccattgagcgcaagtgctccagcatcacggtcagctctacgtctagcctggaggctgaggtggacttcacggtcattggtgactaccatggcagcgccttcgaagacttctcccgcagcctgcctgagctcgaccgggacaaaagcgactcggacactgagggcctgctgttctcccgggatctcaacaagggggcccccagccaggatgatgagtctgggggcattgaggacagcccggatcgaggggcctgctccaccccggatatgccccagtttgagcccgtgaaaacagaaaccatgactgtcagcagtctggccattagaaagaagattgagccggaggccgtactgcagaccagagtctccgctatggataacacccagcaggttgatgggagtgcctcagtggggagggagttcatagcaaccactccctccatcaccacggagaccatatcgaccaccatggagaacagtctcaagtccgggaagggggcagctgccatgatcccaggcccacagacggtggccacggaaatccgttctctttctccgatcatcgggaaagatgtcctcaccagcacctacggcgccactgcggaaaccctctcaacctccaccaccacccatgtcaccaaaactgtgaaaggagggttttctgagacaaggatcgagaagcgaatcatcattactggggatgaagatgtcgatcaagaccaggccctggctttggccatcaaggaggccaaactgcagcatcctgatatgctggtaaccaaagctgtcgtatacagagaaacagacccatccccagaggagagggacaagaagccacaggaatcctgacctctgtgaagagatcctggcatttctggtccaacccaagccagagaaccattaagaaggggccttcattctggattctccgacgcaacactgacgtcccagctgcgacgtactgtcactgatgagagactgggaagggaaaagcatatatatatagatatatagagatatagatatatatacaggaaacaccgcatccttgcactgctgctggggctggcagagcagttggctgacagcaacaaccgacatctgaacacctacatttcctttgcagacaaattgaagaactggtgggatttttttcaaaaaaagaaaagaaagcaagaacagaaaacgaagccacaggaagggaagtagacattgtatgcttatggtttctcattatgaaggtgcagcttgtaggaggtttgtacggatgtgctttgaagttatgtatattacatataacaggaaaaaatattaaaataaacagtgctggt

SEQ ID NO: 321295 - protein, 188 aa, Artificial Sequence
  derived and/or modified sequence
MTTETGPDSEVKKAQEEAPQQPEAAAAVTTPVTPAGHGHPEANSNEKHPSQQDTRPAEQSLDMEEKDYSEADGLSERTTPSKAQKSPQKIAKKYKSAICRVTLLDASEYECEVEKHGRGQVLFDLVCEHLNLLEKDYFGLTFCDADSQKNWLDPSKEIKKQIRSSPWNFAFTVKFYPPDPAQLTEDIT

SEQ ID NO: 321296 - protein, 794 aa, Artificial Sequence [sequence omitted]

SEQ ID NO: 321297 - DNA, 2385 bp, Artificial Sequence
  derived and/or modified sequence
atgacgactgaaactggccctgatagtgaagtgaagaaggcccaagaagaggccccccagcagcctgaggccgcagcggctgtgactaccccagtcacccctgcaggacatggccacccagaggctaacagcaatgagaaacaccccagccaacaggacacacgtcctgctgagcagtctctggacatggaagaaaaagactattcggaagcagacgggctgtccgagcgaaccaccccttccaaagctcagaagtctccacaaaagatcgcaaagaagtataaatccgccatatgtcgggttactctcctcgacgcctctgaatacgaatgtgaagtggaaaagcatggtcgggggcaggtcttgttcgacctggtgtgcgaacacctcaacctgctcgagaaagattactttggtctgacattttgtgatgcggactctcaaaaaaactggttggatccttccaaggagatcaagaaacaaatacgaagcagcccatggaatttcgcattcactgtaaaattttacccacccgaccctgcccaacttacggaagatattacacggtactacctgtgtctgcaattacgcgccgacatcatcactggccgcttgccctgttcttttgtgactcacgccctcctggggtcctacgctgtgcaggcagagttgggtgattacgacgccgaagagcacgtggggaactacgttagtgaattaaggtttgcccccaatcagactcgcgaactggaggaacgcatcatggagctgcacaagacgtacaggggaatgacgccaggagaagctgagatccattttttggagaatgcaaagaagctgagcatgtacggagtggatctgcaccacgctaaggactcagaaggcattgatatcatgttgggagtgtgtgccaatgggttgctaatataccgtgatcgccttaggatcaaccggtttgcttggccaaagattctaaaaatctcctataagcgctccaatttttacatcaagatccgacctggtgagtatgaacagttcgaaagcactataggctttaaactgcccaatcataggtcggctaagcggctgtggaaggtttgcattgaacaccatacctttttcaggcttgtaagccctgagcccccgccaaagggcttcctggttatgggaagcaagtttcggtattctggtcggactcaggctcaaacccggcaggccagcgcactgatcgatcgcccagctccattttttgagagatcatcctcaaagcgatacacaatgtcacgatccctggacggggccgagttcagccgcccagcctcagtcagcgagaaccatgacgctggaccagatggagacaagcgggacgaagacggtgagtcgggcggccagaggtccgaggccgaggagggcgaggtgaggacaccaaccaaaataaaggagctcaagcccgaacaggaaaccacccccagacataagcaggaattcctagacaaacccgaggacgtgttactgaagcaccaggcttccatcaatgaactcaagcggacactcaaggagcctaattcgaaactcatccacagggaccgagactgggagcgagaaaggagactaccatcgtcccccgcctcacctagtcctaaggggacccccgagaaagcaaacgagagggctggcctgcgcgagggaagcgaggaaaaggtgaagcctcctcggccacgagcccctgagagcgatacaggcgacgaggaccaagaccaggagagagacactgtattcctgaaggataatcatctggctatcgagaggaagtgctccagcataacagtctccagcacgtcctccctggaggctgaagttgatttcaccgttatcggagattatcacgggtcagccttcgaggatttttcccgatccctgccggagctggatcgggacaagagtgattctgacaccgagggcctgctgttctcccgggacctgaacaaaggggctccctcacaggacgacgaatctgggggtattgaggattcaccggatcggggagcctgcagtacaccagacatgccccagttcgagcccgtgaaaaccgagacgatgacggtcagctctctggccatccgcaaaaagatcgaacctgaagctgtccttcagaccagagtcagtgcaatggacaacacgcaagagaactcgctgaaaagcggaaagggagccgctgccatgatcccaggtccgcaaactgtggctaccgaaataagatccctgagcccttccgcagatcaccgggagagatgcccacatcagcaccttagaaggcattgtgggaatccgctcaatctgcaccaccacccctgtcaccagaattgtgaacggcgcgtgttctag

SEQ ID NO: 321298 - DNA, 2385 bp, Artificial Sequence
  derived and/or modified sequence
atgaccacagaaacaggcccagattctgaggtgaagaaggcccaggaggaggccccccagcagcctgaggccgctgctgctgtgaccacccctgtgaccccagctggccacggccaccctgaggccaacagcaatgagaagcaccccagccagcaggacaccaggcctgctgagcagagcctggacatggaggagaaggactacagcgaggctgatggcctgtctgagaggaccacccccagcaaggcccagaagagcccccagaagatcgccaagaagtacaagagcgccatctgccgggtgaccctgctggatgcctctgaatatgaatgtgaggtggagaagcacggccggggccaggtgctgtttgacctggtgtgtgagcacctgaacctgctggagaaggactacttcggcctgaccttctgtgatgctgacagccagaagaactggctggaccccagcaaggagatcaagaagcagatccgcagcagcccctggaactttgccttcaccgtgaagttctaccccccagaccctgcccagctgacagaggacatcacccgctactacctgtgcctgcagctgcgggctgacatcatcaccggccgcctgccctgcagctttgtgacccacgccctgctgggcagctatgctgtgcaggccgagctgggggactatgatgctgaggagcacgtgggcaactacgtgtctgagctgcgctttgcccccaaccagacccgggagctggaggagcgcatcatggagctgcacaagacctaccggggcatgaccccaggagaggccgagatccacttcctggagaatgccaagaagctgtccatgtatggagtggacctgcaccacgccaaggacagcgagggcatcgacatcatgctgggcgtgtgtgccaacggcctgctgatctacagagaccggctgcgcatcaacagatttgcctggcccaagatcctgaagatctcctacaagaggagcaacttctacatcaagatccggcctggagaatatgagcagtttgagagcaccatcggcttcaagctgcccaaccacaggtctgccaagaggctgtggaaggtgtgcatcgagcaccacaccttcttccggctggtgtccccagagcccccacccaagggcttcctggtgatgggcagcaagttccgctacagcggccgcacccaggcccagacccggcaggccagcgccctgattgacaggcctgcccccttctttgagaggagcagcagcaagcgctacaccatgagccgcagcctggatggagctgagttcagcaggcctgcctctgtgtctgagaaccatgatgctggcccagatggagacaagagagatgaagatggagagagcggcggccagaggtctgaggccgaggagggggaggtgaggacccccaccaagatcaaggagctgaagccagagcaggagaccacccccaggcacaagcaggagttcctggacaagccagaagatgtgctgctgaagcaccaggccagcatcaatgagctgaagaggaccctgaaggagcccaacagcaagctgatccaccgggaccgggactgggagcgggagcggcggctgcccagcagccctgccagccccagccccaagggcaccccagagaaggccaatgaaagagctggcctgcgggagggcagcgaggagaaggtgaagccaccccggccccgggcccctgagagtgacacaggagatgaggaccaggaccaggagcgggacacagtgttcctgaaggacaaccacctggccattgaaaggaagtgcagcagcatcaccgtgagcagcaccagcagcctggaggccgaggtggacttcaccgtgattggagactaccacggcagcgcctttgaggacttcagccgcagcctgcctgagctggaccgggacaagagtgacagcgacacagagggcctgctcttcagccgggacctgaacaagggggcccccagccaggatgatgagagcggcggcatcgaggacagcccagacagaggagcctgcagcaccccagacatgccccagtttgagcctgtgaagacagagaccatgacagtgagcagcctggccatcaggaagaagattgagcctgaggccgtgctgcagaccagggtgtctgccatggacaacacccaggagaacagcctgaagagcgggaaaggagctgctgccatgatccctggcccccagacagtggccacagagatccgcagcctgagccccagcgctgaccaccgggagcgctgcccccaccagcacctgcggcggcactgcggcaaccccctgaacctgcaccaccacccctgccaccagaactgtgaaagaagagtcttctag

SEQ ID NO: 321299 - DNA, 2385 bp, Artificial Sequence
  derived and/or modified sequence
atgaccaccgagaccggccccgacagcgaggtgaagaaggcccaggaagaagcaccgcagcagcccgaggctgcagcggcggtgacaacccccgtgacccccgcaggacatggccatcccgaagctaactctaatgagaaacatcccagccagcaggacaccagacctgcggaacaatccctagacatggaggagaaagactacagcgaagcagatgggctgagcgaaagaacaactccaagcaaagcccagaagagccctcagaaaattgcaaaaaagtataaatctgcaatctgtcgggtgactcttttggacgcatctgaatacgagtgcgaggtcgagaagcatggacggggccaggtccttttcgatctggtttgcgagcacttgaatctgctcgagaaagactatttcgggcttacattctgcgacgctgattctcagaagaactggctggatccatccaaagaaattaaaaagcaaattcggagttccccatggaacttcgccttcactgtcaagttttatcccccggaccccgcacaactgacggaggatattactcgctattacctctgcctgcagctcagggccgacatcatcacagggaggcttccctgctccttcgtgacgcacgccctgttgggctcatacgcggtacaggccgaactgggggattacgatgccgaagaacacgtaggtaactacgtgagcgagctgagattcgcacctaaccaaactagggagctcgaggagcgcattatggaactacataaaacgtaccgaggaatgactcccggtgaagctgagatccattttctggagaacgccaagaagctttccatgtacggcgtggaccttcaccacgcgaaggactccgagggtatcgacattatgcttggtgtttgcgccaacggtctgctaatctacagggacaggctgagaataaacagatttgcctggccaaaaattctcaaaatttcctacaagaggtcaaacttctacattaagatcaggcctggcgagtacgaacagtttgagagtacgatcggcttcaaactcccaaatcataggtccgccaagcgtctttggaaggtgtgcatcgagcaccataccttttttcgcctggtctcacccgagcctccccctaaaggcttccttgttatggggtctaaatttcggtattccggaaggactcaggcgcagactagacaggcatctgcccttatcgatcggccggcccctttttttgaacgcagcagcagcaagcggtacacaatgagccggagcttggatggcgcagagttctccaggcccgcctccgtctccgagaatcacgacgccgggcccgatggggacaagagggatgaggatggagagagcggcggccagcggagcgaggccgaagaaggcgaagtgcgcactcccaccaagattaaggagctgaaaccagagcaggaaaccacccccagacacaaacaggagttcctcgataaaccggaggatgtactcctaaagcatcaggcgagcataaacgagcttaaacgcaccctgaaggagcccaattccaagcttatccaccgggacagagactgggagcgggagcggcgtctgcccagcagcccagcctctcccagccccaaaggcacaccagaaaaggccaacgagcgcgctggcctgcgagagggaagcgaggaaaaggtgaagcccccaagaccccgggcccctgagtccgacacgggcgatgaagaccaggaccaagagcgcgatacggtctttcttaaagataatcatctcgccatcgagcgaaagtgcagctccattacagttagctcaacttcctccttggaagccgaagtggattttaccgtgataggcgattaccatggctcagccttcgaggatttctctaggtctttacccgaacttgatagagataaatctgacagcgacaccgaaggactgctgttttcacgagatcttaataaaggagctccgagccaagacgatgagagtgggggaattgaagattcacccgaccggggcgcctgctcaactcccgatatgccccagttcgagccggtgaagaccgaaaccatgacagtctcttccctggcaatcaggaaaaagattgagcccgaagcagttctgcaaaccagagtgagtgccatggacaacacccaggagaatagcctcaaaagtgggaaaggtgccgcagccatgattcccggccctcaaactgttgcaactgagattcggagtctcagcccttctgctgaccatagagagcgctgtccacaccagcacttgaggagacactgtggtaatcccctgaacctgcatcaccacccttgtcatcaaaactgtgaaaggcgggtcttttag

SEQ ID NO: 321300 - DNA, 2385 bp, Artificial Sequence
  derived and/or modified sequence
atgactaccgaaaccggccctgacagtgaagtgaaaaaggcgcaggaggaagccccacaacagcctgaggcggctgctgccgtgaccaccccagttacaccagccggtcacggacatcctgaggcaaattccaacgagaaacatccctctcagcaggacacccgccctgcagaacagagcttggacatggaggagaaagattacagtgaggcagacggcttgtcagagaggaccacgccctctaaagctcaaaagagccctcagaagatcgccaagaaatataagtcagccatctgcagggtgacgctccttgacgcaagcgaatacgagtgcgaggtcgaaaagcacggcaggggtcaagtgctgttcgatctggtttgcgaacatctgaaccttctcgagaaagactattttggtctgaccttttgtgacgccgattcacagaagaattggctggatccaagtaaagaaatcaagaagcagatacggagctctccatggaacttcgccttcactgtcaaattctacccacctgatccagctcaactaaccgaagacatcaccagatattatctatgcctacagctgcgggctgatatcataacgggccgtcttccttgtagcttcgtgacgcacgcacttctcggttcctacgcagtccaggccgagttgggtgactatgacgccgaggaacacgtggggaactacgtgagcgagttgcgtttcgcacctaatcagaccagggagctggaggagagaattatggagctgcacaaaacctaccggggaatgacaccaggcgaggcagagattcacttccttgaaaatgccaagaaactgagcatgtacggggttgaccttcaccacgccaaggactctgagggcatcgacattatgcttggagtttgcgccaacggactactcatttatcgtgatcgcctgaggatcaaccgatttgcttggccaaaaatcctaaagatatcctacaaacgatcaaatttctatattaagattcggccaggcgaatacgagcagttcgagtccacaatcggatttaaattgccaaatcatcggtctgctaaaagattgtggaaagtgtgcatcgagcaccacacttttttcagacttgtcagcccggagccacctcccaaggggtttttggtgatgggcagcaaatttcgatattcagggcgtacccaggcccagacgcgacaggcttcggctctaatcgatcgcccagctccatttttcgagagatcttcctccaaacgctacaccatgagccggtcccttgatggcgctgaattctctcgcccagccagcgtcagtgagaaccacgacgctgggcctgatggcgacaaacgtgacgaagatggggaaagcggagggcagcgaagtgaggcggaagaaggcgaggttagaacccccaccaagattaaggagctcaagccagaacaagaaacaactccacgtcacaaacaggagttcctggataagcctgaggacgtgctgcttaagcaccaggcttccattaacgagctgaaacggacattaaaggagccaaacagtaagttgatccaccgtgaccgcgattgggaaagggagagaaggctgccatctagtcccgcttcgcccagtcctaaaggtacacccgagaaggctaatgagcgggcaggactccgcgaaggcagtgaagaaaaagttaagcccccaaggccgcgagccccagaatcggacacaggcgatgaggaccaagatcaggagcgcgatactgtatttttgaaggataaccacctggcaattgagcgcaagtgctccagcatcacagtatcaagtacatccagcctggaggccgaggtagactttaccgtcatcggagattaccatggatctgcattcgaggatttttcccgctcactcccagagctggatcgcgacaagtctgatagtgacactgagggtctgctgttttcacgcgaccttaataaaggtgccccttcccaggacgacgagtctgggggaatagaagacagcccggacaggggcgcttgttcaacccccgatatgcctcagttcgagcccgtcaagacggagacaatgacggtttcatccttggcgattagaaagaagatcgagccggaggctgtgttgcagacacgcgtaagcgctatggacaacacccaggagaactcactcaagagcgggaagggtgctgcggcaatgattcccggtccccagaccgttgccacagagatcaggagtctcagccccagtgccgaccatcgcgagcgctgtccccatcaacatctccggaggcactgtgggaacccactcaacttacaccaccatccctgtcaccaaaactgtgagagaagggtgttttag

SEQ ID NO: 321301 - DNA, 2385 bp, Artificial Sequence
  derived and/or modified sequence
atgaccaccgagaccggccccgacagcgaggtgaagaaggcccaggaggaggccccccagcagcccgaggccgccgccgccgtgaccacccccgtgacccccgccggccacggccaccccgaggccaacagcaacgagaagcaccccagccagcaggacaccagacccgccgagcagagcctggacatggaggagaaggactacagcgaggccgacggcctgagcgagagaaccacccccagcaaggcccagaagagcccccagaagatcgccaagaagtacaagagcgccatctgcagagtgaccctgctggacgccagcgagtacgagtgcgaggtggagaagcacggcagaggccaggtgctgttcgacctggtgtgcgagcacctgaacctgctggagaaggactacttcggcctgaccttctgcgacgccgacagccagaagaactggctggaccccagcaaggagatcaagaagcagatcagaagcagcccctggaacttcgccttcaccgtgaagttctacccccccgaccccgcccagctgaccgaggacatcaccagatactacctgtgcctgcagctgagagccgacatcatcaccggcagactgccctgcagcttcgtgacccacgccctgctgggcagctacgccgtgcaggccgagctgggcgactacgacgccgaggagcacgtgggcaactacgtgagcgagctgagattcgcccccaaccagaccagagagctggaggagagaatcatggagctgcacaagacctacagaggcatgacccccggcgaggccgagatccacttcctggagaacgccaagaagctgagcatgtacggcgtggacctgcaccacgccaaggacagcgagggcatcgacatcatgctgggcgtgtgcgccaacggcctgctgatctacagagacagactgagaatcaacagattcgcctggcccaagatcctgaagatcagctacaagagaagcaacttctacatcaagatcagacccggcgagtacgagcagttcgagagcaccatcggcttcaagctgcccaaccacagaagcgccaagagactgtggaaggtgtgcatcgagcaccacaccttcttcagactggtgagccccgagcccccccccaagggcttcctggtgatgggcagcaagttcagatacagcggcagaacccaggcccagaccagacaggccagcgccctgatcgacagacccgcccccttcttcgagagaagcagcagcaagagatacaccatgagcagaagcctggacggcgccgagttcagcagacccgccagcgtgagcgagaaccacgacgccggccccgacggcgacaagagagacgaggacggcgagagcggcggccagagaagcgaggccgaggagggcgaggtgagaacccccaccaagatcaaggagctgaagcccgagcaggagaccacccccagacacaagcaggagttcctggacaagcccgaggacgtgctgctgaagcaccaggccagcatcaacgagctgaagagaaccctgaaggagcccaacagcaagctgatccacagagacagagactgggagagagagagaagactgcccagcagccccgccagccccagccccaagggcacccccgagaaggccaacgagagagccggcctgagagagggcagcgaggagaaggtgaagccccccagacccagagcccccgagagcgacaccggcgacgaggaccaggaccaggagagagacaccgtgttcctgaaggacaaccacctggccatcgagagaaagtgcagcagcatcaccgtgagcagcaccagcagcctggaggccgaggtggacttcaccgtgatcggcgactaccacggcagcgccttcgaggacttcagcagaagcctgcccgagctggacagagacaagagcgacagcgacaccgagggcctgctgttcagcagagacctgaacaagggcgcccccagccaggacgacgagagcggcggcatcgaggacagccccgacagaggcgcctgcagcacccccgacatgccccagttcgagcccgtgaagaccgagaccatgaccgtgagcagcctggccatcagaaagaagatcgagcccgaggccgtgctgcagaccagagtgagcgccatggacaacacccaggagaacagcctgaagagcggcaagggcgccgccgccatgatccccggcccccagaccgtggccaccgagatcagaagcctgagccccagcgccgaccacagagagagatgcccccaccagcacctgagaagacactgcggcaaccccctgaacctgcaccaccacccctgccaccagaactgcgagagaagagtgttctag

SEQ ID NO: 321302 - DNA, 2677 bp, Artificial Sequence
  derived and/or modified sequence
gcatttctgcgcagctctagcgcgcctcggagcccgccggggcagccgccggacaccaggaccgcgagccagacagctcccggaagccgcgccgccgccgccaggcgtgctggtcaccatgacaacagagacaggccccgactctgaggtgaagaaagctcaggaggaggccccgcagcagcccgaggctgctgccgctgtgaccacccctgtgacccctgcaggccacggccacccagaggccaactccaatgagaagcatccatcccagcaggacacgcggcctgctgaacagagcctagacatggaggagaaggactacagtgaggccgatggcctttcggagaggaccacgcccagcaaggcccagaaatcgccccagaagattgccaagaaatacaagagtgccatctgccgggtcactctgcttgatgcctcggagtatgagtgtgaggtggagaaacatggccggggccaggtgctgtttgacctggtctgtgaacacctcaacctcctagagaaggactacttcggcctgaccttctgtgatgctgacagccagaagaactggctggacccctccaaggagatcaagaagcagatccggagtagcccctggaattttgccttcacagtcaagttctacccgcctgatcctgcccagctgacagaagacatcacaagatactacctgtgcctgcagctgcgggcagacatcatcacgggccggctgccatgctcctttgtcacgcatgccctactgggctcctacgctgtgcaggctgagctgggtgactatgatgctgaggagcatgtgggcaactatgtcagcgagctccgcttcgcccctaaccagacccgggagctggaggagaggatcatggagctgcataagacatatagggggatgaccccgggagaagcagaaatccacttcttagagaatgccaagaagctttccatgtacggagtagacctgcaccatgccaaggactctgagggcatcgacatcatgttaggcgtttgtgccaatggcctgctcatctaccgggaccggctgagaatcaaccgctttgcctggcccaagatcctcaagatctcctacaagaggagtaacttctatatcaagatccggcctggggagtatgagcaatttgagagcacaattggctttaagctcccaaaccaccggtcagccaagagactgtggaaggtctgcatcgagcatcatacattcttccggctggtgtcccctgagcccccacccaagggcttcctggtgatgggctccaagttccggtacagtgggaggacccaggcacagactcgccaggccagcgccctcattgaccggcctgcacccttctttgagcgttcttccagcaaacggtacaccatgtcccgcagccttgatggagcagagttctcccgcccagcctcggtcagcgagaaccatgatgcagggcctgacggtgacaagcgggatgaggatggcgagtctggggggcaacggtcagaggctgaggagggagaggtcaggactccaaccaagatcaaggagctaaagccggagcaggaaaccacgccgagacacaagcaggagttcttagacaagccagaagatgtcttgctgaagcaccaggccagcatcaatgagctcaaaaggaccctgaaggagcccaacagcaaactcatccaccgggatcgagactgggaacgggagcgcaggctgccctcctcccccgcctccccctcccccaagggcacccctgagaaagccaatgagagagcagggctgagggagggctccgaggagaaagtcaaaccaccacgtccccgggccccagagagtgacacaggcgatgaggaccaggaccaggagagggacacggtgttcctgaaggacaaccacctggccattgagcgcaagtgctccagcatcacggtcagctctacgtctagcctggaggctgaggtggacttcacggtcattggtgactaccatggcagcgccttcgaagacttctcccgcagcctgcctgagctcgaccgggacaaaagcgactcggacactgagggcctgctgttctcccgggatctcaacaagggggcccccagccaggatgatgagtctgggggcattgaggacagcccggatcgaggggcctgctccaccccggatatgccccagtttgagcccgtgaaaacagaaaccatgactgtcagcagtctggccattagaaagaagattgagccggaggccgtactgcagaccagagtctccgctatggataacacccaggagaacagtctcaagtccgggaagggggcagctgccatgatcccaggcccacagacggtggccacggaaatccgttctctttctccgtctgcagatcatcgggaaagatgtcctcaccagcacctacggcgccactgcggaaaccctctcaacctccaccaccacccatgtcaccaaaactgtgaaaggagggttttctgagacaaggatcgagaagcgaatcatcattactggggatgaagatgtcgatcaagaccaggccctggctttggccatcaaggaggccaaactgcagcatcctgatatgctggtaaccaaagctgtcgtatacagagaaacagacccatccccagaggagagggacaagaagccaca

SEQ ID NO: 321303 - protein, 779 aa, Artificial Sequence
  derived and/or modified sequence
MEEKDYSEADGLSERTTPSKAQKSPQKIAKKYKSAICRVTLLDASEYECEVEKHGRGQVLFDLVCEHLNLLEKDYFGLTFCDADSQKNWLDPSKEIKKQIRSSPWNFAFTVKFYPPDPAQLTEDITRYYLCLQLRADIITGRLPCSFVTHALLGSYAVQAELGDYDAEEHVGNYVSELRFAPNQTRELEERIMELHKTYRGMTPGEAEIHFLENAKKLSMYGVDLHHAKDSEGIDIMLGVCANGLLIYRDRLRINRFAWPKILKISYKRSNFYIKIRPGEYEQFESTIGFKLPNHRSAKRLWKVCIEHHTFFRLVSPEPPPKGFLVMGSKFRYSGRTQAQTRQASALIDRPAPFFERSSSKRYTMSRSLDGAEFSRPASVSENHDAGPDGDKRDEDGESGGQRSEAEEGEVRTPTKIKELKFLDKPEDVLLKHQASINELKRTLKEPNSKLIHRDRDWERERRLPSSPASPSPKGTPEKANERAGLREGSEEKVKPPRPRAPESDTGDEDQDQERDTVFLKDNHLAIERKCSSITVSSTSSLEAEVDFTVIGDYHGSAFEDFSRSLPELDRDKSDSDTEGLLFSRDLNKGAPSQDDESGGIEDSPDRGACSTPDMPQFEPVKTETMTVSSLAIRKKIEPEAVLQTRVSAMDNTQENSLKSGKGAAAMIPGPQTVATEIRSLSPIIGKDVLTSTYGATAETLSTSTTTHVTKTVKGGFSETRIEKRIIITGDEDVDQDQALALAIKEAKLQHPDMLVTKAVVYRETDPSPEERDKKPQES

SEQ ID NO: 321304 - DNA, 2340 bp, Artificial Sequence
  derived and/or modified sequence
atggaggagaaagactactcagaggcagacgggctctccgagagaacaactcccagcaaggcccagaagtctccacagaagatcgccaaaaaatataaatccgccatttgtcgagtcacactgctcgatgcgtccgaatatgaatgcgaggtagagaaacacgggagagggcaggttctgtttgatttggtctgtgagcacttgaacctgctcgagaaagactattttggcctgaccttctgcgatgccgacagccagaagaactggctggacccgtcaaaagagataaagaagcaaataagaagctcaccatggaactttgccttcacagtcaagttttatcctcctgatcccgcgcagctgaccgaggatatcacccggtactatctgtgcttgcagctgcgcgctgatatcataactggcagacttccttgctcttttgtgacacacgctttgctcggctcttatgcagtccaagctgagctgggtgactatgacgcagaagagcatgttggcaactacgtgagcgagctgcgctttgctccgaaccaaactcgtgagctagaggaacggatcatggagttacataagacgtacaggggcatgacgcccggggaggcagaaatccactttctggaaaacgctaagaagttatccatgtacggggtggacctacaccacgctaaagactctgagggaattgatattatgctgggggtgtgcgcgaacggtctgttaatttatcgagaccgcctccgtattaataggtttgcctggcccaagattctgaaaatcagctacaaaaggtccaatttctacatcaaaatcagacccggtgagtacgaacagttcgagtccaccatcggatttaaactgcccaatcatcgatctgctaagcgcctctggaaggtgtgtatcgagcatcacaccttctttcgtttggtgtccccagaacccccccctaaaggtttcctggtcatgggaagcaaatttcgttactccggccggacacaggcacagacacgacaggcctctgcccttatcgataggcccgcaccttttttcgaacggtcctcatcgaaaagatacactatgagtcggtctctggatggagcggagttctccagacccgccagcgtgagcgagaatcacgatgccggtcccgatggagacaagagggatgaggatggagaaagcgggggccagcggagtgaggcagaagaaggcgaagttcgcactcctaccaaaattaaagagctcaaattcttagacaaacctgaggacgtgcttctgaaacaccaggcaagcataaacgaactaaaacgcaccctcaaggagccaaattctaagctaattcatagggacagggactgggagagggagaggaggttgcccagttctcctgcgagccctagtcctaaaggaacgcctgagaaagcaaatgagcgcgccgggctgagagagggcagcgaagagaaggtaaaaccaccccgaccacgcgcacccgaatcagacacaggtgacgaagatcaggatcaggaacgcgacacagtatttttgaaggacaaccacctagccatcgaacgaaagtgttccagcattaccgtatcttcaacgtcaagcctcgaagccgaggtggacttcacggtcattggggactaccacggatctgcttttgaggatttcagccgttctctgcccgagttggatagggataagagcgactcagataccgaagggctgctattctccagagatctcaacaagggcgcaccctcacaggacgatgagagcggaggaattgaggactcgcctgaccgcggggcttgttccacgccagacatgccccagtttgagcccgtgaaaacagaaaccatgactgtcagcagcctggctatccggaagaagatcgagccagaagcagtcctacagacgcgcgtgagtgccatggacaacacccaagagaattctctcaagtctggaaagggcgctgccgcaatgatccctggccctcagaccgtggccacagagatccgttctctgtcacccattatcgggaaagacgtgctcacctccacatacggggcgaccgctgagaccctgagtacttcaacaacaacacacgtgacaaaaactgtgaagggtggattcagtgagacgcgaatcgaaaagcgaatcatcattacaggtgatgaggacgttgatcaggaccaggctttggcactggccattaaggaggccaagctgcaacaccccgacatgctcgttacaaaggcagtcgtgtacagagaaactgatcccagccctgaggaacgggacaaaaagcctcaagaatcctag

SEQ ID NO: 321305 - DNA, 2340 bp, Artificial Sequence
  derived and/or modified sequence
atggaggagaaggattacagcgaagctgatgggctcagcgagaggaccacaccttctaaagctcagaagtctccccagaaaattgcaaaaaagtacaaatccgctatctgtagagtcactcttctggatgcaagcgagtacgaatgcgaggtcgaaaaacatggccgggggcaggtcctgtttgacctggtgtgcgaacacctcaaccttctggaaaaggactatttcggcctcactttttgcgacgcggactcccagaagaattggctggacccgtctaaggagatcaagaagcagatccgctcttccccctggaattttgccttcactgtgaagttctaccctcctgatcctgcccagttgactgaggacataacccgctactatctttgcctgcagctgcgcgccgatatcattaccggtcgtctgccatgttccttcgtgacccacgcattgctgggaagctatgccgtgcaggccgaactgggagattacgacgccgaagagcatgtgggcaactatgtaagcgaactgcgattcgctcccaatcagactagggaactggaagagcggatcatggagttacataaaacttaccgaggcatgacgcccggagaagctgagatacacttcttagagaatgcaaagaagttgtccatgtacggcgtggatctacaccatgcaaaggattctgagggtattgacatcatgctcggcgtgtgcgctaacggcctcttgatttaccgggaccgtctacgtataaatagattcgcatggccgaaaattctgaagatttcttacaaaaggtcgaatttctacatcaaaatccggccaggcgagtatgaacaattcgaatcaaccattggatttaaactgccaaaccatagaagtgccaagagactgtggaaagtctgcatcgaacatcacacattttttcgtctagtcagtcccgaaccaccgcctaagggatttctcgtcatgggcagcaaatttcgttatagtggtaggacccaggctcagacacgtcaggccagtgcactcatcgatcggccagccccttttttcgagcgctcatccagcaagaggtataccatgtctaggagcctcgatggcgctgagttcagcaggcccgccagtgtgagtgagaaccatgacgctggacctgacggcgacaaacgggatgaagacggagaaagtggtggtcagcgatctgaggccgaggagggggaggtaaggactcccactaagattaaggaactgaagtttctagacaaacccgaggacgtgcttttgaaacaccaagcctcaattaacgaattgaagcggacccttaaggagcctaatagcaaactgatccacagggacagagattgggaaagggagcggcggttaccttccagcccggcctccccatcccctaagggcacccccgagaaggctaacgaacgtgccggactacgagagggtagcgaagagaaagttaaacccccccgcccccgcgcaccagagagtgatacaggagacgaggaccaggaccaggaacgggacactgtcttcctgaaagataaccaccttgcgatcgaaagaaagtgtagcagtatcacagtctcatccacgtcgtctctggaagccgaagtggactttaccgtcattggagattaccacggttcagcctttgaagatttttcacgcagcctgcccgaactggatagagacaagagcgactccgacacagaaggtctcctgttctcccgggatctgaataagggagccccaagccaggatgatgagtctggcgggatcgaggactccccagatcgtggagcctgttcaacacccgacatgccacagtttgagcccgtaaagaccgagaccatgactgtgtcatcccttgcaatccggaaaaaaattgagcctgaggctgtcctgcaaacccgagtgtcagcaatggacaacacccaggagaactccctgaaaagcggaaaaggggccgccgctatgatccctggcccacagacagtcgcaacagaaattcggtctttgtccccaattattgggaaagatgtcttaaccagtacatacggcgccacggccgaaaccctttctactagcacgactacccacgtgacaaaaaccgtgaagggcgggttcagtgagacacgaatcgagaagcgtattatcatcaccggagatgaggacgtggaccaggaccaggctcttgcactggcaatcaaagaggcgaaactacagcatcccgatatgcttgtcaccaaggcagtggtgtaccgggagacagatcctagccccgaagaacgggataagaagccgcaagaatcctag

SEQ ID NO: 321306 - DNA, 2340 bp, Artificial Sequence
  derived and/or modified sequence
atggaggagaaggactacagcgaggctgatggcctgtctgagaggaccacccccagcaaggcccagaagagcccccagaagatcgccaagaagtacaagagcgccatctgccgggtgaccctgctggatgcctctgaatatgaatgtgaggtggagaagcacggccggggccaggtgctgtttgacctggtgtgtgagcacctgaacctgctggagaaggactacttcggcctgaccttctgtgatgctgacagccagaagaactggctggaccccagcaaggagatcaagaagcagatccgcagcagcccctggaactttgccttcaccgtgaagttctaccccccagaccctgcccagctgacagaggacatcacccgctactacctgtgcctgcagctgcgggctgacatcatcaccggccgcctgccctgcagctttgtgacccacgccctgctgggcagctatgctgtgcaggccgagctgggggactatgatgctgaggagcacgtgggcaactacgtgtctgagctgcgctttgcccccaaccagacccgggagctggaggagcgcatcatggagctgcacaagacctaccggggcatgaccccaggagaggccgagatccacttcctggagaatgccaagaagctgtccatgtatggagtggacctgcaccacgccaaggacagcgagggcatcgacatcatgctgggcgtgtgtgccaacggcctgctgatctacagagaccggctgcgcatcaacagatttgcctggcccaagatcctgaagatctcctacaagaggagcaacttctacatcaagatccggcctggagaatatgagcagtttgagagcaccatcggcttcaagctgcccaaccacaggtctgccaagaggctgtggaaggtgtgcatcgagcaccacaccttcttccggctggtgtccccagagcccccacccaagggcttcctggtgatgggcagcaagttccgctacagcggccgcacccaggcccagacccggcaggccagcgccctgattgacaggcctgcccccttctttgagaggagcagcagcaagcgctacaccatgagccgcagcctggatggagctgagttcagcaggcctgcctctgtgtctgagaaccatgatgctggcccagatggagacaagagagatgaagatggagagagcggcggccagaggtctgaggccgaggagggggaggtgaggacccccaccaagatcaaggagctgaagttcctggacaagccagaagatgtgctgctgaagcaccaggccagcatcaatgagctgaagaggaccctgaaggagcccaacagcaagctgatccaccgggaccgggactgggagcgggagcggcggctgcccagcagccctgccagccccagccccaagggcaccccagagaaggccaatgaaagagctggcctgcgggagggcagcgaggagaaggtgaagccaccccggccccgggcccctgagagtgacacaggagatgaggaccaggaccaggagcgggacacagtgttcctgaaggacaaccacctggccattgaaaggaagtgcagcagcatcaccgtgagcagcaccagcagcctggaggccgaggtggacttcaccgtgattggagactaccacggcagcgcctttgaggacttcagccgcagcctgcctgagctggaccgggacaagagtgacagcgacacagagggcctgctcttcagccgggacctgaacaagggggcccccagccaggatgatgagagcggcggcatcgaggacagcccagacagaggagcctgcagcaccccagacatgccccagtttgagcctgtgaagacagagaccatgacagtgagcagcctggccatcaggaagaagattgagcctgaggccgtgctgcagaccagggtgtctgccatggacaacacccaggagaacagcctgaagagcgggaaaggagctgctgccatgatccctggcccccagacagtggccacagagatccgcagcctgagccccatcatcggcaaggatgtgctgaccagcacctacggggccacagctgagaccctgagcaccagcaccaccacccacgtgaccaagacagtgaagggcggcttcagcgagacccgcatcgagaagaggatcatcatcactggagatgaagatgtggaccaggaccaggccctggccctggccatcaaggaggccaagctgcagcacccagacatgctggtgaccaaggctgtggtgtaccgggagacagaccccagccctgaggagcgggacaagaagccccaggagagctag

SEQ ID NO: 321307 - DNA, 2340 bp, Artificial Sequence
  derived and/or modified sequence
atggaggagaaggactacagcgaggccgacggcctgagcgagcggactactccaagcaaagcccagaagagtcctcagaaaatcgccaaaaagtataagagcgctatctgcagggtcacactgttggatgcttccgaatatgagtgcgaagtggaaaagcacggccgtggtcaggttctctttgaccttgtatgcgagcatctgaatctcctcgaaaaggattattttggattaactttctgtgacgccgattctcaaaagaactggctggaccccagtaaggagatcaaaaagcagattcgatcaagcccttggaattttgcatttaccgtgaagttctacccacctgatcccgctcagcttaccgaggatatcactcgctattacctgtgtcttcagctgcgggccgacataattaccggacgactgccgtgtagcttcgtgactcatgcgttgctggggagctacgcagtgcaagcggaactcggtgattatgatgccgaggagcacgtgggcaactatgtctctgagttgagatttgcgccaaatcagacccgggaattggaggagaggattatggagctgcacaagacatatagggggatgactcccggagaggctgaaatccacttccttgagaacgctaagaaactgagtatgtatggcgttgacctacatcatgctaaagacagtgagggcatcgacatcatgttaggcgtctgcgctaatggcttgctgatttacagggatcgcctccgcatcaataggtttgcctggccaaagatcctgaagatttcttacaaacgctccaacttctatatcaagatccgccccggcgaatacgagcagtttgagtctactataggctttaagctgcctaaccataggtccgctaagagactttggaaggtatgtatcgaacaccacaccttttttcgcctagttagcccagagccacccccgaagggctttctggtgatgggttcaaaatttaggtatagcggcaggactcaggcgcaaaccaggcaagcttctgctttgattgaccgccccgcacctttctttgaaagatcaagttccaaacgctacactatgtctagatctcttgatggtgctgaattctcccgccctgcttccgtgtctgagaatcacgacgccgggcctgatggcgataagagagatgaagatggagaatcagggggccagcgctcagaagctgaggagggcgaggtacggacaccgaccaaaattaaagaactgaaatttctggacaaacctgaggatgtgttgttgaaacaccaggcgtcgatcaacgaactgaagaggacactgaaggaaccgaatagtaagctaatccacagggaccgcgactgggaaagggaacgccggctgccttcatcacctgcctctccttcccccaaagggactcccgagaaagcaaacgagagagctggactgagagaaggttccgaggagaaggtgaagccaccacggcctagagcacccgaaagtgacacgggtgacgaagatcaagaccaggagcgggacaccgtgtttctgaaggacaaccacctggctattgagagaaagtgcagctcaattacggtgtcatcaacttcatcactagaggccgaggtggatttcactgttatcggggactaccacggaagcgcctttgaagacttcagccggtcactccccgaactcgatcgtgataagagcgacagcgatactgagggacttctgttttctcgagacctgaataagggtgctccatcgcaggacgatgaatcaggtggcattgaggacagtccagaccggggagcctgctccacgcctgacatgccacaatttgagccagtgaaaaccgagactatgactgtgtcctctctcgcaatacggaaaaagatagaacctgaagccgtgctgcaaaccagggtttcagcgatggacaacacccaagagaactctctgaagtcaggaaagggagccgccgccatgatcccgggccctcaaactgtcgcaacggagattcggagcctgagtccgatcatcgggaaagacgtgttgactagcacctatggcgccactgctgaaacacttagtacatccaccactacccacgtgactaagactgtcaagggtggtttctccgagacacgcatagaaaaacgtatcataatcaccggcgatgaggatgtggaccaggatcaagccctggccctggctataaaagaggccaagctgcagcatcctgatatgcttgtgacgaaagctgtggtgtacagagaaactgacccatcccctgaagagagagataaaaagccgcaggaaagctag

SEQ ID NO: 321308 - DNA, 2340 bp, Artificial Sequence
  derived and/or modified sequence
atggaggagaaggactacagcgaggccgacggcctgagcgagcggaccacacccagcaaagcccaaaagtctccacagaagattgctaagaagtacaagtctgcgatctgcagggtgactctgctggacgcatctgagtatgaatgcgaggtggaaaagcatgggcgagggcaagtgctttttgacctggtctgcgaacacctgaacctgctggaaaaggactattttgggctcaccttttgtgacgccgatagccagaagaactggctagacccctccaaggagatcaaaaaacagattaggtcctcaccctggaacttcgcatttacagtgaagttttacccccctgatcctgcccaactcacagaagacattactcgttactacctgtgcctacagttacgggcagatatcatcacaggacgattgccatgctctttcgttacacacgcactcctgggctcttatgcggtgcaagcagagcttggagattatgatgccgaggagcacgtcggtaattacgtgagcgagctgcgctttgcccccaatcaaacgcgagagcttgaagagcggatcatggaactgcacaagacctatagaggcatgaccccaggtgaagccgaaattcactttttggaaaatgcgaaaaagctttccatgtacggcgttgacctgcaccacgcaaaggattctgaagggatcgatatcatgcttggagtgtgcgcgaacggactgctgatttatagagacagactgagaatcaatcgattcgcctggcctaagattctcaaaatcagctacaaaagatccaatttttacatcaaaattcgaccgggggaatacgaacagttcgagagcaccatcggatttaagctgcccaaccaccggtccgccaagcgtctgtggaaggtgtgcatcgaacaccacacattttttcgattggtttcccccgagcctccgcccaaggggtttctggtgatggggtcaaagttccgatattcaggaagaactcaggcccagaccagacaggctagtgccctaatagaccgtcccgcacccttttttgagagatcgtcctctaaacgctacaccatgtcccgatccctggacggtgctgagttttcaaggccggcctcagtaagtgaaaaccatgatgccggaccagacggagacaagagagatgaggacggcgagagtggcggccagagatccgaggcagaagagggtgaggtacgtacccccactaagattaaggaactcaaatttctggacaaacccgaggacgtgctgctgaagcatcaggcctcaataaacgaattgaagcggactctgaaagaacctaactccaagctcatccaccgggatcgggactgggagagagaacgacgcttgccttccagtccagcaagtccatcaccaaagggcactcccgagaaagcaaacgaacgcgcaggacttagagaggggagtgaggagaaggtcaagccacctcgccctcgcgcgcctgagtctgatactggagacgaagaccaagaccaagagcgtgatacagtattcctcaaagataatcaccttgcaatcgagaggaagtgttcctctattacagtgagtagtacgtctagtcttgaagctgaggttgactttaccgtgattggcgactaccatggaagtgcctttgaagacttcagtagatcactgcctgagctggacagagacaaaagcgacagcgatacagaaggcctcctcttctctcgagaccttaataagggggcccccagtcaagacgatgaatcaggaggtattgaggacagtcccgaccggggagcctgttctacgcctgatatgccgcagttcgaacccgtgaagacagaaaccatgaccgtgtcatcacttgcgattaggaagaaaattgagcccgaggctgtgttgcagacaagggtaagcgccatggataatacacaggagaattctttaaagtcggggaaaggagctgccgcaatgatccccggaccgcagacagtagcgacagagatacggtcgctgtcacctataattggcaaggatgtgctgacatcaacctacggagcaactgctgagacgcttagtacttccaccactacccatgtgacgaagaccgtcaagggaggcttctcagaaacacgtatagaaaagcgcatcattatcaccggcgatgaagatgtcgatcaggaccaggcactggcactggctatcaaagaagccaagttacagcatcccgacatgttggtgaccaaagccgttgtgtatagggagaccgacccctcccccgaagagagagacaagaagccacaggagtcttag

SEQ ID NO: 321309 - DNA, 2340 bp, Artificial Sequence
  derived and/or modified sequence
atggaggagaaagactactcagaggcagacggactttcagagaggactacgccaagcaaggcacagaagtctccccagaaaatagccaagaaatacaaatcagctatctgtagggtgaccctgctggacgcctcagaatacgagtgcgaagtggaaaagcacggccgaggacaggtcttgtttgatctagtgtgtgaacatctaaacttattagaaaaggattacttcggtctgacattttgcgatgctgacagtcagaaaaattggcttgatcctagcaaagaaatcaagaaacagattaggagtagtccttggaacttcgcctttactgtcaaattctacccgccagacccagcccagctcacagaggatataactcgctattacttatgtctgcagcttcgcgcagatattattacagggcgattaccatgttccttcgttacccatgccctgttaggcagctacgccgtacaagccgagctcggcgactatgacgctgaggaacacgtggggaattatgtgtctgagctgcgcttcgcgcctaatcagacacgagaactcgaagagcgcattatggagctgcacaagacttacagaggtatgacacctggcgaggctgaaatccattttcttgaaaacgcaaaaaaattgtccatgtacggcgttgatctgcaccacgccaaggatagcgagggaatcgatattatgctgggcgtctgtgctaacggactgttgatctaccgggacagattgcgcatcaatagatttgcctggcccaaaatccttaaaatctcttacaaacggagtaatttctatatcaagattcgacctggtgagtatgaacagttcgagagcaccataggcttcaaactaccaaaccaccggtctgccaaaagactgtggaaagtttgcattgagcaccatacttttttccgtctcgtaagtccagagcccccacctaagggtttcctggtgatggggtcaaagtttcgttactctggtaggacccaagcacagacccgccaggcctctgccttaatcgaccgaccagcaccattttttgaacggtcaagttccaagcgatacaccatgtctcgatctctggacggtgccgaatttagccggcctgcatccgtttcagagaaccatgatgctggccctgacggtgacaagcgggacgaagacggagagagtggcggacagcgctccgaggccgaggaaggagaggtgcggactccgaccaagatcaaggaactgaaattccttgacaagccagaggacgtgctactgaaacaccaggcatctatcaacgagctgaagagaaccctaaaggagcccaatagtaaactcatccaccgcgatagagactgggaacgcgagagaaggctcccttcctcaccggcaagcccatcacccaaaggaactcccgaaaaagccaacgagagagctgggctgcgagaaggctccgaggagaaagtgaaaccacctagaccgagagcgccagagtccgatactggcgacgaagaccaggaccaagagcgtgacacagtgttcctgaaggacaaccacctggccattgagaggaagtgctcctcgattacggttagcagcacaagtagcttggaagccgaagtcgactttacagtgatcggagattaccacggctccgcgtttgaggatttcagccgaagtctccccgaactggacagggataagtcagacagcgacacggaaggacttttgtttagccgagacttgaacaaaggggctccctctcaggacgatgagtccggaggaatcgaggactcccccgacagaggggcatgctctacccccgatatgccccagttcgaaccagtcaaaacggaaactatgactgtttcctccctggctatccgcaaaaagatcgaacccgaggccgtcttacagacacgcgtgtccgccatggacaatacgcaagagaatagcctcaagtcagggaaaggcgctgctgcaatgattcctggacctcagaccgtggccacagagatacggtccctgtccccaatcatcggaaaggacgtcctgacatctacctacggcgcaacagccgaaaccctgtcgacgtcaacaacgactcacgttacaaagacggtgaaaggagggttctcagaaacccggatcgagaaaagaattataatcaccggagacgaggacgttgatcaggatcaggcgctggcacttgccatcaaggaagccaaactgcagcacccggacatgctcgtcactaaagcggtggtttaccgggaaactgatccctccccagaagaacgggacaaaaaaccacaggagtcctag

SEQ ID NO: 321310 - DNA, 2340 bp, Artificial Sequence
  derived and/or modified sequence
atggaggagaaagactattctgaagcagacgggcttagcgagagaacgactccgtcaaaggctcagaaatccccgcagaaaattgccaagaagtataagtcagccatttgcagagtgaccctgctggacgcttcagaatacgaatgtgaggtcgagaagcacggcagagggcaggtgctcttcgacctggtttgtgagcacttaaatctcctcgaaaaggactactttgggctgacattctgcgacgccgactcgcagaaaaactggttggatcctagcaaggagatcaagaagcagattcggtcaagtccctggaactttgcttttaccgttaagttttaccctcctgatccagctcagctgacagaagatatcacacgatactatctgtgcctgcagcttcgggctgatattattacaggcaggctcccttgttcgtttgtcacacacgcactactcgggtcctatgctgtgcaagccgaattaggtgattatgatgcagaggagcatgtaggtaactacgtatcagaactgaggtttgcccctaaccagacccgggaactagaggaaagaatcatggagctgcacaagacctaccgtggaatgactccaggtgaggccgagatccatttcctggaaaatgctaagaagctcagtatgtacggggtcgacctccatcacgccaaggattccgagggcattgatatcatgctaggcgtgtgtgccaatggactgctgatttatagggacagactacgtatcaaccgcttcgcctggccaaagattcttaaaatttcttacaagaggagcaatttttatatcaaaatcagacctggggaatatgagcagttcgagtctactatagggttcaaactccccaaccacagaagcgccaagagattgtggaaggtgtgcatcgaacatcatacattctttcggctggtgagccccgaacctcctccaaaaggctttcttgttatgggatcaaaattccgatattccggaagaacacaagcgcagactaggcaggcatccgccctgatagatagacctgcccctttttttgagaggtcctcttccaagcgctatactatgtcccggtccctggatggagcagagttctcacgtccagccagcgtgagcgagaatcatgatgctggccctgacggcgacaaaagagatgaggatggggaatcaggagggcagaggtcggaagcggaggagggagaggtgcgtacccccacgaagatcaaggaacttaaatttctggataagcctgaggacgtcctgctaaaacaccaggcaagcatcaacgagctgaaaagaactctcaaagaacccaactccaaactcatacatagagaccgggattgggaacgagagagaaggctcccatcctcaccagcatctccatcgccgaaaggaacacctgaaaaagcaaacgaaagggccggtctgcgggagggaagtgaagagaaagttaagccgccaaggcccagggcacctgagagcgacacgggggacgaggatcaggatcaggaacgcgatacagtctttctgaaggataatcacttagcaattgagaggaaatgtagttcgatcacggtctcatcaacatcttctctggaggctgaggtagatttcaccgtgattggagattatcatggatctgctttcgaggatttctcacgctcactgcctgaattggaccgcgataaaagtgacagtgatacggaagggctgctgttcagtcgcgatctgaacaagggggctccatctcaagacgatgaaagcgggggtattgaagattcacccgatagaggggcatgcagcactcctgacatgcctcagttcgagccagttaagaccgagaccatgaccgtgtctagtcttgcaatccgcaagaagattgaacctgaggctgttctgcagacgagggtgtctgctatggataacacccaggagaattctctcaaaagtggaaagggggctgctgccatgatcccgggtccccagacagtggcgacggaaattaggtcgttatcaccaatcatcggaaaagacgtgctgacttccacctacggtgctacagccgagaccctctcgaccagtaccacaactcacgttacgaaaactgtgaagggaggtttttccgagacacggattgaaaagcgcattattattaccggggatgaggatgttgaccaggaccaagcactcgctctcgctattaaggaggccaagctccaacacccagacatgttggtcacaaaggctgttgtatatagagagacggatccatctcctgaagagcgggacaaaaagcctcaggagagttag

SEQ ID NO: 321311 - DNA, 2340 bp, Artificial Sequence
  derived and/or modified sequence
atggaggagaaggactacagcgaggccgacggcctgagcgagagaaccacccccagcaaggcccagaagagcccccagaagatcgccaagaagtacaagagcgccatctgcagagtgaccctgctggacgccagcgagtacgagtgcgaggtggagaagcacggcagaggccaggtgctgttcgacctggtgtgcgagcacctgaacctgctggagaaggactacttcggcctgaccttctgcgacgccgacagccagaagaactggctggaccccagcaaggagatcaagaagcagatcagaagcagcccctggaacttcgccttcaccgtgaagttctacccccccgaccccgcccagctgaccgaggacatcaccagatactacctgtgcctgcagctgagagccgacatcatcaccggcagactgccctgcagcttcgtgacccacgccctgctgggcagctacgccgtgcaggccgagctgggcgactacgacgccgaggagcacgtgggcaactacgtgagcgagctgagattcgcccccaaccagaccagagagctggaggagagaatcatggagctgcacaagacctacagaggcatgacccccggcgaggccgagatccacttcctggagaacgccaagaagctgagcatgtacggcgtggacctgcaccacgccaaggacagcgagggcatcgacatcatgctgggcgtgtgcgccaacggcctgctgatctacagagacagactgagaatcaacagattcgcctggcccaagatcctgaagatcagctacaagagaagcaacttctacatcaagatcagacccggcgagtacgagcagttcgagagcaccatcggcttcaagctgcccaaccacagaagcgccaagagactgtggaaggtgtgcatcgagcaccacaccttcttcagactggtgagccccgagcccccccccaagggcttcctggtgatgggcagcaagttcagatacagcggcagaacccaggcccagaccagacaggccagcgccctgatcgacagacccgcccccttcttcgagagaagcagcagcaagagatacaccatgagcagaagcctggacggcgccgagttcagcagacccgccagcgtgagcgagaaccacgacgccggccccgacggcgacaagagagacgaggacggcgagagcggcggccagagaagcgaggccgaggagggcgaggtgagaacccccaccaagatcaaggagctgaagttcctggacaagcccgaggacgtgctgctgaagcaccaggccagcatcaacgagctgaagagaaccctgaaggagcccaacagcaagctgatccacagagacagagactgggagagagagagaagactgcccagcagccccgccagccccagccccaagggcacccccgagaaggccaacgagagagccggcctgagagagggcagcgaggagaaggtgaagccccccagacccagagcccccgagagcgacaccggcgacgaggaccaggaccaggagagagacaccgtgttcctgaaggacaaccacctggccatcgagagaaagtgcagcagcatcaccgtgagcagcaccagcagcctggaggccgaggtggacttcaccgtgatcggcgactaccacggcagcgccttcgaggacttcagcagaagcctgcccgagctggacagagacaagagcgacagcgacaccgagggcctgctgttcagcagagacctgaacaagggcgcccccagccaggacgacgagagcggcggcatcgaggacagccccgacagaggcgcctgcagcacccccgacatgccccagttcgagcccgtgaagaccgagaccatgaccgtgagcagcctggccatcagaaagaagatcgagcccgaggccgtgctgcagaccagagtgagcgccatggacaacacccaggagaacagcctgaagagcggcaagggcgccgccgccatgatccccggcccccagaccgtggccaccgagatcagaagcctgagccccatcatcggcaaggacgtgctgaccagcacctacggcgccaccgccgagaccctgagcaccagcaccaccacccacgtgaccaagaccgtgaagggcggcttcagcgagaccagaatcgagaagagaatcatcatcaccggcgacgaggacgtggaccaggaccaggccctggccctggccatcaaggaggccaagctgcagcaccccgacatgctggtgaccaaggccgtggtgtacagagagaccgaccccagccccgaggagagagacaagaagccccaggagagctag

SEQ ID NO: 321312 - DNA, 3514 bp, Artificial Sequence
  derived and/or modified sequence
cagaattgttgggcttcatcttggctctgtgctgcctggaggggagacctaggataggctcctgatctgcaaaatggggataatcccagctgccacttaagtgagacaagtgcctgactgacagaagttcttgcccccggggagctggtgtggacagaggagggagcctagacatggaggagaaggactacagtgaggccgatggcctttcggagaggaccacgcccagcaaggcccagaaatcgccccagaagattgccaagaaatacaagagtgccatctgccgggtcactctgcttgatgcctcggagtatgagtgtgaggtggagaaacatggccggggccaggtgctgtttgacctggtctgtgaacacctcaacctcctagagaaggactacttcggcctgaccttctgtgatgctgacagccagaagaactggctggacccctccaaggagatcaagaagcagatccggagtagcccctggaattttgccttcacagtcaagttctacccgcctgatcctgcccagctgacagaagacatcacaagatactacctgtgcctgcagctgcgggcagacatcatcacgggccggctgccatgctcctttgtcacgcatgccctactgggctcctacgctgtgcaggctgagctgggtgactatgatgctgaggagcatgtgggcaactatgtcagcgagctccgcttcgcccctaaccagacccgggagctggaggagaggatcatggagctgcataagacatatagggggatgaccccgggagaagcagaaatccacttcttagagaatgccaagaagctttccatgtacggagtagacctgcaccatgccaaggactctgagggcatcgacatcatgttaggcgtttgtgccaatggcctgctcatctaccgggaccggctgagaatcaaccgctttgcctggcccaagatcctcaagatctcctacaagaggagtaacttctatatcaagatccggcctggggagtatgagcaatttgagagcacaattggctttaagctcccaaaccaccggtcagccaagagactgtggaaggtctgcatcgagcatcatacattcttccggctggtgtcccctgagcccccacccaagggcttcctggtgatgggctccaagttccggtacagtgggaggacccaggcacagactcgccaggccagcgccctcattgaccggcctgcacccttctttgagcgttcttccagcaaacggtacaccatgtcccgcagccttgatggagcagagttctcccgcccagcctcggtcagcgagaaccatgatgcagggcctgacggtgacaagcgggatgaggatggcgagtctggggggcaacggtcagaggctgaggagggagaggtcaggactccaaccaagatcaaggagctaaagttcttagacaagccagaagatgtcttgctgaagcaccaggccagcatcaatgagctcaaaaggaccctgaaggagcccaacagcaaactcatccaccgggatcgagactgggaacgggagcgcaggctgccctcctcccccgcctccccctcccccaagggcacccctgagaaagccaatgagagagcagggctgagggagggctccgaggagaaagtcaaaccaccacgtccccgggccccagagagtgacacaggcgatgaggaccaggaccaggagagggacacggtgttcctgaaggacaaccacctggccattgagcgcaagtgctccagcatcacggtcagctctacgtctagcctggaggctgaggtggacttcacggtcattggtgactaccatggcagcgccttcgaagacttctcccgcagcctgcctgagctcgaccgggacaaaagcgactcggacactgagggcctgctgttctcccgggatctcaacaagggggcccccagccaggatgatgagtctgggggcattgaggacagcccggatcgaggggcctgctccaccccggatatgccccagtttgagcccgtgaaaacagaaaccatgactgtcagcagtctggccattagaaagaagattgagccggaggccgtactgcagaccagagtctccgctatggataacacccaggagaacagtctcaagtccgggaagggggcagctgccatgatcccaggcccacagacggtggccacggaaatccgttctctttctccgatcatcgggaaagatgtcctcaccagcacctacggcgccactgcggaaaccctctcaacctccaccaccacccatgtcaccaaaactgtgaaaggagggttttctgagacaaggatcgagaagcgaatcatcattactggggatgaagatgtcgatcaagaccaggccctggctttggccatcaaggaggccaaactgcagcatcctgatatgctggtaaccaaagctgtcgtatacagagaaacagacccatccccagaggagagggacaagaagccacaggaatcctgacctctgtgaagagatcctggcatttctggtccaacccaagccagagaaccattaagaaggggccttcattctggattctccgacgcaacactgacgtcccagctgcgacgtactgtcactgatgagagactgggaagggaaaagcatatatatatagatatatagagatatagatatatatacaggaaacaccgcatccttgcactgctgctggggctggcagagcagttggctgacagcaacaaccgacatctgaacacctacatttcctttgcagacaaattgaagaactggtgggatttttttcaagaaaaaaaattatataataactataatcccttgctcacccctttcccccgccaaataagaaacgcaagccagaccacgatgattgtagaagtccctcccgccctggttctgcacgttacagttagcagacgagcaattccatttgttcttctccagcatctctaaggcccacttgaatgcaaaggaaaacacttgcacagcaaagcaagagaagtcacagcagcaagacacgcacagtcaaccattttccgagaaaaaaagaaaattccccacttggaaagaaagaggaggaacactggattcttactttctggatcttgacactgggctgcaaaacctaccttcctctctcccgcctcccctcaccctcaactctcaatgtcttgctgtcattttctgtctcggctccctcctcccccttcccccttcccccaccccacacccttcaccctctgtgtcctggtccttctgagggccactgcagatgactctcctttgaaatgagaaaaagaaaagaaagcaagaacagaaaacgaagccacaggaagggaagtagacattgtatgcttatggtttctcattatgaaggtgcagcttgtaggaggtttgtacggatgtgctttgaagttatgtatattacatataacaggaaaaaatattaaaataaacagtgctggtaagtatgaagctga

SEQ ID NO: 321313 - DNA, 5863 bp, Artificial Sequence
  derived and/or modified sequence
gtgcctgactgacagaagttcttgcccccggggagctggtgtggacagaggagggagcctagacatggaggagaaggactacagtgaggccgatggcctttcggagaggaccacgcccagcaaggcccagaaatcgccccagaagattgccaagaaatacaagagtgccatctgccgggtcactctgcttgatgcctcggagtatgagtgtgaggtggagaaacatggccggggccaggtgctgtttgacctggtctgtgaacacctcaacctcctagagaaggactacttcggcctgaccttctgtgatgctgacagccagaagaactggctggacccctccaaggagatcaagaagcagatccggagtagcccctggaattttgccttcacagtcaagttctacccgcctgatcctgcccagctgacagaagacatcacaagatactacctgtgcctgcagctgcgggcagacatcatcacgggccggctgccatgctcctttgtcacgcatgccctactgggctcctacgctgtgcaggctgagctgggtgactatgatgctgaggagcatgtgggcaactatgtcagcgagctccgcttcgcccctaaccagacccgggagctggaggagaggatcatggagctgcataagacatatagggggatgaccccgggagaagcagaaatccacttcttagagaatgccaagaagctttccatgtacggagtagacctgcaccatgccaaggactctgagggcatcgacatcatgttaggcgtttgtgccaatggcctgctcatctaccgggaccggctgagaatcaaccgctttgcctggcccaagatcctcaagatctcctacaagaggagtaacttctatatcaagatccggcctggggagtatgagcaatttgagagcacaattggctttaagctcccaaaccaccggtcagccaagagactgtggaaggtctgcatcgagcatcatacattcttccggctggtgtcccctgagcccccacccaagggcttcctggtgatgggctccaagttccggtacagtgggaggacccaggcacagactcgccaggccagcgccctcattgaccggcctgcacccttctttgagcgttcttccagcaaacggtacaccatgtcccgcagccttgatggagcagagttctcccgcccagcctcggtcagcgagaaccatgatgcagggcctgacggtgacaagcgggatgaggatggcgagtctggggggcaacggtcagaggctgaggagggagaggtcaggactccaaccaagatcaaggagctaaagttcttagacaagccagaagatgtcttgctgaagcaccaggccagcatcaatgagctcaaaaggaccctgaaggagcccaacagcaaactcatccaccgggatcgagactgggaacgggagcgcaggctgccctcctcccccgcctccccctcccccaagggcacccctgagaaagccaatgagagagcagggctgagggagggctccgaggagaaagtcaaaccaccacgtccccgggccccagagagtgacacaggcgatgaggaccaggaccaggagagggacacggtgttcctgaaggacaaccacctggccattgagcgcaagtgctccagcatcacggtcagctctacgtctagcctggaggctgaggtggacttcacggtcattggtgactaccatggcagcgccttcgaagacttctcccgcagcctgcctgagctcgaccgggacaaaagcgactcggacactgagggcctgctgttctcccgggatctcaacaagggggcccccagccaggatgatgagtctgggggcattgaggacagcccggatcgaggggcctgctccaccccggatatgccccagtttgagcccgtgaaaacagaaaccatgactgtcagcagtctggccattagaaagaagattgagccggaggccgtactgcagaccagagtctccgctatggataacacccaggagaacagtctcaagtccgggaagggggcagctgccatgatcccaggcccacagacggtggccacggaaatccgttctctttctccgatcatcgggaaagatgtcctcaccagcacctacggcgccactgcggaaaccctctcaacctccaccaccacccatgtcaccaaaactgtgaaaggagggttttctgagacaaggatcgagaagcgaatcatcattactggggatgaagatgtcgatcaagaccaggccctggctttggccatcaaggaggccaaactgcagcatcctgatatgctggtaaccaaagctgtcgtatacagagaaacagacccatccccagaggagagggacaagaagccacaggaatcctgacctctgtgaagagatcctggcatttctggtccaacccaagccagagaaccattaagaaggggccttcattctggattctccgacgcaacactgacgtcccagctgcgacgtactgtcactgatgagagactgggaagggaaaagcatatatatatagatatatagagatatagatatatatacaggaaacaccgcatccttgcactgctgctggggctggcagagcagttggctgacagcaacaaccgacatctgaacacctacatttcctttgcagacaaattgaagaactggtgggatttttttcaagaaaaaaaattatataataactataatcccttgctcacccctttcccccgccaaataagaaacgcaagccagaccacgatgattgtagaagtccctcccgccctggttctgcacgttacagttagcagacgagcaattccatttgttcttctccagcatctctaaggcccacttgaatgcaaaggaaaacacttgcacagcaaagcaagagaagtcacagcagcaagacacgcacagtcaaccattttccgagaaaaaaagaaaattccccacttggaaagaaagaggaggaacactggattcttactttctggatcttgacactgggctgcaaaacctaccttcctctctcccgcctcccctcaccctcaactctcaatgtcttgctgtcattttctgtctcggctccctcctcccccttcccccttcccccaccccacacccttcaccctctgtgtcctggtccttctgagggccactgcagatgactctcctttgaaatgagaaaaagaaaagaaagcaagaacagaaaacgaagccacaggaagggaagtagacattgtatgcttatggtttctcattatgaaggtgcagcttgtaggaggtttgtacggatgtgctttgaagttatgtatattacatataacaggaaaaaatattaaaataaacagtgctggtaagtatgaagctgacattctaaaattataattatctgactgtgattgatgtatcctgaggttcctagatctcactgaactggcccagctaaggagacctggactctgggtgtgggttggctcacagtaggggctgacgggttcagtgtagtaatactgtgtgtggtgtttgtaattggttgattggtggggaggggtggggggccctaatggagaggtgtgggtttggcaagaaagaagcaacacagatgtcgtccccaaaatgccagttcaagacaccttctccctgcccccctggtagtaacagtcagggcctggtctgtgctcaggtactgggtcccagtctgggactctgctgctgaagttgccacagtagaggtccctggcttagtccttatctccctacggggcttgccttggttttcagtcttctctctctttctctcttttttttttttttgccacattctgcccttccctgaccccattgtaataaccaactccatatccaaagggaggtggtgctctcagccattgtagaagatggtggctttaacctgactgtctaaaaattcccagctaagccttttcctctactctcttccttgttctgaatcatttcttcttctcaggccaaagtagccatggtaaggaggcttcatggggcagaccctgaaagatcaaaactgcatttgcaaagccctcccctgtcccaggacaaagctgagactgacgggtgatgttgctcataggctccagctctgcataagaccttggcttggagacctccctctcagtcaacagctgaactctgagcttgtgcccagaaattaccccaagaccacaggaacccttcaagaagctcccatcacaagcttggcattgctctctgccacacgtgggcttcctcaggcttgtctgccacaagctacttctctgagctcagaaagtgccccttgatgagggaaaatgtcccactgcactgcgaatttctcagttccattttacctcccagtcctccttctaaaccagttaataaattcattccacaagtatttactgattacctgcttgtgccagggactattctcaggctgaagaaggtgggaggggagggcggaacctgaggagccacctgagccagctttatatttcaaccatggctggcccatctgagagcatctccccactctcgccaacctatcggggcatagcccagggatgcccccaggcggcccaggttagatgcgtccctttggcttgtcagtgatgacatacaccttagctgcttagctggtgctggcctgaggcagggcaggaaatcagaatagcatttgcttctctgggcaaatgggaagttcagcggggcagcagaatcagtggcattccccctggtgcaggccggtgggtccactccaactccccctgagtgtagcagcacactttccatacaccaggttctttctacaatcctggtggaaaagccacagaaccttcttcctgcccttcttgagagttccccctctttctgggtcaagagctggagtggtggctccatcctctctgggccacttcggtctaggaactcatctttgcaggaaccaggagtcctgagcacactgaacacacctcagagggaggatccttgttgtggattttgcacctggctttggggcaggggtgaagtgaccaggcttagcttgtggagtttatgggccaccagggtttggggaaatcaccatcccgcggatgctgtgacctcccttctacggagatgcaggcagtgccacgagggaggaggggacctgcaaagctagaatctagggcactgtttcctccccatccttctctttgtagagaatagagacgtttgtcttgtctgtcttcaacctacttttccttttctcttttttgtttctcatcctctctgtgccacctctccacccaggaggccatgtagcatagtggaaaaagtccctgagggcggttaggagttctgggtgaccatcctggctcagctcctaactcaccatgtgacatcaggctatccccattccccctcttgggcctcagtttcccgacttgcaaaataagcagaaagaaccagatgctctccagggtctttttctactttgctatctcatgggtcttcattttctcttattttgttttctctggatcttttccatctgagggtacaggaagtaccaggacctgtttcagtttttgaatcctgcaagcacattccaagactggcctgaaactgcatgagcaacatcactcgaaataattttttttttcaaaagcaccttaacaaccaattgcgatgctgtcctgttcctttttactcacacccttctctcctttctcgtccccatgctcccccacctcagtgctccgtgctgtatgcgtgtgctctctgttcttgtatactcaatataagtgaaataaatgtgtttgatgctgaaccata

SEQ ID NO: 321314 - protein, 168 aa, Artificial Sequence
  derived and/or modified sequence
MTTETGPDSEVKKAQEEAPQQPEAAAAVTTPVTPAGHGHPEANSNEKHPSQQDTRPAEQSLDMEEKDYSEADGLSERTTPSKAQKSPQKIAKKYKSAICRVTLLDASEYECEVEKHGRGQVLFDLVCEHLNLLEKDYFGLTFCDADSQKNWLDPSKEIKKQIRSSPWN

SEQ ID NO: 321315 - protein, 59 aa, Artificial Sequence
  derived and/or modified sequence
MTTETGPDSEVKKAQEEAPQQPEAAAAVTTPVTPAGHGHPEANSNEKHPSQQDTRPAEQ

SEQ ID NO: 321316 - protein, 114 aa, Artificial Sequence
  derived and/or modified sequence
MTTETGPDSEVKKAQEEAPQQPEAAAAVTTPVTPAGHGHPEANSNEKHPSQQDTRPAEQSLDMEEKDYSEADGLSERTTPSKAQKSPQKIAKKYKSAICRVTLLDASEYECEVE

SEQ ID NO: 321317 - DNA, 507 bp, Artificial Sequence
  derived and/or modified sequence
atgactactgaaacagggccagatagcgaagtcaaaaaggcgcaggaagaggctccccaacaacccgaggctgccgccgccgtcactaccccagtgacacctgcgggccacggccacccagaagctaacagcaatgagaaacaccccagccaacaggacactagacctgcagaacagtccctcgatatggaagaaaaagactatagtgaggccgacggcctgagtgaaagaacaacgcctagtaaagctcaaaagagcccacagaaaatcgcgaagaagtacaaatcagctatttgcagagtaacactactggacgcctccgagtatgaatgtgaggtagagaagcacggtagaggacaggtcttgtttgaccttgtctgtgaacatctgaatctgctcgagaaggactactttggacttaccttttgcgacgccgatagtcagaagaactggctggacccttccaaggagattaaaaaacaaatcagaagttccccctggaactag

SEQ ID NO: 321318 - DNA, 180 bp, Artificial Sequence
  derived and/or modified sequence
atgactaccgaaacagggcccgacagcgaagtcaaaaaggcccaagaagaggctcctcagcagcctgaggctgccgctgccgtgactacgcctgtaaccccagcaggtcatggacatcccgaggctaattccaatgaaaaacaccctagtcagcaggacactagacccgcagagcagtag

SEQ ID NO: 321319 - DNA, 345 bp, Artificial Sequence
  derived and/or modified sequence
atgaccacagagaccggtcccgactctgaggtgaaaaaggctcaggaagaagccccccagcagcctgaggccgcagccgccgttaccacccctgtcacaccggcaggccacggccatccagaggcaaactctaacgaaaagcatccttcacaacaggacacacggcctgccgagcagtctctggatatggaagagaaagattattcggaggctgacggtctcagtgaacggaccacccctagcaaggcgcaaaaaagcccgcagaagatcgccaaaaaatacaagtccgccatctgcagagtgacactcttagacgcctcagaatatgaatgcgaagtggagtag

SEQ ID NO: 321320 - DNA, 567 bp, Artificial Sequence
  derived and/or modified sequence
atgacgaccgaaactggccctgactctgaagtgaagaaggcacaggaagaggccccccaacagcctgaggccgccgcagcggttacaaccccggtcacccctgccgggcacggacacccggaggccaactccaacgagaagcacccctctcagcaagacaccaggccagcagagcagagtttagacatggaggaaaaggactactcagaggccgatggattatctgaacggaccacaccctcaaaagcacaaaagtccccacagaagatagctaaaaagtacaagtccgccatttgtcgagtgactctgctggatgcaagcgagtacgaatgtgaggttgagaagcacggaaggggccaggtgcttttcgatttggtctgcgagcacctgaatctactcgagaaagactattttggactgacattctgcgatgccgactctcaaaaaaactggttggatccaagcaaagagattaagaaacaaatccgtagcagtccctggaattttgccttcaccgttaaattctatccaccagaccccgcacagctcacagaggacattacctag

SEQ ID NO: 321321 - DNA, 507 bp, Artificial Sequence
  derived and/or modified sequence
atgaccacagaaacaggcccagattctgaggtgaagaaggcccaggaggaggccccccagcagcctgaggccgctgctgctgtgaccacccctgtgaccccagctggccacggccaccctgaggccaacagcaatgagaagcaccccagccagcaggacaccaggcctgctgagcagagcctggacatggaggagaaggactacagcgaggctgatggcctgtctgagaggaccacccccagcaaggcccagaagagcccccagaagatcgccaagaagtacaagagcgccatctgccgggtgaccctgctggatgcctctgaatatgaatgtgaggtggagaagcacggccggggccaggtgctgtttgacctggtgtgtgagcacctgaacctgctggagaaggactacttcggcctgaccttctgtgatgctgacagccagaagaactggctggaccccagcaaggagatcaagaagcagatccgcagcagcccctggaactag

SEQ ID NO: 321322 - DNA, 180 bp, Artificial Sequence
  derived and/or modified sequence
atgaccacagaaacaggcccagattctgaggtgaagaaggcccaggaggaggccccccagcagcctgaggccgctgctgctgtgaccacccctgtgaccccagctggccacggccaccctgaggccaacagcaatgagaagcaccccagccagcaggacaccaggcctgctgagcagtag

SEQ ID NO: 321323 - DNA, 345 bp, Artificial Sequence
  derived and/or modified sequence
atgaccacagaaacaggcccagattctgaggtgaagaaggcccaggaggaggccccccagcagcctgaggccgctgctgctgtgaccacccctgtgaccccagctggccacggccaccctgaggccaacagcaatgagaagcaccccagccagcaggacaccaggcctgctgagcagagcctggacatggaggagaaggactacagcgaggctgatggcctgtctgagaggaccacccccagcaaggcccagaagagcccccagaagatcgccaagaagtacaagagcgccatctgccgggtgaccctgctggatgcctctgaatatgaatgtgaggtggagtag

SEQ ID NO: 321324 - DNA, 567 bp, Artificial Sequence
  derived and/or modified sequence
atgaccacagaaacaggcccagattctgaggtgaagaaggcccaggaggaggccccccagcagcctgaggccgctgctgctgtgaccacccctgtgaccccagctggccacggccaccctgaggccaacagcaatgagaagcaccccagccagcaggacaccaggcctgctgagcagagcctggacatggaggagaaggactacagcgaggctgatggcctgtctgagaggaccacccccagcaaggcccagaagagcccccagaagatcgccaagaagtacaagagcgccatctgccgggtgaccctgctggatgcctctgaatatgaatgtgaggtggagaagcacggccggggccaggtgctgtttgacctggtgtgtgagcacctgaacctgctggagaaggactacttcggcctgaccttctgtgatgctgacagccagaagaactggctggaccccagcaaggagatcaagaagcagatccgcagcagcccctggaactttgccttcaccgtgaagttctaccccccagaccctgcccagctgacagaggacatcacctag

SEQ ID NO: 321325 - DNA, 507 bp, Artificial Sequence
  derived and/or modified sequence
atgaccaccgagaccggccccgacagcgaggtgaagaaggcccaggaagaggcaccccaacagcccgaggcagccgccgcagtaactaccccagtgacacctgcaggccacgggcacccagaggccaattccaacgagaaacacccctctcagcaggatacaagacctgctgagcagtcactggacatggaggaaaaagactactccgaggcagacgggctatcagagcggacaacacccagcaaggcccaaaaatccccacaaaagatcgcgaagaagtataagtcagccatatgcagagtaacgctcctggacgcctctgaatacgaatgtgaagtagagaaacacggcagaggccaggtgttatttgatctggtttgtgagcacttgaatctcctggaaaaagattatttcggcttgaccttctgcgacgcagattctcagaaaaattggctggatccttctaaagaaatcaaaaaacaaatcaggtccagcccctggaactag

SEQ ID NO: 321326 - DNA, 180 bp, Artificial Sequence
  derived and/or modified sequence
atgaccaccgagaccggccccgacagcgaggtgaagaaggcccaggaagaagcccctcagcagcccgaggcagccgccgccgtcactacccccgtgacacccgccggccacggccacccagaggccaattctaacgaaaagcatccgtcccaacaagatacgaggccggccgagcagtag

SEQ ID NO: 321327 - DNA, 345 bp, Artificial Sequence
  derived and/or modified sequence
atgaccaccgagaccggccccgacagcgaggtgaagaaggcccaggaagaagctccccagcagccagaagccgccgccgcggtaaccacccccgtgactccggcaggacacggccacccggaggctaattctaatgagaaacacccttcacagcaggacacccgcccggctgagcagtccctggatatggaagagaaagattattccgaggcggatgggctgtccgagaggacaaccccctcaaaagctcagaaaagtccacagaaaattgcgaaaaagtacaagagcgcaatctgtagagtcacacttctggatgcctctgagtacgaatgcgaggtcgaatag

SEQ ID NO: 321328 - DNA, 567 bp, Artificial Sequence
  derived and/or modified sequence
atgaccaccgagaccggccccgacagcgaggtgaagaaggcccaggaggaagctccacagcaaccagaagcagcggctgccgttaccactcctgtgactccagctggtcacgggcacccagaggccaatagtaatgaaaaacaccccagccaacaggacacaaggcctgccgagcagagcctcgacatggaggagaaagactacagcgaagccgacggcctcagcgagcggaccactccatctaaggcccaaaagtccccccaaaagatagcgaagaagtacaagtcagccatctgtagagtgaccttgctcgacgccagtgagtacgaatgtgaggtcgagaagcacggacgtggccaggtgttgtttgacctcgtttgtgagcatcttaacctattggaaaaggactactttggcctcaccttttgtgacgctgactcccagaagaactggctagatcccagcaaggaaatcaaaaagcaaattaggtcaagcccttggaactttgcatttacagtcaaattctatcctcctgatcccgctcagctgaccgaggacattacatag

SEQ ID NO: 321329 - DNA, 507 bp, Artificial Sequence
  derived and/or modified sequence
atgaccacggagactgggcctgactctgaggtcaaaaaagctcaggaagaggctccacaacagcccgaggctgccgcagcagttacgacgcccgtgacaccagcagggcatggccatcctgaagccaactccaacgaaaagcacccaagtcaacaggacaccaggccagcagaacagagcctcgacatggaagaaaaggattactcagaagcggacggactctccgaacgcaccaccccttccaaggctcaaaagtctccccagaaaatcgcaaaaaaatacaagagcgcaatttgtagagtcactcttcttgatgcctccgaatacgagtgcgaagtcgagaagcacggcaggggccaagtgctatttgatttggtgtgtgaacaccttaaccttttagagaaagattactttggacttactttctgcgacgccgactcccagaagaactggctggatccaagcaaagaaatcaaaaagcaaatccgctctagcccgtggaactag

SEQ ID NO: 321330 - DNA, 180 bp, Artificial Sequence
  derived and/or modified sequence
atgaccactgagacgggccctgactcagaagttaagaaagcgcaagaggaagccccacagcaaccggaggctgcagctgctgtcaccacgcccgtgactcctgctggccatggacaccccgaagccaactctaacgaaaaacatcccagccagcaggatacaaggccagccgaacagtag

SEQ ID NO: 321331 - DNA, 345 bp, Artificial Sequence
  derived and/or modified sequence
atgacaacagagacagggccagactcagaggtcaagaaagctcaagaggaggctccgcagcagcctgaagccgctgctgccgttactactcccgtgacacccgcaggacacgggcaccccgaggctaacagcaatgaaaaacatccttcccaacaggatacccggcctgccgaacagtctcttgacatggaggagaaggattactcagaagccgacggcctaagcgagcggacaaccccaagtaaggcacagaagtcccctcagaagatcgcgaaaaaatataagtctgcgatctgtagagttacgctcttagatgcatccgaatatgagtgtgaagttgagtag

SEQ ID NO: 321332 - DNA, 567 bp, Artificial Sequence
  derived and/or modified sequence
atgaccacagagaccggaccagactcggaagtaaaaaaagcacaggaggaggcacctcagcagcccgaggcagcagctgcagtcacaacaccagtgacgccagcgggtcacggccatcccgaggcgaactcaaacgagaaacatccaagtcagcaagacactagacccgctgagcaatctctggatatggaggaaaaagattatagcgaggctgatggcctctccgagcggactactcccagcaaagcgcagaagagtccccagaagatagctaagaagtacaagtcggccatctgcagagtgacattgcttgacgcaagcgagtatgaatgcgaggtggaaaaacatggaaggggccaggtgctgttcgacctcgtgtgtgagcacctgaatcttctggaaaaggactatttcggccttacattttgcgatgccgactcacagaagaattggctggacccttcaaaagagattaagaagcagataagatctagcccatggaatttcgcgttcaccgtgaagttttacccgccagaccctgctcaactcaccgaagacatcacatag

SEQ ID NO: 321333 - DNA, 507 bp, Artificial Sequence
  derived and/or modified sequence
atgaccaccgagaccggccccgacagcgaggtgaagaaggcccaggaggaggccccccagcagcccgaggccgccgccgccgtgaccacccccgtgacccccgccggccacggccaccccgaggccaacagcaacgagaagcaccccagccagcaggacaccagacccgccgagcagagcctggacatggaggagaaggactacagcgaggccgacggcctgagcgagagaaccacccccagcaaggcccagaagagcccccagaagatcgccaagaagtacaagagcgccatctgcagagtgaccctgctggacgccagcgagtacgagtgcgaggtggagaagcacggcagaggccaggtgctgttcgacctggtgtgcgagcacctgaacctgctggagaaggactacttcggcctgaccttctgcgacgccgacagccagaagaactggctggaccccagcaaggagatcaagaagcagatcagaagcagcccctggaactag

SEQ ID NO: 321334 - DNA, 180 bp, Artificial Sequence
  derived and/or modified sequence
atgaccaccgagaccggccccgacagcgaggtgaagaaggcccaggaggaggccccccagcagcccgaggccgccgccgccgtgaccacccccgtgacccccgccggccacggccaccccgaggccaacagcaacgagaagcaccccagccagcaggacaccagacccgccgagcagtag

SEQ ID NO: 321335 - DNA, 345 bp, Artificial Sequence
  derived and/or modified sequence
atgaccaccgagaccggccccgacagcgaggtgaagaaggcccaggaggaggccccccagcagcccgaggccgccgccgccgtgaccacccccgtgacccccgccggccacggccaccccgaggccaacagcaacgagaagcaccccagccagcaggacaccagacccgccgagcagagcctggacatggaggagaaggactacagcgaggccgacggcctgagcgagagaaccacccccagcaaggcccagaagagcccccagaagatcgccaagaagtacaagagcgccatctgcagagtgaccctgctggacgccagcgagtacgagtgcgaggtggagtag

SEQ ID NO: 321336 - DNA, 567 bp, Artificial Sequence
  derived and/or modified sequence
atgaccaccgagaccggccccgacagcgaggtgaagaaggcccaggaggaggccccccagcagcccgaggccgccgccgccgtgaccacccccgtgacccccgccggccacggccaccccgaggccaacagcaacgagaagcaccccagccagcaggacaccagacccgccgagcagagcctggacatggaggagaaggactacagcgaggccgacggcctgagcgagagaaccacccccagcaaggcccagaagagcccccagaagatcgccaagaagtacaagagcgccatctgcagagtgaccctgctggacgccagcgagtacgagtgcgaggtggagaagcacggcagaggccaggtgctgttcgacctggtgtgcgagcacctgaacctgctggagaaggactacttcggcctgaccttctgcgacgccgacagccagaagaactggctggaccccagcaaggagatcaagaagcagatcagaagcagcccctggaacttcgccttcaccgtgaagttctacccccccgaccccgcccagctgaccgaggacatcacctag

SEQ ID NO: 321337 - DNA, 763 bp, Artificial Sequence
  derived and/or modified sequence
tcggcatccatcagcgggcgggggtgtcgccgaacaggctgctccgcagagcccgccgcgaccccgcgccgccccgccccgcggcctgcctgccagaggagccgagggggccgcccctcgcccaacctgcccgacatggggaaccccgggcccagagcctagacatggaggagaaggactacagtgaggccgatggcctttcggagaggaccacgcccagcaaggcccagaaatcgccccagaagattgccaagaaatacaagagtgccatctgccgggtcactctgcttgatgcctcggagtatgagtgtgaggtggagaaacatggccggggccaggtgctgtttgacctggtctgtgaacacctcaacctcctagagaaggactacttcggcctgaccttctgtgatgctgacagccagaagaactggctggacccctccaaggagatcaagaagcagatccggagtagcccctggaattttgccttcacagtcaagttctacccgcctgatcctgcccagctgacagaagacatcacaagatactacctgtgcctgcagctgcgggcagacatcatcacgggccggctgccatgctcctttgtcacgcatgccctactgggctcctacgctgtgcaggctgagctgggtgactatgatgctgaggagcatgtgggcaactatgtcagcgagctccgcttcgcccctaaccagacccgggagctggaggagaggatcatggagctgcataagacatatag

SEQ ID NO: 321338 - DNA, 652 bp, Artificial Sequence
  derived and/or modified sequence
agagcaggagcgagcgcgcgagagagcggggcatttctgcgcagctctagcgcgcctcggagcccgccggggcagccgccggacaccaggaccgcgagccagacagctcccggaagccgcgccgccgccgccaggcgtgctggtcaccatgacaacagagacaggccccgactctgaggtgaagaaagctcaggaggaggccccgcagcagcccgaggctgctgccgctgtgaccacccctgtgacccctgcaggccacggccacccagaggccaactccaatgagaagcatccatcccagcaggacacgcggcctgctgaacagagcctagacatggaggagaaggactacagtgaggccgatggcctttcggagaggaccacgcccagcaaggcccagaaatcgccccagaagattgccaagaaatacaagagtgccatctgccgggtcactctgcttgatgcctcggagtatgagtgtgaggtggagaaacatggccggggccaggtgctgtttgacctggtctgtgaacacctcaacctcctagagaaggactacttcggcctgaccttctgtgatgctgacagccagaagaactggctggacccctccaaggagatcaagaagcagatccggagtagcccctggaat

SEQ ID NO: 321339 - DNA, 460 bp, Artificial Sequence
  derived and/or modified sequence
tctcctgctggcttctgagagctgacggaacaggttccagcaaggcagaccctgacacagaagccagacctgtccagcagggaccccatacactgggaggcttcctgggaaactggaaggcagaagccacgcagacttctagtcctggttccactgcttactcggctgctgttcgtacctgcctcatggttttcttggggaggatcaatgaggtagaacctgcaaagggcttagcagagagcctagcacctactgagcgctcagtaaaggcgtgctggtcaccatgacaacagagacaggccccgactctgaggtgaagaaagctcaggaggaggccccgcagcagcccgaggctgctgccgctgtgaccacccctgtgacccctgcaggccacggccacccagaggccaactccaatgagaagcatccatcccagcaggacacgcggcctgctgaacag

SEQ ID NO: 321340 - DNA, 896 bp, Artificial Sequence
  derived and/or modified sequence
cgagagagcggggcatttctgcgcagctctagcgcgcctcggagcccgccggggcagccgccggacaccaggaccgcgagccagacagctcccggaagccgcgccgccgccgccagagcctagacatggaggagaaggactacagtgaggccgatggcctttcggagaggaccacgcccagcaaggcccagaaatcgccccagaagattgccaagaaatacaagagtgccatctgccgggtcactctgcttgatgcctcggagtatgagtgtgaggtggagaaacatggccggggccaggtgctgtttgacctggtctgtgaacacctcaacctcctagagaaggactacttcggcctgaccttctgtgatgctgacagccagaagaactggctggacccctccaaggagatcaagaagcagatccggagtagcccctggaattttgccttcacagtcaagttctacccgcctgatcctgcccagctgacagaagacatcacaagatactacctgtgcctgcagctgcgggcagacatcatcacgggccggctgccatgctcctttgtcacgcatgccctactgggctcctacgctgtgcaggctgagctgggtgactatgatgctgaggagcatgtgggcaactatgtcagcgagctccgcttcgcccctaaccagacccgggagctggaggagaggatcatggagctgcataagacatatagggggatgaccccgggagaagcagaaatccacttcttagagaatgccaagaagctttccatgtacggagtagacctgcaccatgccaaggactctgagggcatcgacatcatgttaggcgtttgtgccaatggcctgctcatctaccgggaccggctgagaatcaaccgcttt

SEQ ID NO: 321341 - DNA, 896 bp, Artificial Sequence
  derived and/or modified sequence
tccgcgtcccggggaccccgccgcgtcgggtcccgcgtgtgcgtgtggggtggccgccgagggcggcgggctcgattcccgatctttgggcactgacaggccggcgggccggctccaggagccgcgggcttcggtagctccttggatattcctttctgcaagtgatcaggcaaagataaattccattttacagatgaggaagctgaggcctgtgaagggaaagtgacctggctacacagccggaacctgaatgcaggacattctgcccctgtcgtggtggtattggagccagctaatgccaccattcgaggttgcaggagcagcacctgaccagaaatccagagcttgtttaaaggaccctgaaatttgaagactatccacacatatctactttctggatatccacggagagaccatgggctttttcatcaaggaggcctgagttcaaatccttcttctatgtctgattctctctgtgaccttgggtgcctgactgacagaagttcttgcccccggggagctggtgtggacagaggaggggcgtgctggtcaccatgacaacagagacaggccccgactctgaggtgaagaaagctcaggaggaggccccgcagcagcccgaggctgctgccgctgtgaccacccctgtgacccctgcaggccacggccacccagaggccaactccaatgagaagcatccatcccagcaggacacgcggcctgctgaacagagcctagacatggaggagaaggactacagtgaggccgatggcctttcggagaggaccacgcccagcaaggcccagaaatcgccccagaagattgccaagaaatacaagagtgccatctgccgggtcactctgcttgatgcctcggagtatgagtgtgaggtggag

SEQ ID NO: 321342 - DNA, 769 bp, Artificial Sequence
  derived and/or modified sequence
cgcctcggagcccgccggggcagccgccggacaccaggaccgcgagccagacagctcccggaagccgcgccgccgccgccagccacagcacagccggacagaggaggtggattaggagttcccgggagggagcctgctcagcctttccctgacatttgggcaaatgtgtggggagatgcggagctcaaggcgtgctggtcaccatgacaacagagacaggccccgactctgaggtgaagaaagctcaggaggaggccccgcagcagcccgaggctgctgccgctgtgaccacccctgtgacccctgcaggccacggccacccagaggccaactccaatgagaagcatccatcccagcaggacacgcggcctgctgaacagagcctagacatggaggagaaggactacagtgaggccgatggcctttcggagaggaccacgcccagcaaggcccagaaatcgccccagaagattgccaagaaatacaagagtgccatctgccgggtcactctgcttgatgcctcggagtatgagtgtgaggtggagaaacatggccggggccaggtgctgtttgacctggtctgtgaacacctcaacctcctagagaaggactacttcggcctgaccttctgtgatgctgacagccagaagaactggctggacccctccaaggagatcaagaagcagatccggagtagcccctggaattttgccttcacagtcaagttctacccgcctgatcctgcccagctgacagaagacatcacaag

SEQ ID NO: 321343 - protein, 747 aa, Artificial Sequence
  derived and/or modified sequence
MSQVKSSYSYDAPSDFINFSSLDDEGDTQNIDSWFEEKANLENKLLGKNGTGGLFQGKTPLRKANLQQAIVTPLKPVDNTYYKEAEKENLVEQSIPSNACSSLEVEAAISRKTPAQPQRRSLRLSAQKDLEQKEKHHVKMKAKRCATPVIIDEILPSKKMKVSNNKKKPEEEGSAHQDTAEKNASSPEKAKGRHTVPCMPPAKQKFLKSTEEQELEKSMKMQQEVVEMRKKNEEFKKLALAGIGQPVKKSVSQVTKSVDFHFRTDERIKQHPKNQEEYKEVNFTSELRKHPSSPARVTKGCTIVKPFNLSQGKKRTFDETVSTYVPLAQQVEDFHKRTPNRYHLRSKKDDINLLPSKSSVTKICRDPQTPVLQTKHRARAVTCKSTAELEAEELEKLQQYKFKARELDPRILEGGPILPKKPPVKPPTEPIGFDLEIEKRIQERESKKKTEDEHFEFHSRPCPTKILEDVVGVPEKKVLPITVPKSPAFALKNRIRMPTKEDEEEDEPVVIKAQPVPHYGVPFKPQIPEARTVEICPFSFDSRDKERQLQKEKKIKELQKGEVPKFKALPLPHFDTINLPEKKVKNVTQIEPFCLETDRRGALKAQTWKHQLEEELRQQKEAACFKARPNTVISQEPFVPKKEKKSVAEGLSGSLVQEPFQLATEKRAKERQELEKRMAEVEAQKAQQLEEARLQEEEQKKEELARLRRELVHKANPIRKYQGLEIKSSDQPLTVPVSPKFSTRFHC

SEQ ID NO: 321344 - protein, 783 aa, Artificial Sequence
  derived and/or modified sequence
MSQVKSSYSYDAPSDFINFSSLDDEGDTQNIDSWFEEKANLENKLLGKNGTGGLFQGKTPLRKANLQQAIVTPLKPVDNTYYKEAEKENLVEQSIPSNACSSLEVEAAISRKTPAQPQRRSLRLSAQKDLEQKEKHHVKMKAKRCATPVIIDEILPSKKMKVSNNKKKPEEEGSAHQDTAEKNASSPEKAKGRHTVPCMPPAKQKFLKSTEEQELEKSMKMQQEVVEMRKKNEEFKKLALAGIGQPVKKSVSQVTKSVDFHFRTDERIKQHPKNQEEYKEVNFTSELRKHPSSPARVTKGCTIVKPFNLSQGKKRTFDETVSTYVPLAQQVEDFHKRTPNRYHLRSKKDDIKTGSCSVTQAGVQWRDHGSLQCPTPGLKQSSCLSLPNLLPSKSSVTKICRDPQTPVLQTKHRARAVTCKSTAELEAEELEKLQQYKFKARELDPRILEGGPILPKKPPVKPPTEPIGFDLEIEKRIQERESKKKTEDEHFEFHSRPCPTKILEDVVGVPEKKVLPITVPKSPAFALKNRIRMPTKEDEEEDEPVVIKAQPVPHYGVPFKPQIPEARTVEICPFSFDSRDKERQLQKEKKIKELQKGEVPKFKALPLPHFDTINLPEKKVKNVTQIEPFCLETDRRGALKAQTWKHQLEEELRQQKEAACFKARPNTVISQEPFVPKKEKKSVAEGLSGSLVQEPFQLATEKRAKERQELEKRMAEVEAQKAQQLEEARLQEEEQKKEELARLRRELVHKANPIRKYQGLEIKSSDQPLTVPVSPKFSTRFHC

SEQ ID NO: 321345 - DNA, 2352 bp, Artificial Sequence
  derived and/or modified sequence
atgagccaggtgaagagcagctacagctacgacgcccccagcgacttcatcaacttcagcagcctggacgacgagggcgacacccagaacatcgacagctggttcgaggagaaggccaacctggagaacaagctgctgggcaagaacggcaccggcggcctgttccagggcaagacccccctgagaaaggccaacctgcagcaggccatcgtgacccccctgaagcccgtggacaacacctactacaaggaggccgagaaggagaacctggtggagcagagcatccccagcaacgcctgcagcagcctggaggtggaggccgccatcagcagaaagacccccgcccagccccagagaagaagcctgagactgagcgcccagaaggacctggagcagaaggagaagcaccacgtgaagatgaaggccaagagatgcgccacccccgtgatcatcgacgagatcctgcccagcaagaagatgaaggtgagcaacaacaagaagaagcccgaggaggagggcagcgcccaccaggacaccgccgagaagaacgccagcagccccgagaaggccaagggcagacacaccgtgccctgcatgccccccgccaagcagaagttcctgaagagcaccgaggagcaggagctggagaagagcatgaagatgcagcaggaggtggtggagatgagaaagaagaacgaggagttcaagaagctggccctggccggcatcggccagcccgtgaagaagagcgtgagccaggtgaccaagagcgtggacttccacttcagaaccgacgagagaatcaagcagcaccccaagaaccaggaggagtacaaggaggtgaacttcaccagcgagctgagaaagcaccccagcagccccgccagagtgaccaagggctgcaccatcgtgaagcccttcaacctgagccagggcaagaagagaaccttcgacgagaccgtgagcacctacgtgcccctggcccagcaggtggaggacttccacaagagaacccccaacagataccacctgagaagcaagaaggacgacatcaagaccggcagctgcagcgtgacccaggccggcgtgcagtggagagaccacggcagcctgcagtgccccacccccggcctgaagcagagcagctgcctgagcctgcccaacctgctgcccagcaagagcagcgtgaccaagatctgcagagacccccagacccccgtgctgcagaccaagcacagagccagagccgtgacctgcaagagcaccgccgagctggaggccgaggagctggagaagctgcagcagtacaagttcaaggccagagagctggaccccagaatcctggagggcggccccatcctgcccaagaagccccccgtgaagccccccaccgagcccatcggcttcgacctggagatcgagaagagaatccaggagagagagagcaagaagaagaccgaggacgagcacttcgagttccacagcagaccctgccccaccaagatcctggaggacgtggtgggcgtgcccgagaagaaggtgctgcccatcaccgtgcccaagagccccgccttcgccctgaagaacagaatcagaatgcccaccaaggaggacgaggaggaggacgagcccgtggtgatcaaggcccagcccgtgccccactacggcgtgcccttcaagccccagatccccgaggccagaaccgtggagatctgccccttcagcttcgacagcagagacaaggagagacagctgcagaaggagaagaagatcaaggagctgcagaagggcgaggtgcccaagttcaaggccctgcccctgccccacttcgacaccatcaacctgcccgagaagaaggtgaagaacgtgacccagatcgagcccttctgcctggagaccgacagaagaggcgccctgaaggcccagacctggaagcaccagctggaggaggagctgagacagcagaaggaggccgcctgcttcaaggccagacccaacaccgtgatcagccaggagcccttcgtgcccaagaaggagaagaagagcgtggccgagggcctgagcggcagcctggtgcaggagcccttccagctggccaccgagaagagagccaaggagagacaggagctggagaagagaatggccgaggtggaggcccagaaggcccagcagctggaggaggccagactgcaggaggaggagcagaagaaggaggagctggccagactgagaagagagctggtgcacaaggccaaccccatcagaaagtaccagggcctggagatcaagagcagcgaccagcccctgaccgtgcccgtgagccccaagttcagcaccagattccactgctag

SEQ ID NO: 321346 - DNA, 3605 bp, Artificial Sequence
  derived and/or modified sequence
tcaaaatttcaacgatactgaatgagtcccgcggcgggttggctcgcgcttcgttgtcagatctgaggcgaggctaggtgagccgtgggaagaaaagagggagcagctagggcgcgggtctccctcctcccggagtttggaacggctgaagttcaccttccagcccctagcgccgttcgcgccgctaggcctggcttctgaggcggttgcggtgctcggtcgccgcctaggcggggcagggtgcgagcaggggcttcgggccacgcttctcttggcgacaggattttgctgtgaagtccgtccgggaaacggaggaaaaaaagagttgcgggaggctgtcggctaataacggttcttgatacatatttgccagacttcaagatttcagaaaaggggtgaaagagaagattgcaactttgagtcagacctgtaggcctgatagactgattaaaccacagaaggtgacctgctgagaaaagtggtacaaatactgggaaaaacctgctcttctgcgttaagtgggagacaatgtcacaagttaaaagctcttattcctatgatgccccctcggatttcatcaatttttcatccttggatgatgaaggagatactcaaaacatagattcatggtttgaggagaaggccaatttggagaataagttactggggaagaatggaactggagggctttttcagggcaaaactcctttgagaaaggctaatcttcagcaagctattgtcacacctttgaaaccagttgacaacacttactacaaagaggcagaaaaagaaaatcttgtggaacaatccattccgtcaaatgcttgttcttccctggaagttgaggcagccatatcaagaaaaactccagcccagcctcagagaagatctcttaggctttctgctcagaaggatttggaacagaaagaaaagcatcatgtaaaaatgaaagccaagagatgtgccactcctgtaatcatcgatgaaattctaccctctaagaaaatgaaagtttctaacaacaaaaagaagccagaggaagaaggcagtgctcatcaagatactgctgaaaagaatgcatcttccccagagaaagccaagggtagacatactgtgccttgtatgccacctgcaaagcagaagtttctaaaaagtactgaggagcaagagctggagaagagtatgaaaatgcagcaagaggtggtggagatgcggaaaaagaatgaagaattcaagaaacttgctctggctggaatagggcaacctgtgaagaaatcagtgagccaggtcaccaaatcagttgacttccacttccgcacagatgagcgaatcaaacaacatcctaagaaccaggaggaatataaggaagtgaactttacatctgaactacgaaagcatccttcatctcctgcccgagtgactaagggatgtaccattgttaagcctttcaacctgtcccaaggaaagaaaagaacatttgatgaaacagtttctacatatgtgccccttgcacagcaagttgaagacttccataaacgaacccctaacagatatcatttgaggagcaagaaggatgatattaagacagggtcttgctccgtcacccaggctggagtgcagtggcgtgatcatggctcacttcagtgtccaactcctgggctcaagcaatcctcctgccttagccttccaaacctgttaccctccaaatcttctgtgaccaagatttgcagagacccacagactcctgtactgcaaaccaaacaccgtgcacgggctgtgacctgcaaaagtacagcagagctggaggctgaggagctcgagaaattgcaacaatacaaattcaaagcacgtgaacttgatcccagaatacttgaaggtgggcccatcttgcccaagaaaccacctgtgaaaccacccaccgagcctattggctttgatttggaaattgagaaaagaatccaggagcgagaatcaaagaagaaaacagaggatgaacactttgaatttcattccagaccttgccctactaagattttggaagatgttgtgggtgttcctgaaaagaaggtacttccaatcaccgtccccaagtcaccagcctttgcattgaagaacagaattcgaatgcccaccaaagaagatgaggaagaggacgaaccggtagtgataaaagctcaacctgtgccacattatggggtgccttttaagccccaaatcccagaggcaagaactgtggaaatatgccctttctcgtttgattctcgagacaaagaacgtcagttacagaaggagaagaaaataaaagaactgcagaaaggggaggtgcccaagttcaaggcacttcccttgcctcattttgacaccattaacctgccagagaagaaggtaaagaatgtgacccagattgaacctttctgcttggagactgacagaagaggtgctctgaaggcacagacttggaagcaccagctggaagaagaactgagacagcagaaagaagcagcttgtttcaaggctcgtccaaacaccgtcatctctcaggagccctttgttcccaagaaagagaagaaatcagttgctgagggcctttctggttctctagttcaggaaccttttcagctggctactgagaagagagccaaagagcggcaggagctggagaagagaatggctgaggtagaagcccagaaagcccagcagttggaggaggccagactacaggaggaagagcagaaaaaagaggagctggccaggctacggagagaactggtgcataaggcaaatccaatacgcaagtaccagggtctggagataaagtcaagtgaccagcctctgactgtgcctgtatctcccaaattctccactcgattccactgctaaactcagctgtgagctgcggataccgcccggcaatgggacctgctcttaacctcaaacctaggaccgtcttgctttgtcattgggcatggagagaacccatttctccagacttttacctacccgtgcctgagaaagcatacttgacaactgtggactccagttttgttgagaattgttttcttacattactaaggctaataatgagatgtaactcatgaatgtctcgattagactccatgtagttacttcctttaaaccatcagccggccttttatatgggtcttcactctgactagaatttagtctctgtgtcagcacagtgtaatctctattgctattgccccttacgactctcaccctctccccactttttttaaaaattttaaccagaaaataaagatagttaaatcctaagatagagattaagtcatggtttaaatgaggaacaatcagtaaatcagattctgtcctcttctctgcataccgtgaatttatagttaaggatccctttgctgtgagggtagaaaacctcaccaactgcaccagtgaggaagaagactgcgtggattcatggggagcctcacagcagccacgcagcaggctctgggtggggctgccgttaaggcacgttctttccttactggtgctgataacaacagggaaccgtgcagtgtgcattttaagacctggcctggaataaatacgttttgtctttccctccctga

SEQ ID NO: 321347 - DNA, 2244 bp, Artificial Sequence
  derived and/or modified sequence
atgtcccaggtaaagagctcatactcttacgatgctcctagtgactttattaattttagcagccttgatgacgaaggtgatacacagaatattgattcctggtttgaggagaaagctaatctggaaaacaagcttctcggcaaaaacgggaccggcggcctgttccaaggcaaaacgccactcaggaaagcgaacttgcagcaggccattgtgacgcctctcaaacccgtagacaatacttactataaggaggccgaaaaggagaatctcgtggaacaatccatcccctcaaacgcgtgctcgtctctggaagtggaagcagcaataagccggaagactcctgctcagccccaacgcagaagcctcagattgagtgcacaaaaagatctcgagcagaaggagaagcaccacgtcaagatgaaagcaaagcgatgcgccaccccagtcataatcgatgaaatcctgccatccaagaaaatgaaagtctccaacaacaaaaagaagcccgaggaggaaggctccgcacatcaagatactgctgagaaaaatgctagctcaccagagaaggccaaaggcagacacaccgtgccatgtatgccaccagcaaaacaaaagtttttgaagtccaccgaagaacaggagttggaaaagtctatgaagatgcagcaagaggtggtcgagatgaggaagaaaaacgaggaatttaaaaaactggctctcgcaggaatcgggcagccggtgaagaagtcagttagtcaggttacaaaatcagtagatttccacttcagaactgacgagcgaataaagcagcacccgaagaatcaggaagagtacaaggaggttaacttcacttctgaattaagaaagcacccctcttctccagcgcgtgtgacaaagggctgtacaattgtaaagccctttaatctcagccaaggcaaaaagcgcacatttgacgagaccgttagtacctacgtccctctcgcgcagcaggtagaggatttccacaagcgaacgccaaatcgctaccatctgcggtctaagaaggatgacataaacctactgccgagcaagtcatccgtgactaaaatatgccgggacccccagaccccagttttgcagacaaagcaccgcgcccgcgccgtgacgtgcaagagcaccgcagaactggaggccgaggaactggagaaactgcaacagtacaaatttaaagcacgggaattggaccctagaattttggagggggggcccatcctccctaaaaaaccaccagtcaagccaccaaccgagcctattgggtttgatctcgaaatcgagaaacggattcaggaacgcgagtcaaaaaagaaaactgaagacgagcattttgaatttcatagtcgaccctgcccgacaaagattttagaagatgtggttggcgtgcccgagaaaaaagtgctgcctatcacagtacccaagagccctgcattcgctttgaaaaaccggattagaatgccaacgaaggaagatgaagaagaggatgaacctgtggtgatcaaagcccagccagtgccccattatggagtaccatttaaaccccagatcccagaagctcgcaccgttgagatttgccccttcagcttcgactcccgcgacaaggaacggcagctgcaaaaggagaagaaaattaaggagctgcagaaaggcgaggttcccaagtttaaagcactaccgctcccccacttcgacaccatcaacctccccgagaagaaggtaaagaacgtcactcagatcgagccgttctgtttagagacagaccgacgaggcgcgcttaaggcccagacttggaagcatcagctagaggaggagctccgccagcaaaaggaggctgcctgttttaaggcaaggcccaatacggtgatttctcaggaacctttcgtgccgaaaaaagagaagaagtctgtcgccgaggggctgtccggatcactggtgcaggagccctttcagttagcgacagagaagcgagctaaagaaagacaggagcttgaaaagcgcatggccgaagttgaggcccagaaagctcaacagttggaagaagcaagattacaagaggaggagcagaaaaaggaggaactcgctcggttgcgcagggaactggttcacaaggccaatccaataaggaaatatcaaggtttagagatcaagtcctccgatcagccccttaccgtgcccgtcagtcctaagttttccacgcgattccattgttag

SEQ ID NO: 321348 - DNA, 2352 bp, Artificial Sequence
  derived and/or modified sequence
atgtcccaggtgaaaagcagctactcatacgatgcaccctccgattttatcaacttttcatctcttgacgacgaaggcgacactcagaacatagatagctggtttgaagaaaaggccaacctcgaaaataagctcctgggcaagaatggaaccggaggattatttcaaggcaaaacccctctcaggaaggccaatttacagcaggccatcgtgacccccctgaagcctgtggacaacacctactacaaagaggccgagaaagaaaatctggtggagcaaagcattccttcaaacgcatgttcaagccttgaggtggaagcagcgatctcacggaagaccccagcccagccacagcgccgctcacttcgacttagtgcccaaaaagatctggagcagaaagaaaagcatcacgtgaaaatgaaggctaagcgctgcgccacaccagtgatcatagacgagatccttccatctaagaaaatgaaggtgagcaataacaaaaagaagcctgaagaagaaggatcagcccaccaggacactgcagagaaaaatgcatcctctccagagaaggctaagggccgccacactgtcccgtgcatgccaccagctaagcaaaaattcctgaagtcaaccgaggaacaggaactggaaaaaagcatgaagatgcagcaggaagtggtggagatgcggaaaaaaaacgaggaattcaaaaagctcgccttggccggtattggccagcctgtgaaaaaaagcgtatcccaggtcactaaatccgttgacttccatttccgaaccgatgagagaatcaaacagcacccaaagaatcaggaagagtataaggaagtgaactttacctctgagctgaggaaacatccatcttctcccgccagggttacaaaaggatgtactatcgtgaaacccttcaacttgtcacaggggaagaagaggacattcgacgagacagtgtctacttatgtacctctagcccagcaggtcgaagatttccacaagcggacccccaataggtatcatctgaggtccaagaaggacgatatcaaaacagggtcttgctctgtgactcaggcaggcgtgcaatggagggatcatgggagcctacagtgcccgacccctggactgaaacagtccagttgtctatcactgccaaatcttctgccctccaagtcttccgtgactaaaatctgccgagacccgcagacacccgtactgcagacaaaacatcgggcacgggccgttacttgtaaatctacagcagagctggaagcggaggaactggagaagctacagcagtacaaatttaaagctcgggaactggaccctaggattcttgagggaggaccaatactgcccaaaaagccgccggttaagcctccgacggagccaatcggtttcgatctcgagatcgaaaaacgtattcaggaacgcgaatccaaaaaaaaaacagaggacgaacacttcgaatttcattctaggccctgcccaacaaaaattctggaggatgtggtgggggtgccagagaaaaaagttctaccgattacagtgcccaaatcccctgcttttgccttgaagaacagaattcgcatgcctactaaggaagacgaggaggaagatgaacccgttgtgattaaggcacagccagtgccacactatggggttcccttcaaacctcaaattcccgaagcgcgcactgtggaaatctgtcccttttcttttgacagtagagacaaagagagacaactgcagaaggaaaagaagatcaaggaattgcaaaaaggcgaggtgcccaagttcaaggctctgccactaccccactttgatactattaaccttcccgaaaagaaggtgaagaatgtgacccagatagagcctttctgcttagaaaccgacagaagaggagcgttaaaagcccaaacctggaagcatcagctggaggaggagctacggcagcagaaagaggctgcctgcttcaaggctcggcccaataccgttattagtcaggagccttttgtgcctaagaaggaaaagaagagcgtcgcagaaggcctttcagggtccctggtgcaagagcctttccagctggcgaccgagaagcgcgcaaaggagcgccaggaactagaaaagaggatggcagaggtcgaggcccaaaaggcccaacagttggaggaggcacggctccaggaggaagaacagaagaaggaagaactggctaggctgcggcgtgagctggtacacaaagctaatcctattaggaagtaccagggcctagagatcaagagctccgatcagcctctgaccgttccagtctcaccaaagttttctaccagattccactgttag

SEQ ID NO: 321349 - DNA, 2244 bp, Artificial Sequence
  derived and/or modified sequence
atgagccaggtgaagagcagctacagctatgatgcccccagcgacttcatcaacttcagcagcctggatgatgaaggagacacccagaacatcgacagctggtttgaggagaaggccaacctggagaacaagctgctgggcaagaatggaactggaggcctcttccagggcaagacccccctgaggaaggccaacctgcagcaggccatcgtgacccccctgaagcctgtggacaacacctactacaaggaggccgagaaggagaacctggtggagcagagcatccccagcaatgcctgcagcagcctggaggtggaggccgccatcagcaggaagaccccagcccagccccagaggaggagcctgcggctgagcgcccagaaggacctggagcagaaggagaagcaccacgtgaagatgaaggccaagagatgtgccacccctgtgatcattgatgagatcctgcccagcaagaagatgaaggtgagcaacaacaagaagaagccagaggaggagggcagcgcccaccaggacacagctgagaagaatgccagcagccctgagaaggccaagggccgccacacagtgccctgcatgcccccagccaagcagaagttcctgaagagcacagaggagcaggagctggagaagtccatgaagatgcagcaggaggtggtggagatgaggaagaagaatgaggagttcaagaagctggccctggccggcatcggccagcctgtgaagaagtctgtgtcccaggtgaccaagtctgtggacttccacttcagaacagatgagcgcatcaagcagcaccccaagaaccaggaggagtacaaggaggtgaacttcaccagcgagctgaggaagcaccccagcagccctgcccgggtgaccaagggctgcaccatcgtgaagcccttcaacctgagccagggcaagaagaggacctttgatgagaccgtgtccacctacgtgcccctggcccagcaggtggaggacttccacaagaggacccccaaccgctaccacctgcggagcaagaaggatgacatcaacctgctgcccagcaagagctctgtgaccaagatctgccgggacccccagacccctgtgctgcagaccaagcaccgggcccgggctgtgacctgcaagagcacagctgagctggaggccgaggagctggagaagctgcagcagtacaagttcaaggcccgggagctggacccccgcatcctggagggcggccccatcctgcccaagaagccccctgtgaagccacccacagagcccatcggctttgacctggagattgagaagaggatccaggagcgggagagcaagaagaagacagaagatgagcactttgagttccacagccggccctgccccaccaagatcctggaggatgtggtgggcgtgcctgagaagaaggtgctgcccatcaccgtgcccaagagccctgcctttgccctgaagaaccgcatccgcatgcccaccaaggaggatgaggaggaggatgagcctgtggtgatcaaggcccagcctgtgccccactatggagtgcccttcaagccccagatccctgaggccaggacagtggagatctgccccttctcctttgacagccgggacaaggagcggcagctgcagaaggagaagaagatcaaggagctgcagaagggggaggtgcccaagttcaaggccctgcccctgccccactttgacaccatcaacctgcctgagaagaaggtgaagaatgtgacccagatcgagcccttctgcctggagacagacagaagaggagccctgaaggcccagacctggaagcaccagctggaggaggagctgcggcagcagaaggaggccgcctgcttcaaggcccggcccaacacagtcatcagccaggagccctttgtgcccaagaaggagaagaagtctgtggccgagggcctgagcggcagcctggtgcaggagcccttccagctggccacagagaagagggccaaggagcggcaggagctggagaagaggatggccgaggtggaggcccagaaggcccagcagctggaggaggcccggctgcaggaggaggagcagaagaaggaggagctggcccggctgcggcgggagctggtgcacaaggccaaccccatcaggaagtaccagggcctggagatcaagagcagtgaccagcccctgactgtgcctgtgagccccaagttcagcacccgcttccactgctag

SEQ ID NO: 321350 - DNA, 2352 bp, Artificial Sequence
  derived and/or modified sequence
atgagccaggtgaagagcagctacagctatgatgcccccagcgacttcatcaacttcagcagcctggatgatgaaggagacacccagaacatcgacagctggtttgaggagaaggccaacctggagaacaagctgctgggcaagaatggaactggaggcctcttccagggcaagacccccctgaggaaggccaacctgcagcaggccatcgtgacccccctgaagcctgtggacaacacctactacaaggaggccgagaaggagaacctggtggagcagagcatccccagcaatgcctgcagcagcctggaggtggaggccgccatcagcaggaagaccccagcccagccccagaggaggagcctgcggctgagcgcccagaaggacctggagcagaaggagaagcaccacgtgaagatgaaggccaagagatgtgccacccctgtgatcattgatgagatcctgcccagcaagaagatgaaggtgagcaacaacaagaagaagccagaggaggagggcagcgcccaccaggacacagctgagaagaatgccagcagccctgagaaggccaagggccgccacacagtgccctgcatgcccccagccaagcagaagttcctgaagagcacagaggagcaggagctggagaagtccatgaagatgcagcaggaggtggtggagatgaggaagaagaatgaggagttcaagaagctggccctggccggcatcggccagcctgtgaagaagtctgtgtcccaggtgaccaagtctgtggacttccacttcagaacagatgagcgcatcaagcagcaccccaagaaccaggaggagtacaaggaggtgaacttcaccagcgagctgaggaagcaccccagcagccctgcccgggtgaccaagggctgcaccatcgtgaagcccttcaacctgagccagggcaagaagaggacctttgatgagaccgtgtccacctacgtgcccctggcccagcaggtggaggacttccacaagaggacccccaaccgctaccacctgcggagcaagaaggatgacatcaagacaggcagctgcagcgtgacccaggccggcgtgcagtggagggaccacggcagcctgcagtgccccaccccaggcctgaagcagagcagctgcctgagcctgcccaacctgctgcccagcaagagctctgtgaccaagatctgccgggacccccagacccctgtgctgcagaccaagcaccgggcccgggctgtgacctgcaagagcacagctgagctggaggccgaggagctggagaagctgcagcagtacaagttcaaggcccgggagctggacccccgcatcctggagggcggccccatcctgcccaagaagccccctgtgaagccacccacagagcccatcggctttgacctggagattgagaagaggatccaggagcgggagagcaagaagaagacagaagatgagcactttgagttccacagccggccctgccccaccaagatcctggaggatgtggtgggcgtgcctgagaagaaggtgctgcccatcaccgtgcccaagagccctgcctttgccctgaagaaccgcatccgcatgcccaccaaggaggatgaggaggaggatgagcctgtggtgatcaaggcccagcctgtgccccactatggagtgcccttcaagccccagatccctgaggccaggacagtggagatctgccccttctcctttgacagccgggacaaggagcggcagctgcagaaggagaagaagatcaaggagctgcagaagggggaggtgcccaagttcaaggccctgcccctgccccactttgacaccatcaacctgcctgagaagaaggtgaagaatgtgacccagatcgagcccttctgcctggagacagacagaagaggagccctgaaggcccagacctggaagcaccagctggaggaggagctgcggcagcagaaggaggccgcctgcttcaaggcccggcccaacacagtcatcagccaggagccctttgtgcccaagaaggagaagaagtctgtggccgagggcctgagcggcagcctggtgcaggagcccttccagctggccacagagaagagggccaaggagcggcaggagctggagaagaggatggccgaggtggaggcccagaaggcccagcagctggaggaggcccggctgcaggaggaggagcagaagaaggaggagctggcccggctgcggcgggagctggtgcacaaggccaaccccatcaggaagtaccagggcctggagatcaagagcagtgaccagcccctgactgtgcctgtgagccccaagttcagcacccgcttccactgctag

SEQ ID NO: 321351 - DNA, 2244 bp, Artificial Sequence
  derived and/or modified sequence
atgagccaggtgaagagcagctacagctacgacgcccccagcgacttcatcaacttctcctccttggatgatgaaggagacacgcagaatatcgattcctggtttgaggaaaaagctaacctagaaaataagcttctgggcaaaaatggaaccggcgggttgttccagggcaaaacacccttgcgcaaggccaacctgcagcaggccatcgtgaccccattaaaaccggtggataatacatactataaggaggctgagaaggagaatctggtggaacaatcgataccctccaatgcttgttcctcactggaggtagaggccgccattagccgaaagacgcctgctcagccacaacggaggagtctccggttgtcggcacagaaagacctggagcagaaggagaagcatcacgtgaagatgaaagccaagcggtgtgccactcccgtgatcatcgatgaaatcctcccaagcaagaagatgaaggtctcaaataacaaaaaaaagcctgaggaggaaggcagcgcccaccaggacacagcagagaaaaacgcatctagccctgaaaaggccaaaggacggcataccgtgccatgcatgccgcccgctaagcaaaaattcctcaagtctactgaagagcaagaactggaaaagtcgatgaagatgcagcaggaggtggttgaaatgcggaaaaaaaacgaggagtttaagaagctggctctggccggtatcggccagcctgtcaagaaatccgtgtcccaagtcacaaagagcgtggattttcacttccgcacagacgaacgcatcaagcaacaccctaaaaatcaggaagagtacaaagaggtgaattttacaagtgaactccgaaaacacccaagctcacccgctcgagtgacgaaaggatgcaccattgtcaagcccttcaatctttcccaaggtaaaaagagaacctttgatgagactgtgtccacctacgttccgctcgcgcagcaggtagaggatttccacaagaggacaccgaataggtatcatcttcgttcaaagaaagatgacatcaatttacttccatccaaaagcagtgtaactaagatatgcagggatccccaaacccctgtactgcagaccaagcaccgtgctcgcgctgttacctgcaagtcaacagctgagctcgaagcagaggaacttgaaaagttgcagcagtacaaattcaaagctcgggagctggatccaagaatactagagggcggaccgatcctccctaaaaaacctcctgtgaagcccccaacagaacccatcggttttgatctcgagatagagaagaggatccaggagcgggaaagcaagaagaaaaccgaggatgagcacttcgaattccacagccgtccttgcccaacgaagatcctggaagatgtagtcggggtccccgagaagaaggttctgcccatcaccgtcccgaagagcccagcattcgcacttaaaaatagaatccgaatgccgacaaaagaggatgaagaggaggatgagccagtggtcattaaagcgcaacccgtgccacattatggagtccctttcaaaccccagatccctgaggcaaggacagtagagatttgcccttttagcttcgactcccgagataaggaacgccagctgcagaaggaaaagaagataaaggagctgcagaaaggagaggtgcctaaatttaaggccctgcctctgcctcattttgacactattaatttgccagaaaagaaggtaaaaaacgtgacacagatcgagcccttttgcttagagaccgacaggaggggtgctctgaaggcccagacctggaaacaccaactggaggaagagctgcggcaacagaaggaagctgcatgcttcaaagccagaccaaacaccgtgatatctcaggaaccgttcgttcccaaaaaggagaagaagtctgttgctgagggactgtctggctcactggtgcaggaacccttccaattggcaacagagaaaagagcaaaggagcggcaggaactagagaagagaatggcggaggtcgaggcccagaaagctcagcagctggaagaggctagactgcaggaagaagagcagaagaaggaggaattggctaggctccgtcgcgagctggtacacaaggctaaccccatcaggaagtatcagggtctggaaattaaatcctctgaccagcccttgactgttcctgtgtctccaaagtttagtacccgattccactgttag

SEQ ID NO: 321352 - DNA, 2352 bp, Artificial Sequence
  derived and/or modified sequence
atgagccaggtgaagagcagctacagctacgacgcccccagcgactttatcaacttctctagcctggacgatgagggggacacccagaatatcgactcttggtttgaggaaaaagccaacctggaaaacaagctcttaggaaagaacggaacgggcggcctgttccaaggcaaaacacctctgagaaaagccaacctgcagcaagcaattgtgacaccgctgaaacctgtggataatacatactacaaagaagctgaaaaagaaaacctggtagaacagagcattccaagtaatgcatgctccagtcttgaggtcgaagccgctatctccaggaagactcccgctcagccccaaaggcgatcgcttagactgtctgcccagaaagatcttgagcagaaggagaaacatcatgtgaagatgaaagccaagagatgcgccacccctgtgattatcgacgagatcttgccatcgaagaagatgaaggtcagcaacaataaaaagaagcccgaggaggaaggatcagcacaccaggatacagccgagaaaaacgcgtcatcaccagagaaagccaaggggagacatacagtgccctgtatgccccctgccaaacagaagttcctgaagtccacagaagagcaagagttggagaagtcgatgaaaatgcagcaggaagtcgtggagatgcgcaagaagaacgaagagttcaagaagctggcgctcgccggtatcggtcaacctgtaaagaagagtgtgtcccaggtgaccaagtctgtagatttccatttccggacggacgagaggataaagcagcacccaaaaaaccaagaagagtacaaagaagtgaattttacgagtgaactaaggaaacaccctagtagtccagcacgcgtcaccaaaggttgcacaatcgtgaagccatttaacctctcacagggcaagaagcgtacatttgacgagacagtgtccacctacgtgcctctagcacaacaggtggaggatttccacaaaagaacaccaaatcgctatcatctgcggtctaaaaaggatgatattaagactggcagctgcagcgtcactcaggctggagtacaatggagagaccacggatcactgcagtgcccgacgcctgggctcaagcagagctcctgcctgtctctgccgaatttattgccgtcgaagagctccgttacgaagatttgccgcgacccacagactcccgtgttgcagacaaaacacagagctagggccgtcacttgcaagtccaccgccgagctggaagctgaggagctggagaaactgcagcaatataagtttaaggcacgcgagttggatccgcgaatcctcgagggcgggcctattctgccgaaaaagcctcccgtgaagccacccactgagccgattggtttcgatctagaaattgaaaaacgaattcaagaacgggagtccaagaagaaaacggaagacgagcatttcgagttccactcccgcccgtgtcccaccaagatcttagaggatgttgtcggagtcccagagaaaaaggtccttcctatcactgtgcctaaaagtcccgccttcgcactgaagaatcggatcagaatgcccactaaggaggatgaggaggaggatgaaccggttgtgattaaggcgcaacctgttcctcattacggtgtgccgtttaagcctcaaatccccgaagccagaactgtagaaatttgtccattttcttttgattctagggacaaggagcggcagctgcaaaaagagaagaagatcaaagaacttcagaagggcgaggtgccaaagttcaaggcattgcctctgccacattttgacactattaacttgcctgaaaagaaagtgaaaaacgtcactcagattgaacccttctgtctagagacagaccggcgcggcgctctcaaagcccaaacctggaaacaccagctggaggaggagctccggcagcaaaaggaggccgcctgctttaaggcccggccgaacacggtgatcagccaagagcctttcgttcccaagaaggagaagaagtccgttgcggaggggttgagtggtagcttagtacaggaacccttccagctggctactgaaaaacgagctaaggaacgccaggagttggagaagcggatggccgaagtcgaagcccagaaggctcagcagctggaggaggccaggcttcaggaggaggagcagaagaaagaggaactggccaggctcaggcgggaactcgtccacaaagcaaatcctatccgaaaatatcagggcctcgagatcaaaagttcagatcaacctcttaccgtgcccgtgagccctaagttttccacccggtttcactgttag

SEQ ID NO: 321353 - DNA, 2244 bp, Artificial Sequence
  derived and/or modified sequence
atgagccaggtcaagtcgagctactcctatgatgccccttcagactttataaattttagtagtttagacgacgagggcgacactcaaaacatcgacagctggttcgaagagaaggctaacctcgagaataagctcttgggaaagaatggcaccgggggactgttccagggaaagacacctctgcgcaaagccaacctgcaacaagccatcgtgacaccactgaagcccgttgataacacttactacaaagaagccgagaaagagaatctggtggaacagtctattcctagcaatgcctgcagctccctggaggtggaggccgctataagccggaagacgcccgctcagccgcagcggaggtcactacgcctttcagcgcaaaaagaccttgaacagaaggaaaaacaccatgtgaagatgaaggctaaaaggtgtgccacgccagtcatcatcgatgaaatccttccctccaagaaaatgaaagtgtcaaataataaaaaaaagcctgaggaggaaggatccgcgcatcaggatacggcagaaaagaatgccagctcacccgaaaaggcaaaagggcgtcatactgtcccatgtatgccccctgctaaacaaaagttcctgaagtccactgaggagcaggagctggaaaagtctatgaagatgcagcaagaagtggtagagatgaggaaaaaaaacgaggagtttaagaaactggccctggccggtattggccagccggtgaagaagtcagttagccaggtgaccaaatctgtggacttccatttcagaacagacgagcggatcaagcaacacccgaagaatcaggaggaatataaagaggtgaattttacatccgagctgcgtaaacaccctagcagccccgctagagtaacaaagggatgtaccatagtgaagccatttaatttatctcaaggaaaaaagaggacctttgacgaaaccgtgtctacgtacgtacctctggcacagcaagtcgaggattttcataaaaggactccgaaccggtaccatctgcgttccaagaaagacgatattaacttactgccatccaagagctccgtgacaaagatttgcagagacccgcagacacctgtactgcaaaccaaacaccgtgccagagccgtgacctgcaaaagcactgctgaactcgaggctgaggaactagagaagttgcagcagtataagttcaaagccagagaacttgatcctagaatcctggagggcggtccgattctgccaaagaaaccaccagtgaagccacccactgagccgattggctttgatctcgaaatcgagaagcgtatccaggagcgggaatctaaaaagaagacagaggacgaacattttgaattccactcgaggccatgtccaactaaaattctggaggacgtcgtcggagtgccagaaaagaaggtgcttcccatcacagtccctaagtctcctgcttttgctctcaagaatagaataagaatgccaacgaaagaggacgaggaagaagatgaacccgtcgttataaaggctcagcctgtgccccattatggtgtgccatttaaacctcaaatccctgaagcaaggaccgtcgagatctgtccatttagctttgacagtagagataaggagcgacagctgcagaaagaaaagaagattaaggaactgcagaagggggaggtcccaaaattcaaggcattgcccctcccccatttcgataccatcaatcttcctgaaaagaaggttaagaatgttacacaaatagagccgttctgtcttgagacagatcggaggggggctctgaaggcccaaacctggaagcatcaactcgaggaggaattaaggcaacaaaaggaggcagcctgtttcaaggcgcgtcccaataccgtgatcagccaggagccgttcgtgcctaaaaaggagaagaaatccgtggccgagggtttgtctgggagtcttgtccaagaaccttttcaacttgcgacagaaaagcgggctaaggagaggcaagaactcgaaaagcgcatggcagaagttgaagcccagaaagctcaacaactagaagaagcgaggctgcaggaggaggagcagaaaaaagaggaactggctaggctccggagagagttagtgcacaaagccaatcccatcagaaagtaccaaggactggagatcaagtcatcagatcaaccgttgaccgtgccagtctcacccaagttctctacccgcttccactgttag

SEQ ID NO: 321354 - DNA, 2352 bp, Artificial Sequence
  derived and/or modified sequence
atgtcccaggtaaaatcttcttatagctacgatgccccatctgacttcattaatttcagcagcttggacgatgaaggtgacacccaaaacatcgactcatggttcgaagaaaaggcgaatctggagaataagctgctaggaaagaatgggacaggcggtttattccaggggaaaacccccctgagaaaagcgaatttacagcaggctatcgtcacccctctcaagcctgtggataacacctattacaaggaggctgagaaagagaacctggtcgaacagtcaattccaagcaacgcctgcagttcactagaggtcgaggccgcaatcagccggaaaactccggcacagccccagagaaggtcgctgcggctgagcgcccaaaaagacttggaacagaaggagaaacaccacgtgaaaatgaaggcaaagaggtgtgccactccagtgatcattgacgagatcctccctagtaagaaaatgaaggtctctaataacaaaaagaagcccgaagaggaaggcagcgcacaccaggacacagccgagaagaatgccagcagccccgaaaaagcaaagggtagacataccgttccctgtatgccacccgctaaacagaaattcctcaaatctactgaagagcaggagttggaaaaaagcatgaaaatgcaacaggaggtggtcgaaatgcgtaagaagaacgaggagttcaaaaagcttgcactggccggtatcggccaacccgtgaaaaagtctgtcagccaggtaaccaaatctgtggactttcattttcggacagatgagagaattaaacaacatcctaagaatcaggaagaatacaaggaagtgaactttacatctgagctaagaaagcatccatctagtcctgccagagtcacaaaaggctgcacgatagttaaaccatttaatctatcccagggtaagaaacggacgttcgacgaaacagtgtcaacctacgtccccctggcgcagcaggtggaagacttccataaaagaacacccaatagataccacctgcggtctaaaaaggatgacataaagacaggaagttgctcagtgactcaagctggagtccagtggcgagaccatggttcgctccagtgccccacccctggactcaaacagagctcttgcctgtctttgccaaacctcctgccttctaagtctagcgtcactaaaatctgtcgcgacccacagaccccagtgctgcagacaaagcaccgggcaagagccgtgacatgcaaatccaccgctgaactcgaagctgaggaactggagaagttacagcagtataagtttaaggctcgggaactggatcccaggatccttgaaggaggccctatcttgcccaaaaagcccccagtgaaaccaccaacagaacctattggcttcgacctggagatcgaaaagcgcatccaagagcgtgaatcaaaaaagaaaacagaagacgaacatttcgaatttcattcacgaccatgtcccaccaagattctcgaagacgtggtcggtgtccctgaaaaaaaggtgttgccgatcacggtaccgaaaagccccgcatttgctctgaaaaaccgcatacggatgcccactaaggaagacgaggaagaagacgaacccgtggtcattaaagcgcagcccgtcccccactacggggtgccattcaaacctcaaatacccgaggctcgaactgtggagatatgcccattcagctttgacagcagggacaaggagcgccagcttcaaaaagaaaagaaaattaaagaactgcaaaaaggggaggttcccaagtttaaggctctccccttgcctcacttcgatacaataaatcttccagaaaaaaaggttaaaaacgtgacacaaatcgagccgttctgcctagagacagataggaggggggcactgaaagcccagacttggaagcatcagctggaagaggagctgaggcagcaaaaggaggctgcttgtttcaaagctcggcctaatactgtgatttcccaggagccatttgtacctaagaaagagaaaaagtcagtggccgaagggctgtccggcagtctggttcaggagcccttccagttagccaccgaaaagagggcaaaggagagacaagagctcgagaagagaatggctgaagtggaagcccaaaaagcccagcagttggaagaggccagactacaggaagaagagcagaagaaagaagagctggcacgtttgcgccgtgagctggtgcacaaagccaaccccattagaaagtaccaaggactggaaattaagagcagcgaccagcctcttacggtacctgtatcccctaaattcagtacgcggttccactgttag

SEQ ID NO: 321355 - DNA, 3497 bp, Artificial Sequence
  derived and/or modified sequence
tcaaaatttcaacgatactgaatgagtcccgcggcgggttggctcgcgcttcgttgtcagatctgaggcgaggctaggtgagccgtgggaagaaaagagggagcagctagggcgcgggtctccctcctcccggagtttggaacggctgaagttcaccttccagcccctagcgccgttcgcgccgctaggcctggcttctgaggcggttgcggtgctcggtcgccgcctaggcggggcagggtgcgagcaggggcttcgggccacgcttctcttggcgacaggattttgctgtgaagtccgtccgggaaacggaggaaaaaaagagttgcgggaggctgtcggctaataacggttcttgatacatatttgccagacttcaagatttcagaaaaggggtgaaagagaagattgcaactttgagtcagacctgtaggcctgatagactgattaaaccacagaaggtgacctgctgagaaaagtggtacaaatactgggaaaaacctgctcttctgcgttaagtgggagacaatgtcacaagttaaaagctcttattcctatgatgccccctcggatttcatcaatttttcatccttggatgatgaaggagatactcaaaacatagattcatggtttgaggagaaggccaatttggagaataagttactggggaagaatggaactggagggctttttcagggcaaaactcctttgagaaaggctaatcttcagcaagctattgtcacacctttgaaaccagttgacaacacttactacaaagaggcagaaaaagaaaatcttgtggaacaatccattccgtcaaatgcttgttcttccctggaagttgaggcagccatatcaagaaaaactccagcccagcctcagagaagatctcttaggctttctgctcagaaggatttggaacagaaagaaaagcatcatgtaaaaatgaaagccaagagatgtgccactcctgtaatcatcgatgaaattctaccctctaagaaaatgaaagtttctaacaacaaaaagaagccagaggaagaaggcagtgctcatcaagatactgctgaaaagaatgcatcttccccagagaaagccaagggtagacatactgtgccttgtatgccacctgcaaagcagaagtttctaaaaagtactgaggagcaagagctggagaagagtatgaaaatgcagcaagaggtggtggagatgcggaaaaagaatgaagaattcaagaaacttgctctggctggaatagggcaacctgtgaagaaatcagtgagccaggtcaccaaatcagttgacttccacttccgcacagatgagcgaatcaaacaacatcctaagaaccaggaggaatataaggaagtgaactttacatctgaactacgaaagcatccttcatctcctgcccgagtgactaagggatgtaccattgttaagcctttcaacctgtcccaaggaaagaaaagaacatttgatgaaacagtttctacatatgtgccccttgcacagcaagttgaagacttccataaacgaacccctaacagatatcatttgaggagcaagaaggatgatattaacctgttaccctccaaatcttctgtgaccaagatttgcagagacccacagactcctgtactgcaaaccaaacaccgtgcacgggctgtgacctgcaaaagtacagcagagctggaggctgaggagctcgagaaattgcaacaatacaaattcaaagcacgtgaacttgatcccagaatacttgaaggtgggcccatcttgcccaagaaaccacctgtgaaaccacccaccgagcctattggctttgatttggaaattgagaaaagaatccaggagcgagaatcaaagaagaaaacagaggatgaacactttgaatttcattccagaccttgccctactaagattttggaagatgttgtgggtgttcctgaaaagaaggtacttccaatcaccgtccccaagtcaccagcctttgcattgaagaacagaattcgaatgcccaccaaagaagatgaggaagaggacgaaccggtagtgataaaagctcaacctgtgccacattatggggtgccttttaagccccaaatcccagaggcaagaactgtggaaatatgccctttctcgtttgattctcgagacaaagaacgtcagttacagaaggagaagaaaataaaagaactgcagaaaggggaggtgcccaagttcaaggcacttcccttgcctcattttgacaccattaacctgccagagaagaaggtaaagaatgtgacccagattgaacctttctgcttggagactgacagaagaggtgctctgaaggcacagacttggaagcaccagctggaagaagaactgagacagcagaaagaagcagcttgtttcaaggctcgtccaaacaccgtcatctctcaggagccctttgttcccaagaaagagaagaaatcagttgctgagggcctttctggttctctagttcaggaaccttttcagctggctactgagaagagagccaaagagcggcaggagctggagaagagaatggctgaggtagaagcccagaaagcccagcagttggaggaggccagactacaggaggaagagcagaaaaaagaggagctggccaggctacggagagaactggtgcataaggcaaatccaatacgcaagtaccagggtctggagataaagtcaagtgaccagcctctgactgtgcctgtatctcccaaattctccactcgattccactgctaaactcagctgtgagctgcggataccgcccggcaatgggacctgctcttaacctcaaacctaggaccgtcttgctttgtcattgggcatggagagaacccatttctccagacttttacctacccgtgcctgagaaagcatacttgacaactgtggactccagttttgttgagaattgttttcttacattactaaggctaataatgagatgtaactcatgaatgtctcgattagactccatgtagttacttcctttaaaccatcagccggccttttatatgggtcttcactctgactagaatttagtctctgtgtcagcacagtgtaatctctattgctattgccccttacgactctcaccctctccccactttttttaaaaattttaaccagaaaataaagatagttaaatcctaagatagagattaagtcatggtttaaatgaggaacaatcagtaaatcagattctgtcctcttctctgcataccgtgaatttatagttaaggatccctttgctgtgagggtagaaaacctcaccaactgcaccagtgaggaagaagactgcgtggattcatggggagcctcacagcagccacgcagcaggctctgggtggggctgccgttaaggcacgttctttccttactggtgctgataacaacagggaaccgtgcagtgtgcattttaagacctggcctggaataaatacgttttgtctttccctccctga

SEQ ID NO: 321356 - DNA, 2244 bp, Artificial Sequence
  derived and/or modified sequence
atgagccaggtgaagagcagctacagctacgacgcccccagcgacttcatcaacttcagcagcctggacgacgagggcgacacccagaacatcgacagctggttcgaggagaaggccaacctggagaacaagctgctgggcaagaacggcaccggcggcctgttccagggcaagacccccctgagaaaggccaacctgcagcaggccatcgtgacccccctgaagcccgtggacaacacctactacaaggaggccgagaaggagaacctggtggagcagagcatccccagcaacgcctgcagcagcctggaggtggaggccgccatcagcagaaagacccccgcccagccccagagaagaagcctgagactgagcgcccagaaggacctggagcagaaggagaagcaccacgtgaagatgaaggccaagagatgcgccacccccgtgatcatcgacgagatcctgcccagcaagaagatgaaggtgagcaacaacaagaagaagcccgaggaggagggcagcgcccaccaggacaccgccgagaagaacgccagcagccccgagaaggccaagggcagacacaccgtgccctgcatgccccccgccaagcagaagttcctgaagagcaccgaggagcaggagctggagaagagcatgaagatgcagcaggaggtggtggagatgagaaagaagaacgaggagttcaagaagctggccctggccggcatcggccagcccgtgaagaagagcgtgagccaggtgaccaagagcgtggacttccacttcagaaccgacgagagaatcaagcagcaccccaagaaccaggaggagtacaaggaggtgaacttcaccagcgagctgagaaagcaccccagcagccccgccagagtgaccaagggctgcaccatcgtgaagcccttcaacctgagccagggcaagaagagaaccttcgacgagaccgtgagcacctacgtgcccctggcccagcaggtggaggacttccacaagagaacccccaacagataccacctgagaagcaagaaggacgacatcaacctgctgcccagcaagagcagcgtgaccaagatctgcagagacccccagacccccgtgctgcagaccaagcacagagccagagccgtgacctgcaagagcaccgccgagctggaggccgaggagctggagaagctgcagcagtacaagttcaaggccagagagctggaccccagaatcctggagggcggccccatcctgcccaagaagccccccgtgaagccccccaccgagcccatcggcttcgacctggagatcgagaagagaatccaggagagagagagcaagaagaagaccgaggacgagcacttcgagttccacagcagaccctgccccaccaagatcctggaggacgtggtgggcgtgcccgagaagaaggtgctgcccatcaccgtgcccaagagccccgccttcgccctgaagaacagaatcagaatgcccaccaaggaggacgaggaggaggacgagcccgtggtgatcaaggcccagcccgtgccccactacggcgtgcccttcaagccccagatccccgaggccagaaccgtggagatctgccccttcagcttcgacagcagagacaaggagagacagctgcagaaggagaagaagatcaaggagctgcagaagggcgaggtgcccaagttcaaggccctgcccctgccccacttcgacaccatcaacctgcccgagaagaaggtgaagaacgtgacccagatcgagcccttctgcctggagaccgacagaagaggcgccctgaaggcccagacctggaagcaccagctggaggaggagctgagacagcagaaggaggccgcctgcttcaaggccagacccaacaccgtgatcagccaggagcccttcgtgcccaagaaggagaagaagagcgtggccgagggcctgagcggcagcctggtgcaggagcccttccagctggccaccgagaagagagccaaggagagacaggagctggagaagagaatggccgaggtggaggcccagaaggcccagcagctggaggaggccagactgcaggaggaggagcagaagaaggaggagctggccagactgagaagagagctggtgcacaaggccaaccccatcagaaagtaccagggcctggagatcaagagcagcgaccagcccctgaccgtgcccgtgagccccaagttcagcaccagattccactgctag

SEQ ID NO: 321357 - protein, 361 aa, Artificial Sequence
  derived and/or modified sequence
MVLDDLPNLEDIYTSLCSSTMEDSEMDFDSGLEDDDTKSDSILEDSTIFVAFKGNIDDKDFKWKLDAILKNVPNLLHMESSKLKVQKVEPWNSVRVTFNIPREAAERLRILAQSNNQQLRDLGILSVQIEGEGAINLALAQNRSQDVRMNGPMGAGNSVRMEAGFPMASGPDAMDPLLSGLHIQQQSHPSGSLAPPHHPMQPVSVNRQMNPANFPQLQQQQQQQQQQQQQQQQQQQQQQQQQLQARPPQQHQQQQPQGIRPQFTAPTQVPVPPGWNQLPSGALQPPPAQGSLGTMTANQGWKKAPLPGPMQQQLQARPSLATVQTPSHPPPPYPFGSQQASQAHTNFPQMSNPGQFTAPQM

SEQ ID NO: 321358 - DNA, 6933 bp, Artificial Sequence
  derived and/or modified sequence
gtgaggccctgccgggtcgggctgcgggcggccgggcgcgggcggcgggacagacgggcgcacgcgaggactgacggacggacgcaccgagggcggcgggcacgcacggcccgggccggcgctccaaggcccgcccgggagggccggggccgcgctcagaattttgatttggctgctgggctgctaccttgaaatccaagccctaaaaatgccagcttctttggacttagaagatgacctggataaatgataaaaattaagaaagagattttgaagttttcttattgtcctcttggcatatgcttctggaataatattcaccatggttttggatgaccttccaaacttagaagacatctatacttccttgtgttcatcaacaatggaagactcagagatggattttgactctggactagaagatgatgacacaaaaagtgatagtattttggaggattccacaatttttgtggccttcaaaggaaatatagatgataaagacttcaaatggaaattagatgcaatattgaaaaacgtgcccaatttgttacacatggagtccagcaagctaaaagtacagaaggtggagccctggaacagcgtgcgtgtgacattcaacatcccccgggaagcagcggagcggctacggatccttgctcagagcaacaaccagcagcttcgggatttagggattctctccgttcagattgaaggggaaggtgctattaacctggctttggctcagaaccgaagccaagatgtgagaatgaatggacccatgggagctggaaattcagttaggatggaggcgggatttcctatggcaagtggtccagatgcaatggatccactcctctctgggctccatatacagcagcaaagtcatccctcaggatctttagctcccccacatcacccaatgcagcctgtctctgtgaacagacaaatgaacccagctaattttccccagctgcagcagcagcagcaacaacaacaacagcagcagcagcagcagcagcagcaacaacagcaacagcagcaacaacagttgcaggcaagacccccacagcaacatcagcagcaacagccacagggaattcgaccccagtttactgccccaactcaggtgcctgttcctccaggctggaaccagctgccttctggagcccttcaacctcctccagcccagggttctctgggcacaatgactgcaaaccaagggtggaagaaggctcccttgcccggcccaatgcaacagcaactccaggcaagaccatccttagccacggtacagacgccttcccaccctccccctccatatccctttggcagccagcaagcctcacaagcccacacaaactttcctcagatgagcaacccaggccagttcacagctcctcagatgaagagtttgcagggagggccctctagggtcccaactcccttgcagcagccccacctcaccaacaagtctcctgcctcctcaccctcctccttccagcagggatcccctgcatcctccccaacggttaaccaaactcagcagcagatgggaccaaggccacctcaaaataacccacttccccagggatttcagcagcctgtcagctctccgggtcggaatcctatggttcaacagggaaatgtgccacctaacttcatggtgatgcagcagcaaccaccaaaccaggggccacagagtttacatccaggcctaggaggaatgcctaaacgcctcccacctggcttctcagcaggacaggccaatccgaactttatgcaaggtcaggtgccttcgaccacagcaaccacccctgggaattcaggagcccctcagctgcaagcaaatcaaaatgtccagcatgcaggtggtcaaggagctggtcctcctcaaaaccagatgcaggtgtcccacgggccgccaaatatgatgcagcccagcctcatgggaattcatggcaacatgaacaatcagcaggctggtacttctggggttcctcaagtgaacctcagcaacatgcaaggccagccccagcagggcccaccatctcagctgatgggcatgcaccagcaaatcgtgccctcccagggccagatggtccagcaacaaggaaccttgaaccctcagaaccctatgatcctttcaagggcccagcttatgccacagggccagatgatggtgaaccccccgagccaaaatcttgggccctcgccccaaaggatgaccccacccaagcagatgctttcccagcagggcccacaaatgatggcgccacataaccagatgatggggcctcaggggcaggttttgctccaacagaacccaatgatagagcagattatgaccaatcaaatgcaggggaataagcagcagtttaacactcagaaccagtccaatgtcatgccgggaccagcccagataatgaggggaccaactccaaacatgcaaggaaatatggtgcagtttacgggacagatgtcaggacagatgctgccccagcaagggcctgtgaacaacagtccatctcaggttatgggcattcagggacaggtcctgcggccaccagggcccagcccacacatggcccagcagcatggtgatcctgctactacagcaaataacgatgtcagtttatctcagatgatgcctgatgttagcattcaacaaaccaacatggtcccccctcatgtgcaggccatgcagggaaacagtgcctcgggaaaccacttctcaggccatgggatgtctttcaatgcacctttcagtggagctcccaatggaaatcagatgtcctgtggtcaaaatccaggcttcccagtcaataaggatgtcacgctaacgagcccattgttggtcaacttattgcagagtgacatatctgcaggccattttggggtaaacaataagcaaaataataccaacgcaaataaaccgaagaagaagaaaccccctcggaagaagaaaaatagtcagcaagatctaaacaccccagatactcgcccagctggtctggaagaggctgatcagccaccgttgcctggagaacaaggaattaacttggataactcaggccctaaactgccagaattttcaaaccggccaccaggttatccttctcaaccagttgaacagaggccacttcagcagatgcctcctcaactcatgcagcatgtggcacccccaccacagccaccacagcagcagccacagccacaactgcctcagcagcagcagccaccacctcccagtcagccacagtctcagcagcagcagcagcagcagcaacaaatgatgatgatgctcatgatgcagcaggatcccaaatcagttaggcttccagtctctcaaaatgtccatcctccaaggggccccctgaaccccgactcccagagaatgcccatgcaacagagtggcagtgtgcctgtcatggtcagtctgcaaggacctgcctccgtgccaccatcacctgataaacaaagaatgccaatgcctgtgaatactcccttgggaagcaattcaaggaaaatggtctatcaggagagcccgcagaatccttccagctcgccactggcggagatggcctcactccctgaagcaagtggcagtgaagcaccatctgtcccaggaggcccaaacaacatgccttcacatgtagtacttccccagaatcagttaatgatgacagggccaaaacctggaccatcgcccctttcagcaactcaaggtgcaactccccagcaaccccctgtaaattccctgcccagctctcacggccaccacttcccaaatgtggctgcgccaacccagacatctaggcccaaaacaccaaacagagccagccccagaccctattatcctcagacacccaacaaccgccctcccagcacagaaccttcagaaatcagtctgtcaccagaaagactcaatgcctccatagcaggactcttccctccacagattaatattcctttacctcctaggccaaatttaaacaggggctttgatcaacaaggcctaaatccaacaactttgaaggccatcgggcaagcaccttcaaatcttaccatgaatccttccaattttgctaccccacaaactcacaaattagattctgtggtagtgaattctggaaagcagtctaattctggagcaacaaaacgggcaagtccaagcaacagtcgcaggtctagtcctgggtccagtaggaaaaccactccaagccctgggaggcaaaattcaaaagcccctaaacttactctggcctctcagacaaatgcagccctattgcagaatgtggagttgccgagaaatgtattggtcagtcccactcctctggccaatccccctgtacctgggagctttcctaacaacagtgggctgaatcctcagaattctactgtgtctgtggctgcagttgggggtgttgttgaggataacaaggagagcttgaatgtgcctcaggacagtgattgccagaattcccagagtaggaaggaacaggtaaacattgaactaaaagcagtccctgcccaagaagttaaaatggttgtccctgaagatcagtccaaaaaggatgggcagccttcggatcctaacaaacttcccagtgtcgaagagaacaaaaatttggtgtctcctgctatgagggaagcaccaacatcgttaagtcaacttcttgacaactctggagctcccaatgtgacaattaaaccccctgggcttacagatctggaagtaacacctccagtagtttctggggaggacctcaaaaaagcatctgtcattcccacactgcaggatctgtcttcttctaaagaaccttctaattccctaaacttacctcacagtaatgagctgtgttcatcccttgtgcatcccgaattgagtgaggtcagttctaacgttgcaccaagcatccctccagtaatgtcaagacctgttagctcttcctccatttccactcccttgcccccaaatcaaataactgtatttgtcacttccaatcccatcacaacttcagctaacacatcagcagctttgccaactcacttgcagtctgcattgatgtcaacagttgtcacaatgcccaatgcgggtagcaaggttatggtttctgagggacagtcagctgctcagtctaatgcccggcctcagttcattacacctgtctttatcaattcatcctcaataattcaggttatgaaaggatcacagccaagcacaattcctgcagccccactgacaaccaactctggcctgatgcctccctctgttgcagttgttggccctttacacatacctcagaacataaaattttcttctgctcctgtaccgcctaatgccctctccagtagtcctgctccaaacatccagacaggtcgacctttggtccttagctcacgagccacccctgttcagcttccttcccctccttgtacgtcttctccagttgtcccttctcatccccctgtgcagcaagtgaaagaattgaatccagatgaggctagccctcaggtgaacacctcagcagatcagaacactcttccctcttcacagtcaaccacaatggtttctccccttttgaccaatagtccagggtcctctggcaaccggcgaagcccagtctcgtctagtaagggcaaaggaaaagtggacaaaattggccaaattttgttgaccaaggcatgtaagaaagttacaggctctcttgagaaaggggaagaacaatatggtgcagatggagagactgaaggccaagggctagacaccacagctccggggctcatgggaacagagcagttatccacagagctggacagtaaaaccccaacgcccccagcacccactctgctaaaaatgacctctagccctgtgggcccgggcactgcctcagcaggacccagcttacctggcggtgctctccccaccagtgtacgctcgatagtaaccactctggtaccctccgagctcatctccgccgtaccgaccacaaaaagcaatcatggtggcatagcatctgagtcacttgcgggtggcctagtggaggagaaggtgggatcccatccagaacttctacccagcatagccccgtcgcagaatttagtctcaaaggaaacttcaaccacagcactgcaggcctctgttgccagaccagagctggaggtaaatgctgccatagtctctggacaaagcagtgagcccaaagagatagttgaaaagtccaaaatcccaggccgaagaaactcccgaactgaagagccaactgtggcctctgaaagtgtggaaaatggacatcgtaaacgatcttctcgacctgcttcagcctccagctctactaaagacataaccagtgcggtgcaatccaagcgaagaaaatccaagtaaacaagcaggactgcgacttgatacttggaaatgtgtgtgacttttacaaagagcaattttgagctgtgacttttttaaatcaatttctgtacagttagtaattttaataatgtggcccttttcctagtccctgcaacctgtttcataaagtgcaatggggaaagcaggactgttgagcccttttggtgttgcgagttgaagttcaaggtttctaaaatgttgtcttgtattgaaaggagctaatgccattataaatgttactagttttcacatttcctaagcagcctagagtacagggtgagcatttttagatctcctaatgatgtattgtgccgtggaagtactgtgtgtgaatagcagtagtgggggcaaaagcaatcttctcatttggaaatgttgtaaataattttattatatagtgttttggatgtatttgttgtagaaatggaccagtgaataaagagaatctaaggatttgtacaatgtgaaataacgtgttaaataaatgtcattgtcatagaacataaagttatgttattggtaaggga

SEQ ID NO: 321359 - DNA, 2163 bp, Artificial Sequence
  derived and/or modified sequence
gaagctccgcaggatgggggagaagatggcggaagaggagaggttccccaatacaactcatgagggtttcaatgtcaccctccacaccaccctggttgtcacgacgaaactggtgctcccgacccctggcaagcccatcctccccgtgcagacaggggagcaggcccagcaagaggagcagtccagcggcatgaccattttcttcagcctccttgtcctagctatctgcatcatattggtgcatttactgatccgatacagattacatttcttgccagagagtgttgctgttgtttctttaggtattctcatgggagcagttataaaaattatagagtttaaaaaactggcgaattggaaggaagaagaaatgtttcgtccaaacatgtttttcctcctcctgcttccccctattatctttgagtctggatattcattacacaagggtaacttctttcaaaatattggttccatcaccctgtttgctgtttttgggacggcaatctccgcttttgtagtaggtggaggaatttattttctgggtcagttttgcgtttggctccctaatatctgctgtcgatccagtggccactattgccattttcaatgcacttcatgtggaccccgtgctcaacatgctggtctttggagaaagtattctcaacgatgcagtctccattgttctgaccaattgtcatttacgtgctgaagcatattgacttgaggaaaacgccttccttggagtttggcatgatgatcatttttgcttatctgccttatgggcttgcagaaggaatctcactctcaggcatcatggccatccttttctcaggcatcgtgatgtcccactacacgcaccataacctctccccagtcacccagatcctcatgcagcagaccctccgcaccgtggccttcttatgtgaaacatgtgtgtttgcatttcttggcctgtccatttttagttttcctcacaagtttgaaatttcctttgtcatctggtgcatagtgcttgtactatttggcagagcggtaaacattttccctctttcctacctcctgaatttcttccgggatcataaaatcacaccgaagatgatgttcatcatgtggtttagtggcctgcggggagccatcccctatgccctgagcctacacctggacctggagcccatggagaagcggcagctcatcggcaccaccaccatcgtcatcgtgctcttcaccatcctgctgctgggcggcagcaccatgcccctcattcgcctcatggacatcgaggacgccaaggcacaccgcaggaacaagaaggacgtcaacctcagcaagactgagaagatgggcaacactgtggagtcggagcacctgtcggagctcacggaggaggagtacgaggcccactacatcaggcggcaggaccttaagggcttcgtgtggctggacgccaagtacctgaaccccttcttcactcggaggctgacgcaggaggacctgcaccacgggcgcatccagatgaaaactctcaccaacaagtggtacgaggaggtacgccagggcccctccggctccgaggacgacgagcaggagctgctctgacgccaggtgccaaggcttcaggcaggcaggcccaggatgggcgtttgctgcgcacagacactcagcaggggcctcgcagagatgcgtgcatccagcagccccttcaagacataagagggcggggcgaggtactggctgcagagtcgccttagtccagaacctgacaggcctctggagccaggcgacttcttgggaaactgtcatctcccgactcctccctgagccagcctccgctcagtgtggctcctcagcccacagaggggagggagcatggggccaggtgccagtcatctgtgaagctagggcgcctacccccccacccggaggacccctgcggccccctgcctagaggagcaccatctacagttgtgccattccccagccactgccttcatgctgcccccgccggactggcagagccaggggtcagccacctgcctttgagtcatcaagatgcctctgcagccacaattctgacctaagtggcagggcccagaaatcctgaaaacctcccgctgccttttgtgatacttcctgtgctccctcagagagaaacggagtgacctt

SEQ ID NO: 321360 - DNA, 846 bp, Artificial Sequence
  derived and/or modified sequence
atgatgatcatcttcgcctacctgccctacggcctggccgagggcatcagcctgagcggcatcatggccatcctgttcagcggcatcgtgatgagccactacacccaccacaacctgagccccgtgacccagatcctgatgcagcagaccctgagaaccgtggccttcctgtgcgagacctgcgtgttcgccttcctgggcctgagcatcttcagcttcccccacaagttcgagatcagcttcgtgatctggtgcatcgtgctggtgctgttcggcagagccgtgaacatcttccccctgagctacctgctgaacttcttcagagaccacaagatcacccccaagatgatgttcatcatgtggttcagcggcctgagaggcgccatcccctacgccctgagcctgcacctggacctggagcccatggagaagagacagctgatcggcaccaccaccatcgtgatcgtgctgttcaccatcctgctgctgggcggcagcaccatgcccctgatcagactgatggacatcgaggacgccaaggcccacagaagaaacaagaaggacgtgaacctgagcaagaccgagaagatgggcaacaccgtggagagcgagcacctgagcgagctgaccgaggaggagtacgaggcccactacatcagaagacaggacctgaagggcttcgtgtggctggacgccaagtacctgaaccccttcttcaccagaagactgacccaggaggacctgcaccacggcagaatccagatgaagaccctgaccaacaagtggtacgaggaggtgagacagggccccagcggcagcgaggacgacgagcaggagctgctgtag

SEQ ID NO: 321361 - DNA, 846 bp, Artificial Sequence
  derived and/or modified sequence
atgatgatcatcttcgcctatctgccatatggactcgcagagggcatatctctgtctggaataatggcaattctcttctctggaattgtgatgtcacactacacacaccataacttgagcccagtaacgcagatactgatgcagcagaccctgagaacggtcgctttcctgtgcgaaacatgcgtgttcgcctttttaggcctgtccatcttcagcttcccccataaattcgagataagtttcgtcatttggtgcattgtacttgttctctttgggagggcagtcaatatattccctctcagctacctactgaattttttccgtgatcacaaaattacccccaaaatgatgttcatcatgtggttttcagggttgcggggggctatcccctatgctttgagcctccatctggatctggaacccatggaaaagcgtcagcttatcggaacaacaaccatcgtaatcgtccttttcacaattctgctgctgggggggagcacaatgccacttatccggctgatggacatagaagatgcgaaggcacatcggcggaacaagaaagatgtgaatctgtctaagacggaaaagatgggaaacacagttgaatcagagcacttgtcagaattaactgaagaggagtacgaagctcactacattaggaggcaggacctgaagggcttcgtatggcttgacgctaaatatctgaatcccttcttcacaaggaggttgactcaagaggatttgcaccacggaagaatacagatgaaaactctgaccaacaagtggtatgaagaagtcaggcaaggacctagtggctccgaggatgacgagcaagaattactgtag

SEQ ID NO: 321362 - DNA, 846 bp, Artificial Sequence
  derived and/or modified sequence
atgatgatcatctttgcctacctgccctacggcctggccgagggcatcagcctgagcggcatcatggccatcctcttctctggaattgtgatgagccactacacccaccacaacctgagccctgtgacccagatcctgatgcagcagaccctgaggacagtggccttcctgtgtgagacctgtgtgtttgccttcctgggcctgagcatcttctccttcccccacaagtttgagatcagctttgtgatctggtgcatcgtgctggtgctgtttggccgggctgtgaacatcttccccctgagctacctgctgaacttcttccgggaccacaagatcacccccaagatgatgttcatcatgtggttcagcggcctgcggggggccatcccctatgccctgagcctgcacctggacctggagcccatggagaagaggcagctgattggcaccaccaccatcgtgattgtgctcttcaccatcctgctgctgggcggcagcaccatgcccctcatccggctgatggacattgaagatgccaaggcccacagaagaaacaagaaggatgtgaacctgagcaagacagagaagatgggcaacacagtggagagcgagcacctgtctgagctgacagaggaggagtatgaggcccactacatccggcggcaggacctgaagggctttgtgtggctggatgccaagtacctgaaccccttcttcacccggcggctgacccaggaggacctgcaccacggccgcatccagatgaagaccctgaccaacaagtggtatgaggaggtgcggcagggccccagcggctctgaagatgatgagcaggagctgctgtag

SEQ ID NO: 321363 - DNA, 846 bp, Artificial Sequence
  derived and/or modified sequence
atgatgatcatcttcgcctacctgccctacggcctggccgagggcatctccctgagcggaatcatggccatccttttcagtggcattgttatgtcacactacactcatcacaacctctcacccgtgacccagattctaatgcagcagactcttcgtacagtagcatttctctgtgagacctgcgtgttcgctttcctcggattgagtatattctcatttcctcacaagttcgaaatcagctttgtgatctggtgcatcgttctcgtgttattcgggagggctgtgaacatctttcctctcagctatttgctgaatttttttagagaccacaaaattactcccaaaatgatgttcattatgtggtttagtggactccgcggggctatcccttacgcattgtcactccatttggatctcgaacccatggagaaacgtcagctgattggtactaccaccatcgtcattgttctgtttaccatcttgctgctaggtgggtctactatgcctttgatccggctgatggacatagaggacgcaaaggcccaccgcaggaataagaaagatgtgaaccttagtaagacagagaagatggggaatacggtggaatcagagcacctttccgagctgacagaagaggaatacgaagcccactatattaggcgacaggacttgaaaggttttgtctggctggacgccaagtatctgaatccgttcttcactcgcagattgacacaggaggacctgcatcacgggcggattcagatgaaaactctgaccaacaaatggtatgaggaggtgcgccagggccccagcggcagtgaggatgatgaacaggaattgctgtag

SEQ ID NO: 321364 - DNA, 846 bp, Artificial Sequence
  derived and/or modified sequence
atgatgatcatattcgcttatctaccctacgggctcgctgaaggaatttctctgagcgggataatggccatcctgttctccggaatagtcatgagccactacacacatcataacctttctcctgtcacccagatccttatgcagcaaaccctaagaactgtggcatttttatgcgaaacctgcgttttcgcttttctggggctttcaatattttctttccctcacaaatttgaaatctcatttgtcatctggtgtatcgtcctggtactattcggacgagctgtaaacatttttccactgtcatacttactcaatttctttcgggaccataagattacaccaaaaatgatgttcatcatgtggtttagcgggctgcgcggagccattccgtatgcattatcactccatctggatctggagccaatggagaagcgacagctgattgggaccaccaccatcgtcatagtcctgtttacaatcctcctgctaggcggaagcaccatgccccttatccgactgatggatatagaagacgcgaaagctcacaggagaaataagaaagatgtaaatctgtccaagactgaaaaaatgggcaatactgtcgaaagtgaacacctaagcgagctgacggaagaggaatacgaggctcactacatcagaaggcaggatctgaagggatttgtatggctggacgcaaagtatctgaatcctttcttcacccggaggctcacccaggaggacctacaccatgggcgaattcagatgaagaccctcaccaataaatggtatgaagaggtgaggcagggcccaagtgggtccgaagacgatgagcaggaactcctgtag

SEQ ID NO: 321365 - protein, 173 aa, Artificial Sequence
  derived and/or modified sequence
MFQLPVNNLGSLRKARKTVKKILSDIGLEYCKEHIEDFKQFEPNDFYLKNTTWEDVGLWDPSLTKNQDYRTKPFCCSACPFSSKFFSAYKSHFRNVHSEDFENRILLNCPYCTFNADKKTLETHIKIFHAPNASAPSSSLSTFKDKNKNDGLKPKQADSVEQAVYYCKKCTYR

SEQ ID NO: 321366 - DNA, 522 bp, Artificial Sequence
  derived and/or modified sequence
atgttccagctgcccgtgaacaacctgggcagcctgagaaaggccagaaagaccgtgaagaagatcctgagcgacatcggcctggagtactgcaaggagcacatcgaggacttcaagcagttcgagcccaacgacttctacctgaagaacaccacctgggaggacgtgggcctgtgggaccccagcctgaccaagaaccaggactacagaaccaagcccttctgctgcagcgcctgccccttcagcagcaagttcttcagcgcctacaagagccacttcagaaacgtgcacagcgaggacttcgagaacagaatcctgctgaactgcccctactgcaccttcaacgccgacaagaagaccctggagacccacatcaagatcttccacgcccccaacgccagcgcccccagcagcagcctgagcaccttcaaggacaagaacaagaacgacggcctgaagcccaagcaggccgacagcgtggagcaggccgtgtactactgcaagaagtgcacctacagatag

SEQ ID NO: 321367 - DNA, 522 bp, Artificial Sequence
  derived and/or modified sequence
atgtttcagttacccgtgaacaacctaggtagtctccgcaaggcccgaaaaacagtgaaaaaaatcctgagcgacatcggactggagtattgtaaggaacacatcgaggattttaagcagtttgaaccaaacgacttttatttaaagaatactacatgggaagatgtgggcttgtgggacccaagtctcacaaaaaaccaagactatagaaccaaacccttttgttgcagcgcttgtcccttcagtagcaagttcttctccgcttacaaatctcatttccggaatgtgcattccgaggacttcgagaatcgtattttactgaactgtccttactgcacattcaatgctgataaaaagactcttgagacccacataaagatcttccatgctccgaacgcatcagctccctctagttccctttccacatttaaggacaaaaataaaaacgatgggctcaagcctaaacaggccgacagcgttgagcaggctgtgtactattgtaaaaaatgcacatatcgctag

SEQ ID NO: 321368 - DNA, 522 bp, Artificial Sequence
  derived and/or modified sequence
atgttccagctgcctgtgaacaacctgggcagcctgaggaaggccaggaagacagtgaagaagatcctgagtgacatcggcctggagtactgcaaggagcacatcgaggacttcaagcagtttgagcccaatgacttctacctgaagaacaccacctgggaggatgtgggcctgtgggaccccagcctgaccaagaaccaggactaccgcaccaagcccttctgctgcagcgcctgccccttcagcagcaagttcttcagcgcctacaagagccacttcagaaatgtgcacagtgaagattttgagaaccgcatcctgctgaactgcccctactgcaccttcaatgctgacaagaagaccctggagacccacatcaagatcttccacgccccaaatgccagcgcccccagcagcagcctgagcaccttcaaggacaagaacaagaatgatggcctgaagcccaagcaggccgacagcgtggagcaggccgtgtactactgcaagaagtgcacctacagatag

SEQ ID NO: 321369 - DNA, 522 bp, Artificial Sequence
  derived and/or modified sequence
atgttccagctgcccgtgaacaacctgggcagcctgcggaaggcccgcaaaactgtgaagaaaatcctgtctgatataggactcgagtattgcaaagagcacatcgaagactttaaacagttcgaaccaaacgacttctacctgaaaaatacaacttgggaggatgtgggtttgtgggaccctagtctcaccaagaaccaggactacaggactaaacccttttgctgcagcgcctgcccgttttcttcaaaattttttagcgcttataagtcacattttaggaacgtgcattccgaggattttgagaaccgtattctgctgaactgcccgtactgcacctttaatgctgataagaagacccttgagactcacatcaagatcttccacgcccccaacgcctcagcaccctcctcttcgctatctacattcaaggacaagaacaagaacgatgggcttaaacccaaacaggccgactcagtggaacaagccgtgtactactgtaagaagtgtacgtacagatag

SEQ ID NO: 321370 - DNA, 522 bp, Artificial Sequence
  derived and/or modified sequence
atgtttcagctgcccgttaacaaccttgggtccctcagaaaggcccgaaagactgttaagaaaattctgagcgatatcggcctggagtactgcaaggagcatatcgaggatttcaaacagttcgaaccaaacgatttctatctgaagaacactacatgggaggacgtggggctatgggatcccagtttgaccaaaaatcaggattaccgcaccaagcctttttgctgctctgcatgcccttttagtagcaaatttttcagtgcttataagtcacactttcgcaacgtccacagtgaagactttgagaacagaatccttctcaattgcccctactgcacttttaatgctgataagaagacattagaaactcatattaagattttccatgccccaaacgcatccgctccctctagttccctatctaccttcaaggacaagaataaaaacgacgggttgaaacccaagcaggcggactcagttgaacaggctgtatactattgtaaaaagtgtacatacagatag

SEQ ID NO: 321371 - DNA, 522 bp, Artificial Sequence
  derived and/or modified sequence
atgttccagctgcccgttaacaaccttggatcattacgaaaagcccggaaaacggttaaaaaaattttgtccgatatcggccttgaatattgcaaagaacacatcgaagatttcaagcaatttgagcctaacgatttttacttaaagaacacaacatgggaggatgttggcctgtgggacccaagcctcacaaagaaccaggattacaggaccaaacccttctgctgtagcgcctgccctttctcctctaagtttttctctgcttataagagtcactttcggaatgtgcactcagaggatttcgaaaaccgcatcctcttaaactgtccatactgtactttcaatgctgacaagaagaccctcgagacacacatcaaaattttccatgcccctaatgcatccgcaccatcatcatcactatctactttcaaagataagaataaaaacgacggtcttaagccaaagcaggctgattcggtggagcaggcagtgtattactgtaaaaagtgtacttaccgctag

SEQ ID NO: 321372 - DNA, 522 bp, Artificial Sequence
  derived and/or modified sequence
atgtttcaactgccagtcaacaacctcggatcgctaaggaaagcacgaaagaccgttaagaagatcctgtccgacattggtttagaatactgcaaggaacatatagaggactttaaacagtttgaacctaatgatttttaccttaagaacaccacttgggaggacgtgggactctgggacccttcacttactaaaaatcaggattatcgaaccaagcctttctgttgcagcgcctgccccttctcatcaaaatttttttccgcctacaaatcacattttagaaacgtccacagcgaggacttcgagaaccgaatcttactgaattgcccctactgtacctttaatgccgacaaaaagactctcgagactcatattaagattttccatgccccaaacgcttctgcaccctccagtagcctctccacattcaaagataaaaataaaaacgatggactgaagccaaaacaggccgacagtgtagagcaggctgtgtattactgtaaaaagtgtacttatcgctag

SEQ ID NO: 321373 - RNA, 522 nt, Artificial Sequence
  derived and/or modified sequence
auguuccagcugcccguuaacaaccuuggaucauuacgaaaagcccggaaaacgguuaaaaaaauuuuguccgauaucggccuugaauauugcaaagaacacaucgaagauuucaagcaauuugagccuaacgauuuuuacuuaaagaacacaacaugggaggauguuggccugugggacccaagccucacaaagaaccaggauuacaggaccaaacccuucugcuguagcgccugcccuuucuccucuaaguuuuucucugcuuauaagagucacuuucggaaugugcacucagaggauuucgaaaaccgcauccucuuaaacuguccauacuguacuuucaaugcugacaagaagacccucgagacacacaucaaaauuuuccaugccccuaaugcauccgcaccaucaucaucacuaucuacuuucaaagauaagaauaaaaacgacggucuuaagccaaagcaggcugauucgguggagcaggcaguguauuacuguaaaaaguguacuuaccgcuag

SEQ ID NO: 321374 - RNA, 522 nt, Artificial Sequence
  derived and/or modified sequence
auguuucaacugccagucaacaaccucggaucgcuaaggaaagcacgaaagaccguuaagaagauccuguccgacauugguuuagaauacugcaaggaacauauagaggacuuuaaacaguuugaaccuaaugauuuuuaccuuaagaacaccacuugggaggacgugggacucugggacccuucacuuacuaaaaaucaggauuaucgaaccaagccuuucuguugcagcgccugccccuucucaucaaaauuuuuuuccgccuacaaaucacauuuuagaaacguccacagcgaggacuucgagaaccgaaucuuacugaauugccccuacuguaccuuuaaugccgacaaaaagacucucgagacucauauuaagauuuuccaugccccaaacgcuucugcacccuccaguagccucuccacauucaaagauaaaaauaaaaacgauggacugaagccaaaacaggccgacaguguagagcaggcuguguauuacuguaaaaaguguacuuaucgcuag

SEQ ID NO: 321375 - protein, 1102 aa, Artificial Sequence
  derived and/or modified sequence
MFQLPVNNLGSLRKARKTVKKILSDIGLEYCKEHIEDFKQFEPNDFYLKNTTWEDVGLWDPSLTKNQDYRTKPFCCSACPFSSKFFSAYKSHFRNVHSEDFENRILLNCPYCTFNADKKTLETHIKIFHAPNASAPSSSLSTFKDKNKNDGLKPKQADSVEQAVYYCKKCTYRDPLYEIVRKHIYREHFQHVAAPYIAKAGEKSLNGAVPLGSNAREESSIHCKRCLFMPKSYEALVQHVIEDHERIGYQVTAMIGHTNVVVPRSKPLMLIAPKPQDKKSMGLPPRIGSLASGNVRSLPSQQMVNRLSIPKPNLNSTGVNMMSSVHLQQNNYGVKSVGQGYSVGQSMRLGLGGNAPVSIPQQSQSVKQLLPSGNGRSYGLGSEQRSQAPARYSLQSANASSLSSGQLKSPSLSQSQASRVLGQSSSKPAAAATGPPPGNTSSTQKWKICTICNELFPENVYSVHFEKEHKAEKVPAVANYIMKIHNFTSKCLYCNRYLPTDTLLNHMLIHGLSCPYCRSTFNDVEKMAAHMRMVHIDEEMGPKTDSTLSFDLTLQQGSHTNIHLLVTTYNLRDAPAESVAYHAQNNPPVPPKPQPKVQEKADIPVKSSPQAAVPYKKDVGKTLCPLCFSILKGPISDALAHHLRERHQVIQTVHPVEKKLTYKCIHCLGVYTSNMTASTITLHLVHCRGVGKTQNGQDKTNAPSRLNQSPSLAPVKRTYEQMEFPLLKKRKLDDDSDSPSFFEEKPEEPVVLALDPKGHEDDSYEARKSFLTKYFNKQPYPTRREIEKLAASLWLWKSDIASHFSNKRKKCVRDCEKYKPGVLLGFNMKELNKVKHEMDFDAEWLFENHDEKDSRVNASKTADKKLNLGKEDDSSSDSFENLEEESNESGSPFDPVFEVEPKISNDNPEEHVLKVIPEDASESEEKLDQKEDGSKYETIHLTEEPTKLMHNASDSEVDQDDVVEWKDGASPSESGPGSQQVSDFEDNTCEMKPGTWSDESSQSEDARSSKPAAKKKATMQGDREQLKWKNSSYGKVEGFWSKDQSQWKNASENDERLSNPQIEWQNSTIDSEDGEQFDNMTDGVAEPMHGSLAGVKLSSQQA

SEQ ID NO: 321376 - DNA, 4713 bp, Artificial Sequence
  derived and/or modified sequence
cggccgcggcgcgagccggagtccgccgagccggagcgcgacgaggccccgggcgcgccctccccgctgccgccaccgccgtgccgccgccatccgcccgccgccgccgccgctgtccggcccccgagcacgccggccccgcgcgcgcctcgaggccgagtcaaggtgtgagatgcacaatgcgaaacctaggccccagcttttacaccatgatgcgcagggttgtactttttgtactgaactgataggtggcctagtggttatgccctgtactaccattttgaggatctggactccgtttcctgccttgctctttggaccacattgtcaattcacaccgaaactatgttccaacttcctgtcaacaatcttggcagtttaagaaaagcccggaaaactgtgaaaaaaatacttagtgacattgggttggaatactgtaaagaacatatagaagattttaaacaatttgaacctaatgacttttatttgaaaaacactacatgggaggatgtaggactgtgggacccatcacttacgaaaaaccaggactatcggacaaaacctttctgctgcagcgcttgtccattttcctcaaaattcttctctgcctacaaaagtcatttccgcaatgtccatagtgaagactttgaaaataggattctccttaattgcccctactgtaccttcaatgcagacaaaaagactttggaaacacacattaaaatatttcatgctccgaacgccagcgcaccaagtagcagcctcagcactttcaaagataaaaacaaaaatgatggccttaaacctaagcaggctgacagtgtagagcaagctgtttattactgtaagaagtgcacttaccgagatcctctttatgaaatagttaggaagcacatttacagggaacattttcagcatgtggcagcaccttacatagcaaaggcaggagaaaaatcactcaatggggcagtccccttaggctcgaatgcccgagaagagagtagtattcactgcaagcgatgccttttcatgccaaagtcctatgaagctttggtacagcatgtcatcgaagaccatgaacgtataggctatcaggtcactgccatgattgggcacacaaatgtagtggttccccgatccaaacccttgatgctaattgctcccaaacctcaagacaagaagagcatgggactcccaccaaggatcggttcccttgcttctggaaatgtccggtctttaccatcacagcagatggtgaatcgactctcaataccaaagcctaacttaaattctacaggagtcaacatgatgtccagtgttcatctgcagcagaacaactatggagtcaaatctgtaggccagggttacagtgttggtcagtcaatgagactgggtctaggtggcaacgcaccagtttccattcctcaacaatctcagtctgtaaagcagttacttccaagtggaaacggaaggtcttatgggcttgggtcagagcagaggtcccaggcaccagcaagatactccctgcagtctgctaatgcctcttctctctcatcgggccagttaaagtctccttccctctctcagtcacaggcatccagagtgttaggtcagtccagttccaaacctgctgcagctgccacaggccctcccccaggtaacacttcctcaactcaaaagtggaaaatatgtacaatctgtaatgagctttttcctgaaaatgtctatagtgtgcacttcgaaaaagaacataaagctgagaaagtcccagcagtagccaactacattatgaaaatacacaattttactagcaaatgcctctactgtaatcgctatttacccacagatactctgctcaaccatatgttaattcatggtctgtcttgtccatattgccgttcaactttcaatgatgtggaaaagatggccgcacacatgcggatggttcacattgatgaagagatgggacctaaaacagattctactttgagttttgatttgacattgcagcagggtagtcacactaacatccatctcctggtaactacatacaatctgagggatgccccagctgaatctgttgcttaccatgcccaaaataatcctccagttcctccaaagccacagccaaaggttcaggaaaaggcagatatccctgtaaaaagttcacctcaagctgcagtgccctataaaaaagatgttgggaaaaccctttgtcctctttgcttttcaatcctaaaaggacccatatctgatgcacttgcacatcacttacgagagaggcaccaagttattcagacggttcatccagttgagaaaaagctcacctacaaatgtatccattgccttggtgtgtataccagcaacatgaccgcctcaactatcactctgcatctagttcactgcaggggcgttggaaagacccaaaatggccaggataagacaaatgcaccctctcggcttaatcagtctccaagtctggcacctgtgaagcgcacttacgagcaaatggaatttcccttactgaaaaaacgaaagttagatgatgatagtgattcacccagcttctttgaagagaagcctgaagagcctgttgttttagctttagaccccaagggtcatgaagatgattcctatgaagccaggaaaagctttctaacaaagtatttcaacaaacagccctatcccaccaggagagaaattgagaagctagcagccagtttatggttatggaagagtgacatcgcttcccattttagtaacaaaaggaagaagtgtgtccgtgattgtgaaaagtacaagcctggcgtgttgctggggtttaacatgaaagaattaaataaagtcaagcatgagatggattttgatgctgagtggctatttgaaaatcatgatgagaaggattccagagtcaatgctagtaagactgctgacaaaaagctcaaccttgggaaggaagatgacagttcctcagacagttttgaaaatttggaagaagaatccaatgaaagtggtagcccttttgaccctgtttttgaagttgaacctaaaatctctaacgataacccagaggaacatgtactgaaggtaattcctgaggatgcttcagaatctgaggagaagctagaccaaaaagaggatggttcaaaatacgaaactattcatttgactgaggaaccaaccaaactaatgcacaatgcatctgatagtgaggttgaccaagacgatgttgttgagtggaaagacggtgcttctccatctgagagtgggcctggatcccaacaagtgtcagactttgaggacaatacctgcgaaatgaaaccaggaacctggtctgacgagtcttcccaaagcgaagatgcaaggagcagtaagccagctgccaaaaaaaaggctaccatgcaaggtgacagagagcagttgaaatggaagaatagttcctatggaaaagttgaagggttttggtctaaggaccagtcacagtggaagaatgcatctgagaatgatgagcgcttatctaacccccagattgagtggcagaatagcacaattgacagtgaggatggggaacagtttgacaacatgactgatggagtagctgagcccatgcatggcagcttagccggagttaaactgagcagccaacaggcctaagtgccaggttccctggcgttggtgacatgctgcagcctggaactctgatctccagtgtgactgcaaagctgtcttctcactggtactgccttgtgagtactggttggactgtggggcatgtggccgctgcagttccagtggttatttctaagtctatgacaggacaggctgttcttgcttcagaaccttctctgacagacacggtaactaaatgtgaaaaaccaataagctggtgactcatgaatacacacgaggaaaagcagaggtttattttatctgccttttcaacatttctttccctctgtgaaatgattggtcagatgtctttgagaagtgttaaactaattcacatggtagtgtagggccaacatacaagctaccagtctaatgtgtatagtagactttgggaaaagcgattttttttcatgtattcattctgaatagttgaaatgtatatttgtacagtcttttagacctattcaagtgatgctcatgatcctgttactgtgtgcccatcatagatttctttttttagtgttgcccttgctgtgtaataaacgctctatctagtttacctagcaaaagctcaaaactgcgctagtatggactttttggacagacttagtttttgcacataaccttgtacaatcttgcaacagaggccagccacgtaagatatatatctggactctcttgtattataggatttttcttgttctgaatatccttgacattacagctgtcaaaaacaaaaactggtatttcagatctgttttctgaaatcttttaagctaaaatcacatgcaagaattgactttgcagctactaattttgacaccttttagatctgtataaaagtgtgttgtgttgaagcagcaaaccaatgagtgctgcattttggatatttagttttatctttagttcaacaccatcatggtggattcatttataccatctaatatatgacacactgttgtagtatgtataattttgtgatctttattttccctttgtattcattttaagcatctaaataaattgctgtattgtgcttaatgt

SEQ ID NO: 321377 - DNA, 5963 bp, Artificial Sequence
  derived and/or modified sequence
aatattcttaactagtcaaactgagtcatgtgtactctgctctgctggaaaagtgactttctgtcttccatcaatcgtggcagaggcgtttccaagaggaggctgggcaggcaaaaacaggtgtctaaaccctactgattgagggctggctatgtgtattctaagctggaagaaatggactgttgaaggggaagaagaaccatgtcttactcatctctctattcctagcacagttgagtggctaagtgcaagtgctctgaaaatgattgtctaacagatgaacaatatatagaaactatgttccaacttcctgtcaacaatcttggcagtttaagaaaagcccggaaaactgtgaaaaaaatacttagtgacattgggttggaatactgtaaagaacatatagaagattttaaacaatttgaacctaatgacttttatttgaaaaacactacatgggaggatgtaggactgtgggacccatcacttacgaaaaaccaggactatcggacaaaacctttctgctgcagcgcttgtccattttcctcaaaattcttctctgcctacaaaagtcatttccgcaatgtccatagtgaagactttgaaaataggattctccttaattgcccctactgtaccttcaatgcagacaaaaagactttggaaacacacattaaaatatttcatgctccgaacgccagcgcaccaagtagcagcctcagcactttcaaagataaaaacaaaaatgatggccttaaacctaagcaggctgacagtgtagagcaagctgtttattactgtaagaagtgcacttaccgagatcctctttatgaaatagttaggaagcacatttacagggaacattttcagcatgtggcagcaccttacatagcaaaggcaggagaaaaatcactcaatggggcagtccccttaggctcgaatgcccgagaagagagtagtattcactgcaagcgatgccttttcatgccaaagtcctatgaagctttggtacagcatgtcatcgaagaccatgaacgtataggctatcaggtcactgccatgattgggcacacaaatgtagtggttccccgatccaaacccttgatgctaattgctcccaaacctcaagacaagaagagcatgggactcccaccaaggatcggttcccttgcttctggaaatgtccggtctttaccatcacagcagatggtgaatcgactctcaataccaaagcctaacttaaattctacaggagtcaacatgatgtccagtgttcatctgcagcagaacaactatggagtcaaatctgtaggccagggttacagtgttggtcagtcaatgagactgggtctaggtggcaacgcaccagtttccattcctcaacaatctcagtctgtaaagcagttacttccaagtggaaacggaaggtcttatgggcttgggtcagagcagaggtcccaggcaccagcaagatactccctgcagtctgctaatgcctcttctctctcatcgggccagttaaagtctccttccctctctcagtcacaggcatccagagtgttaggtcagtccagttccaaacctgctgcagctgccacaggccctcccccaggtaacacttcctcaactcaaaagtggaaaatatgtacaatctgtaatgagctttttcctgaaaatgtctatagtgtgcacttcgaaaaagaacataaagctgagaaagtcccagcagtagccaactacattatgaaaatacacaattttactagcaaatgcctctactgtaatcgctatttacccacagatactctgctcaaccatatgttaattcatggtctgtcttgtccatattgccgttcaactttcaatgatgtggaaaagatggccgcacacatgcggatggttcacattgatgaagagatgggacctaaaacagattctactttgagttttgatttgacattgcagcagggtagtcacactaacatccatctcctggtaactacatacaatctgagggatgccccagctgaatctgttgcttaccatgcccaaaataatcctccagttcctccaaagccacagccaaaggttcaggaaaaggcagatatccctgtaaaaagttcacctcaagctgcagtgccctataaaaaagatgttgggaaaaccctttgtcctctttgcttttcaatcctaaaaggacccatatctgatgcacttgcacatcacttacgagagaggcaccaagttattcagacggttcatccagttgagaaaaagctcacctacaaatgtatccattgccttggtgtgtataccagcaacatgaccgcctcaactatcactctgcatctagttcactgcaggggcgttggaaagacccaaaatggccaggataagacaaatgcaccctctcggcttaatcagtctccaagtctggcacctgtgaagcgcacttacgagcaaatggaatttcccttactgaaaaaacgaaagttagatgatgatagtgattcacccagcttctttgaagagaagcctgaagagcctgttgttttagctttagaccccaagggtcatgaagatgattcctatgaagccaggaaaagctttctaacaaagtatttcaacaaacagccctatcccaccaggagagaaattgagaagctagcagccagtttatggttatggaagagtgacatcgcttcccattttagtaacaaaaggaagaagtgtgtccgtgattgtgaaaagtacaagcctggcgtgttgctggggtttaacatgaaagaattaaataaagtcaagcatgagatggattttgatgctgagtggctatttgaaaatcatgatgagaaggattccagagtcaatgctagtaagactgctgacaaaaagctcaaccttgggaaggaagatgacagttcctcagacagttttgaaaatttggaagaagaatccaatgaaagtggtagcccttttgaccctgtttttgaagttgaacctaaaatctctaacgataacccagaggaacatgtactgaaggtaattcctgaggatgcttcagaatctgaggagaagctagaccaaaaagaggatggttcaaaatacgaaactattcatttgactgaggaaccaaccaaactaatgcacaatgcatctgatagtgaggttgaccaagacgatgttgttgagtggaaagacggtgcttctccatctgagagtgggcctggatcccaacaagtgtcagactttgaggacaatacctgcgaaatgaaaccaggaacctggtctgacgagtcttcccaaagcgaagatgcaaggagcagtaagccagctgccaaaaaaaaggctaccatgcaaggtgacagagagcagttgaaatggaagaatagttcctatggaaaagttgaagggttttggtctaaggaccagtcacagtggaagaatgcatctgagaatgatgagcgcttatctaacccccagattgagtggcagaatagcacaattgacagtgaggatggggaacagtttgacaacatgactgatggagtagctgagcccatgcatggcagcttagccggagttaaactgagcagccaacaggcctaagtgccaggttccctggcgttggtgacatgctgcagcctggaactctgatatccagtgtgactgcaaagctgtcttctcactggtactgccttgtgagtactggttggactgtggggcatgtggccgctgcagttccagtggttatttctaagtctatgacaggacaggctgttcttgcttcagaaccttctctgacagacacggtaactaaatgtgaaaaaccaataagctggtgactcatgaatacacacgaggaaaagcagaggtttattttatctgccttttcaacatttctttccctctgtgaaatgattggtcagatgtctttgagaagtgttaaactaattcacatggtagtgtagggccaacatacaagctaccagtctaatgtgtatagtagactttgggaaaagcgattttttttcatgtattcattctgaatagttgaaatgtatatttgtacagtcttttagacctattcaagtgatgctcatgatcctgttactgtgtgcccatcatagatttctttttttagtgttgcccttgctgtgtaataaacgctctatctagtttacctagcaaaagctcaaaactgcgctagtatggactttttggacagacttagtttttgcacataaccttgtacaatcttgcaacagaggccagccacgtaagatatatatctggactctcttgtattataggatttttcttgttctgaatatccttgacattacagctgtcaaaaacaaaaactggtatttcagatctgttttctgaaatcttttaagctaaaatcacatgcaagaattgactttgcagctactaattttgacaccttttagatctgtataaaagtgtgttgtgttgaagcagcaaaccaatgagtgctgcattttggatatttagttttatctttagttcaacaccatcatggtggattcatttataccatctaatatatgacacactgttgtagtatgtataattttgtgatctttattttccctttgtattcattttaagcatctaaataaattgctgtattgtgcttaatgtaaatatttgctttattacacatgacagtcctgtgtgtccattatatcttttgccatttaatgccataactctttcatcagagatggcagccacagtcacagaggaaacttgtggaaaacccaagatctgtcatctgcaaatagaatgctttctcttgaggcacctggtacaaaatctgtttttcttttttttttttttttttttttttttttttaactgaaaaacaaacacccttgagtttttcagttcaccttttgttaaggagcagagcctgcatatatatgtaaatgtctcaatgataaaaaaaaaaatgtaaacatggattggcattaatttgcaagcagaatcttaatagcctgatgggttttttgtttgttttttcttctagatgaagttaaacgttcgttttcaccttacgatgggaacaactgtagtgcaggcggctctgcctctatttgccactcttggccctcttgctattaagggaaaggctttgaagagcacagcactgacagggctgtaaagatggaaggagctggtatttttaccatgcgtagattcccaagagaacttgtactaaaaagcagaaagttacaaggaagcagaattaggccaacatttccagcaattaaaacaatgatgggaaactccaatccatgaggaggctggtcagtcacctcaaggatagtggcctaaagaagtctgaagtggctgatgtccataacttctgagtctgtttccaaaagaaagactcttgttaatgctgttaccagagagtagagatttgaccagcctctccctaaaatgtaagcttctcaacaacagtacaggaagaagtgcaagagtagactagaacctttaaggaatttggggctggaacggagctatgttgcatctgttgttatacaggtagattataagttctacatgcaccagccaaaacttaggacaggatgtccccaaattaagatactacagattaccaaatcagaaataaccagctggatttaggccagctcacatttatttggaaattaccctccctgattaacaggcttctgagttgtacgtggaggactaatgagacttgtacaagacaccacggggcttggggtccaggtcccagttggatatcggaacagacacagataagtgtgtttcctcattaaggtggtgagagtgtgccttttggcattcagaaaagggtttagccaccctaagagttggaaataaagattcccaactggaaatgttgcagaatccctacaagtgtctcaataaaagccattttaaaagaa

SEQ ID NO: 321378 - DNA, 5986 bp, Artificial Sequence
  derived and/or modified sequence
ttgagcccagaaggttgaggctatggtgaatcgtgagtgcactgcagtcaatgaaccatgagtgcactgcactccagcctgcgcgacagagtaagactctgtcttaagaaaaggaaggaaggatggatggatggatatatcaagccatatgcacatgaaagcaggtgtgtgtctgtgtgtgtacacactagatgaggatatctatgcaccttttttgtcagatgggtaggttttatgatcctatcatcagtggaattagtaaatattacaagttgtacgtgttttgactttgacttaaatttttttttccaatagaaactatgttccaacttcctgtcaacaatcttggcagtttaagaaaagcccggaaaactgtgaaaaaaatacttagtgacattgggttggaatactgtaaagaacatatagaagattttaaacaatttgaacctaatgacttttatttgaaaaacactacatgggaggatgtaggactgtgggacccatcacttacgaaaaaccaggactatcggacaaaacctttctgctgcagcgcttgtccattttcctcaaaattcttctctgcctacaaaagtcatttccgcaatgtccatagtgaagactttgaaaataggattctccttaattgcccctactgtaccttcaatgcagacaaaaagactttggaaacacacattaaaatatttcatgctccgaacgccagcgcaccaagtagcagcctcagcactttcaaagataaaaacaaaaatgatggccttaaacctaagcaggctgacagtgtagagcaagctgtttattactgtaagaagtgcacttaccgagatcctctttatgaaatagttaggaagcacatttacagggaacattttcagcatgtggcagcaccttacatagcaaaggcaggagaaaaatcactcaatggggcagtccccttaggctcgaatgcccgagaagagagtagtattcactgcaagcgatgccttttcatgccaaagtcctatgaagctttggtacagcatgtcatcgaagaccatgaacgtataggctatcaggtcactgccatgattgggcacacaaatgtagtggttccccgatccaaacccttgatgctaattgctcccaaacctcaagacaagaagagcatgggactcccaccaaggatcggttcccttgcttctggaaatgtccggtctttaccatcacagcagatggtgaatcgactctcaataccaaagcctaacttaaattctacaggagtcaacatgatgtccagtgttcatctgcagcagaacaactatggagtcaaatctgtaggccagggttacagtgttggtcagtcaatgagactgggtctaggtggcaacgcaccagtttccattcctcaacaatctcagtctgtaaagcagttacttccaagtggaaacggaaggtcttatgggcttgggtcagagcagaggtcccaggcaccagcaagatactccctgcagtctgctaatgcctcttctctctcatcgggccagttaaagtctccttccctctctcagtcacaggcatccagagtgttaggtcagtccagttccaaacctgctgcagctgccacaggccctcccccaggtaacacttcctcaactcaaaagtggaaaatatgtacaatctgtaatgagctttttcctgaaaatgtctatagtgtgcacttcgaaaaagaacataaagctgagaaagtcccagcagtagccaactacattatgaaaatacacaattttactagcaaatgcctctactgtaatcgctatttacccacagatactctgctcaaccatatgttaattcatggtctgtcttgtccatattgccgttcaactttcaatgatgtggaaaagatggccgcacacatgcggatggttcacattgatgaagagatgggacctaaaacagattctactttgagttttgatttgacattgcagcagggtagtcacactaacatccatctcctggtaactacatacaatctgagggatgccccagctgaatctgttgcttaccatgcccaaaataatcctccagttcctccaaagccacagccaaaggttcaggaaaaggcagatatccctgtaaaaagttcacctcaagctgcagtgccctataaaaaagatgttgggaaaaccctttgtcctctttgcttttcaatcctaaaaggacccatatctgatgcacttgcacatcacttacgagagaggcaccaagttattcagacggttcatccagttgagaaaaagctcacctacaaatgtatccattgccttggtgtgtataccagcaacatgaccgcctcaactatcactctgcatctagttcactgcaggggcgttggaaagacccaaaatggccaggataagacaaatgcaccctctcggcttaatcagtctccaagtctggcacctgtgaagcgcacttacgagcaaatggaatttcccttactgaaaaaacgaaagttagatgatgatagtgattcacccagcttctttgaagagaagcctgaagagcctgttgttttagctttagaccccaagggtcatgaagatgattcctatgaagccaggaaaagctttctaacaaagtatttcaacaaacagccctatcccaccaggagagaaattgagaagctagcagccagtttatggttatggaagagtgacatcgcttcccattttagtaacaaaaggaagaagtgtgtccgtgattgtgaaaagtacaagcctggcgtgttgctggggtttaacatgaaagaattaaataaagtcaagcatgagatggattttgatgctgagtggctatttgaaaatcatgatgagaaggattccagagtcaatgctagtaagactgctgacaaaaagctcaaccttgggaaggaagatgacagttcctcagacagttttgaaaatttggaagaagaatccaatgaaagtggtagcccttttgaccctgtttttgaagttgaacctaaaatctctaacgataacccagaggaacatgtactgaaggtaattcctgaggatgcttcagaatctgaggagaagctagaccaaaaagaggatggttcaaaatacgaaactattcatttgactgaggaaccaaccaaactaatgcacaatgcatctgatagtgaggttgaccaagacgatgttgttgagtggaaagacggtgcttctccatctgagagtgggcctggatcccaacaagtgtcagactttgaggacaatacctgcgaaatgaaaccaggaacctggtctgacgagtcttcccaaagcgaagatgcaaggagcagtaagccagctgccaaaaaaaaggctaccatgcaaggtgacagagagcagttgaaatggaagaatagttcctatggaaaagttgaagggttttggtctaaggaccagtcacagtggaagaatgcatctgagaatgatgagcgcttatctaacccccagattgagtggcagaatagcacaattgacagtgaggatggggaacagtttgacaacatgactgatggagtagctgagcccatgcatggcagcttagccggagttaaactgagcagccaacaggcctaagtgccaggttccctggcgttggtgacatgctgcagcctggaactctgatatccagtgtgactgcaaagctgtcttctcactggtactgccttgtgagtactggttggactgtggggcatgtggccgctgcagttccagtggttatttctaagtctatgacaggacaggctgttcttgcttcagaaccttctctgacagacacggtaactaaatgtgaaaaaccaataagctggtgactcatgaatacacacgaggaaaagcagaggtttattttatctgccttttcaacatttctttccctctgtgaaatgattggtcagatgtctttgagaagtgttaaactaattcacatggtagtgtagggccaacatacaagctaccagtctaatgtgtatagtagactttgggaaaagcgattttttttcatgtattcattctgaatagttgaaatgtatatttgtacagtcttttagacctattcaagtgatgctcatgatcctgttactgtgtgcccatcatagatttctttttttagtgttgcccttgctgtgtaataaacgctctatctagtttacctagcaaaagctcaaaactgcgctagtatggactttttggacagacttagtttttgcacataaccttgtacaatcttgcaacagaggccagccacgtaagatatatatctggactctcttgtattataggatttttcttgttctgaatatccttgacattacagctgtcaaaaacaaaaactggtatttcagatctgttttctgaaatcttttaagctaaaatcacatgcaagaattgactttgcagctactaattttgacaccttttagatctgtataaaagtgtgttgtgttgaagcagcaaaccaatgagtgctgcattttggatatttagttttatctttagttcaacaccatcatggtggattcatttataccatctaatatatgacacactgttgtagtatgtataattttgtgatctttattttccctttgtattcattttaagcatctaaataaattgctgtattgtgcttaatgtaaatatttgctttattacacatgacagtcctgtgtgtccattatatcttttgccatttaatgccataactctttcatcagagatggcagccacagtcacagaggaaacttgtggaaaacccaagatctgtcatctgcaaatagaatgctttctcttgaggcacctggtacaaaatctgtttttcttttttttttttttttttttttttttttttaactgaaaaacaaacacccttgagtttttcagttcaccttttgttaaggagcagagcctgcatatatatgtaaatgtctcaatgataaaaaaaaaaatgtaaacatggattggcattaatttgcaagcagaatcttaatagcctgatgggttttttgtttgttttttcttctagatgaagttaaacgttcgttttcaccttacgatgggaacaactgtagtgcaggcggctctgcctctatttgccactcttggccctcttgctattaagggaaaggctttgaagagcacagcactgacagggctgtaaagatggaaggagctggtatttttaccatgcgtagattcccaagagaacttgtactaaaaagcagaaagttacaaggaagcagaattaggccaacatttccagcaattaaaacaatgatgggaaactccaatccatgaggaggctggtcagtcacctcaaggatagtggcctaaagaagtctgaagtggctgatgtccataacttctgagtctgtttccaaaagaaagactcttgttaatgctgttaccagagagtagagatttgaccagcctctccctaaaatgtaagcttctcaacaacagtacaggaagaagtgcaagagtagactagaacctttaaggaatttggggctggaacggagctatgttgcatctgttgttatacaggtagattataagttctacatgcaccagccaaaacttaggacaggatgtccccaaattaagatactacagattaccaaatcagaaataaccagctggatttaggccagctcacatttatttggaaattaccctccctgattaacaggcttctgagttgtacgtggaggactaatgagacttgtacaagacaccacggggcttggggtccaggtcccagttggatatcggaacagacacagataagtgtgtttcctcattaaggtggtgagagtgtgccttttggcattcagaaaagggtttagccaccctaagagttggaaataaagattcccaactggaaatgttgcagaatccctacaagtgtctcaataaaagccattttaaaagaa

SEQ ID NO: 321379 - DNA, 6234 bp, Artificial Sequence
  derived and/or modified sequence
gcagcgctaagggggattttggcgtcttctcagacacagctccctctctcggtccccgctgctgaggagcgagaggagcgcggccgccgccgcccgcgccggtgaagccgcctctcccacaccctccgtctcctccctccgcccctcctttgtctgcaccgctcgacgacgccgccgccgcccgccgctctgctgcgcccgccgcgccccccggcagcacccgcggccgcggcgcgagccggagtccgccgagccggagcgcgacgaggccccgggcgcgccctccccgctgccgccaccgccgtgccgccgccatccgcccgccgccgccgccgctgtccggcccccgagcacgccggccccgcgcgcgcctcgaggccgagtcaaggtgtgagatgcacaatgcgaaacctaggccccagcttttacaccatgatgcgcagggttgtactttttgtactgaactgataggtggcctagtggttatgccctgtactaccattttgaggatctggactccgtttcctgccttgctctttggaccacattgtcaattcacaccgaaactatgttccaacttcctgtcaacaatcttggcagtttaagaaaagcccggaaaactgtgaaaaaaatacttagtgacattgggttggaatactgtaaagaacatatagaagattttaaacaatttgaacctaatgacttttatttgaaaaacactacatgggaggatgtaggactgtgggacccatcacttacgaaaaaccaggactatcggacaaaacctttctgctgcagcgcttgtccattttcctcaaaattcttctctgcctacaaaagtcatttccgcaatgtccatagtgaagactttgaaaataggattctccttaattgcccctactgtaccttcaatgcagacaaaaagactttggaaacacacattaaaatatttcatgctccgaacgccagcgcaccaagtagcagcctcagcactttcaaagataaaaacaaaaatgatggccttaaacctaagcaggctgacagtgtagagcaagctgtttattactgtaagaagtgcacttaccgagatcctctttatgaaatagttaggaagcacatttacagggaacattttcagcatgtggcagcaccttacatagcaaaggcaggagaaaaatcactcaatggggcagtccccttaggctcgaatgcccgagaagagagtagtattcactgcaagcgatgccttttcatgccaaagtcctatgaagctttggtacagcatgtcatcgaagaccatgaacgtataggctatcaggtcactgccatgattgggcacacaaatgtagtggttccccgatccaaacccttgatgctaattgctcccaaacctcaagacaagaagagcatgggactcccaccaaggatcggttcccttgcttctggaaatgtccggtctttaccatcacagcagatggtgaatcgactctcaataccaaagcctaacttaaattctacaggagtcaacatgatgtccagtgttcatctgcagcagaacaactatggagtcaaatctgtaggccagggttacagtgttggtcagtcaatgagactgggtctaggtggcaacgcaccagtttccattcctcaacaatctcagtctgtaaagcagttacttccaagtggaaacggaaggtcttatgggcttgggtcagagcagaggtcccaggcaccagcaagatactccctgcagtctgctaatgcctcttctctctcatcgggccagttaaagtctccttccctctctcagtcacaggcatccagagtgttaggtcagtccagttccaaacctgctgcagctgccacaggccctcccccaggtaacacttcctcaactcaaaagtggaaaatatgtacaatctgtaatgagctttttcctgaaaatgtctatagtgtgcacttcgaaaaagaacataaagctgagaaagtcccagcagtagccaactacattatgaaaatacacaattttactagcaaatgcctctactgtaatcgctatttacccacagatactctgctcaaccatatgttaattcatggtctgtcttgtccatattgccgttcaactttcaatgatgtggaaaagatggccgcacacatgcggatggttcacattgatgaagagatgggacctaaaacagattctactttgagttttgatttgacattgcagcagggtagtcacactaacatccatctcctggtaactacatacaatctgagggatgccccagctgaatctgttgcttaccatgcccaaaataatcctccagttcctccaaagccacagccaaaggttcaggaaaaggcagatatccctgtaaaaagttcacctcaagctgcagtgccctataaaaaagatgttgggaaaaccctttgtcctctttgcttttcaatcctaaaaggacccatatctgatgcacttgcacatcacttacgagagaggcaccaagttattcagacggttcatccagttgagaaaaagctcacctacaaatgtatccattgccttggtgtgtataccagcaacatgaccgcctcaactatcactctgcatctagttcactgcaggggcgttggaaagacccaaaatggccaggataagacaaatgcaccctctcggcttaatcagtctccaagtctggcacctgtgaagcgcacttacgagcaaatggaatttcccttactgaaaaaacgaaagttagatgatgatagtgattcacccagcttctttgaagagaagcctgaagagcctgttgttttagctttagaccccaagggtcatgaagatgattcctatgaagccaggaaaagctttctaacaaagtatttcaacaaacagccctatcccaccaggagagaaattgagaagctagcagccagtttatggttatggaagagtgacatcgcttcccattttagtaacaaaaggaagaagtgtgtccgtgattgtgaaaagtacaagcctggcgtgttgctggggtttaacatgaaagaattaaataaagtcaagcatgagatggattttgatgctgagtggctatttgaaaatcatgatgagaaggattccagagtcaatgctagtaagactgctgacaaaaagctcaaccttgggaaggaagatgacagttcctcagacagttttgaaaatttggaagaagaatccaatgaaagtggtagcccttttgaccctgtttttgaagttgaacctaaaatctctaacgataacccagaggaacatgtactgaaggtaattcctgaggatgcttcagaatctgaggagaagctagaccaaaaagaggatggttcaaaatacgaaactattcatttgactgaggaaccaaccaaactaatgcacaatgcatctgatagtgaggttgaccaagacgatgttgttgagtggaaagacggtgcttctccatctgagagtgggcctggatcccaacaagtgtcagactttgaggacaatacctgcgaaatgaaaccaggaacctggtctgacgagtcttcccaaagcgaagatgcaaggagcagtaagccagctgccaaaaaaaaggctaccatgcaaggtgacagagagcagttgaaatggaagaatagttcctatggaaaagttgaagggttttggtctaaggaccagtcacagtggaagaatgcatctgagaatgatgagcgcttatctaacccccagattgagtggcagaatagcacaattgacagtgaggatggggaacagtttgacaacatgactgatggagtagctgagcccatgcatggcagcttagccggagttaaactgagcagccaacaggcctaagtgccaggttccctggcgttggtgacatgctgcagcctggaactctgatatccagtgtgactgcaaagctgtcttctcactggtactgccttgtgagtactggttggactgtggggcatgtggccgctgcagttccagtggttatttctaagtctatgacaggacaggctgttcttgcttcagaaccttctctgacagacacggtaactaaatgtgaaaaaccaataagctggtgactcatgaatacacacgaggaaaagcagaggtttattttatctgccttttcaacatttctttccctctgtgaaatgattggtcagatgtctttgagaagtgttaaactaattcacatggtagtgtagggccaacatacaagctaccagtctaatgtgtatagtagactttgggaaaagcgattttttttcatgtattcattctgaatagttgaaatgtatatttgtacagtcttttagacctattcaagtgatgctcatgatcctgttactgtgtgcccatcatagatttctttttttagtgttgcccttgctgtgtaataaacgctctatctagtttacctagcaaaagctcaaaactgcgctagtatggactttttggacagacttagtttttgcacataaccttgtacaatcttgcaacagaggccagccacgtaagatatatatctggactctcttgtattataggatttttcttgttctgaatatccttgacattacagctgtcaaaaacaaaaactggtatttcagatctgttttctgaaatcttttaagctaaaatcacatgcaagaattgactttgcagctactaattttgacaccttttagatctgtataaaagtgtgttgtgttgaagcagcaaaccaatgagtgctgcattttggatatttagttttatctttagttcaacaccatcatggtggattcatttataccatctaatatatgacacactgttgtagtatgtataattttgtgatctttattttccctttgtattcattttaagcatctaaataaattgctgtattgtgcttaatgtaaatatttgctttattacacatgacagtcctgtgtgtccattatatcttttgccatttaatgccataactctttcatcagagatggcagccacagtcacagaggaaacttgtggaaaacccaagatctgtcatctgcaaatagaatgctttctcttgaggcacctggtacaaaatctgtttttcttttttttttttttttttttttttttttttaactgaaaaacaaacacccttgagtttttcagttcaccttttgttaaggagcagagcctgcatatatatgtaaatgtctcaatgataaaaaaaaaaatgtaaacatggattggcattaatttgcaagcagaatcttaatagcctgatgggttttttgtttgttttttcttctagatgaagttaaacgttcgttttcaccttacgatgggaacaactgtagtgcaggcggctctgcctctatttgccactcttggccctcttgctattaagggaaaggctttgaagagcacagcactgacagggctgtaaagatggaaggagctggtatttttaccatgcgtagattcccaagagaacttgtactaaaaagcagaaagttacaaggaagcagaattaggccaacatttccagcaattaaaacaatgatgggaaactccaatccatgaggaggctggtcagtcacctcaaggatagtggcctaaagaagtctgaagtggctgatgtccataacttctgagtctgtttccaaaagaaagactcttgttaatgctgttaccagagagtagagatttgaccagcctctccctaaaatgtaagcttctcaacaacagtacaggaagaagtgcaagagtagactagaacctttaaggaatttggggctggaacggagctatgttgcatctgttgttatacaggtagattataagttctacatgcaccagccaaaacttaggacaggatgtccccaaattaagatactacagattaccaaatcagaaataaccagctggatttaggccagctcacatttatttggaaattaccctccctgattaacaggcttctgagttgtacgtggaggactaatgagacttgtacaagacaccacggggcttggggtccaggtcccagttggatatcggaacagacacagataagtgtgtttcctcattaaggtggtgagagtgtgccttttggcattcagaaaagggtttagccaccctaagagttggaaataaagattcccaactggaaatgttgcagaatccctacaagtgtctcaataaaagccattttaaaagaa

SEQ ID NO: 321380 - DNA, 4969 bp, Artificial Sequence
  derived and/or modified sequence
tttggctagggcaggttcggggactcggtccgaggcgcttgtattgtctgctgaggggagacgcgggatcagccccctcccccgcccgttgccgccgccgcctccgccggcccggtctcccctccgccgcccgccgggatccatgagctgaactcccgcccccccccccccggccgccgccatcttgtgccccctccccctcccgcaggcagcgctaagggggattttggcgtcttctcagacacagctccctctctcggtccccgctgctgaggagcgagaggagcgcggccgccgccgcccgcgccggtgaagccgcctctcccacaccctccgtctcctccctccgcccctcctttgtctgcaccgctcgacgacgccgccgccgcccgccgctctgctgcgcccgccgcgccccccggcagcacccgcggccgcggcgcgagccggagtccgccgagccggagcgcgacgaggccccgggcgcgccctccccgctgccgccaccgccgtgccgccgccatccgcccgccgccgccgccgctgtccggcccccgagcacgccggccccgcgcgcgcctcgaggccgagtcaagaaactatgttccaacttcctgtcaacaatcttggcagtttaagaaaagcccggaaaactgtgaaaaaaatacttagtgacattgggttggaatactgtaaagaacatatagaagattttaaacaatttgaacctaatgacttttatttgaaaaacactacatgggaggatgtaggactgtgggacccatcacttacgaaaaaccaggactatcggacaaaacctttctgctgcagcgcttgtccattttcctcaaaattcttctctgcctacaaaagtcatttccgcaatgtccatagtgaagactttgaaaataggattctccttaattgcccctactgtaccttcaatgcagacaaaaagactttggaaacacacattaaaatatttcatgctccgaacgccagcgcaccaagtagcagcctcagcactttcaaagataaaaacaaaaatgatggccttaaacctaagcaggctgacagtgtagagcaagctgtttattactgtaagaagtgcacttaccgagatcctctttatgaaatagttaggaagcacatttacagggaacattttcagcatgtggcagcaccttacatagcaaaggcaggagaaaaatcactcaatggggcagtccccttaggctcgaatgcccgagaagagagtagtattcactgcaagcgatgccttttcatgccaaagtcctatgaagctttggtacagcatgtcatcgaagaccatgaacgtataggctatcaggtcactgccatgattgggcacacaaatgtagtggttccccgatccaaacccttgatgctaattgctcccaaacctcaagacaagaagagcatgggactcccaccaaggatcggttcccttgcttctggaaatgtccggtctttaccatcacagcagatggtgaatcgactctcaataccaaagcctaacttaaattctacaggagtcaacatgatgtccagtgttcatctgcagcagaacaactatggagtcaaatctgtaggccagggttacagtgttggtcagtcaatgagactgggtctaggtggcaacgcaccagtttccattcctcaacaatctcagtctgtaaagcagttacttccaagtggaaacggaaggtcttatgggcttgggtcagagcagaggtcccaggcaccagcaagatactccctgcagtctgctaatgcctcttctctctcatcgggccagttaaagtctccttccctctctcagtcacaggcatccagagtgttaggtcagtccagttccaaacctgctgcagctgccacaggccctcccccaggtaacacttcctcaactcaaaagtggaaaatatgtacaatctgtaatgagctttttcctgaaaatgtctatagtgtgcacttcgaaaaagaacataaagctgagaaagtcccagcagtagccaactacattatgaaaatacacaattttactagcaaatgcctctactgtaatcgctatttacccacagatactctgctcaaccatatgttaattcatggtctgtcttgtccatattgccgttcaactttcaatgatgtggaaaagatggccgcacacatgcggatggttcacattgatgaagagatgggacctaaaacagattctactttgagttttgatttgacattgcagcagggtagtcacactaacatccatctcctggtaactacatacaatctgagggatgccccagctgaatctgttgcttaccatgcccaaaataatcctccagttcctccaaagccacagccaaaggttcaggaaaaggcagatatccctgtaaaaagttcacctcaagctgcagtgccctataaaaaagatgttgggaaaaccctttgtcctctttgcttttcaatcctaaaaggacccatatctgatgcacttgcacatcacttacgagagaggcaccaagttattcagacggttcatccagttgagaaaaagctcacctacaaatgtatccattgccttggtgtgtataccagcaacatgaccgcctcaactatcactctgcatctagttcactgcaggggcgttggaaagacccaaaatggccaggataagacaaatgcaccctctcggcttaatcagtctccaagtctggcacctgtgaagcgcacttacgagcaaatggaatttcccttactgaaaaaacgaaagttagatgatgatagtgattcacccagcttctttgaagagaagcctgaagagcctgttgttttagctttagaccccaagggtcatgaagatgattcctatgaagccaggaaaagctttctaacaaagtatttcaacaaacagccctatcccaccaggagagaaattgagaagctagcagccagtttatggttatggaagagtgacatcgcttcccattttagtaacaaaaggaagaagtgtgtccgtgattgtgaaaagtacaagcctggcgtgttgctggggtttaacatgaaagaattaaataaagtcaagcatgagatggattttgatgctgagtggctatttgaaaatcatgatgagaaggattccagagtcaatgctagtaagactgctgacaaaaagctcaaccttgggaaggaagatgacagttcctcagacagttttgaaaatttggaagaagaatccaatgaaagtggtagcccttttgaccctgtttttgaagttgaacctaaaatctctaacgataacccagaggaacatgtactgaaggtaattcctgaggatgcttcagaatctgaggagaagctagaccaaaaagaggatggttcaaaatacgaaactattcatttgactgaggaaccaaccaaactaatgcacaatgcatctgatagtgaggttgaccaagacgatgttgttgagtggaaagacggtgcttctccatctgagagtgggcctggatcccaacaagtgtcagactttgaggacaatacctgcgaaatgaaaccaggaacctggtctgacgagtcttcccaaagcgaagatgcaaggagcagtaagccagctgccaaaaaaaaggctaccatgcaaggtgacagagagcagttgaaatggaagaatagttcctatggaaaagttgaagggttttggtctaaggaccagtcacagtggaagaatgcatctgagaatgatgagcgcttatctaacccccagattgagtggcagaatagcacaattgacagtgaggatggggaacagtttgacaacatgactgatggagtagctgagcccatgcatggcagcttagccggagttaaactgagcagccaacaggcctaagtgccaggttccctggcgttggtgacatgctgcagcctggaactctgatatccagtgtgactgcaaagctgtcttctcactggtactgccttgtgagtactggttggactgtggggcatgtggccgctgcagttccagtggttatttctaagtctatgacaggacaggctgttcttgcttcagaaccttctctgacagacacggtaactaaatgtgaaaaaccaataagctggtgactcatgaatacacacgaggaaaagcagaggtttattttatctgccttttcaacatttctttccctctgtgaaatgattggtcagatgtctttgagaagtgttaaactaattcacatggtagtgtagggccaacatacaagctaccagtctaatgtgtatagtagactttgggaaaagcgattttttttcatgtattcattctgaatagttgaaatgtatatttgtacagtcttttagacctattcaagtgatgctcatgatcctgttactgtgtgcccatcatagatttctttttttagtgttgcccttgctgtgtaataaacgctctatctagtttacctagcaaaagctcaaaactgcgctagtatggactttttggacagacttagtttttgcacataaccttgtacaatcttgcaacagaggccagccacgtaagatatatatctggactctcttgtattataggatttttcttgttctgaatatccttgacattacagctgtcaaaaacaaaaactggtatttcagatctgttttctgaaatcttttaagctaaaatcacatgcaagaattgactttgcagctactaattttgacaccttttagatctgtataaaagtgtgttgtgttgaagcagcaaaccaatgagtgctgcattttggatatttagttttatctttagttcaacaccatcatggtggattcatttataccatctaatatatgacacactgttgtagtatgtataattttgtgatctttattttccctttgtattcattttaagcatctaaataaattgctgtattgtgcttaatgt

SEQ ID NO: 321381 - DNA, 773 bp, Artificial Sequence
  derived and/or modified sequence
gcacaatgcgaaacctaggccccagcttttacaccatgatgcgcagggttgtactttttgtactgaactgataggtggcctagtggttatgccctgtactaccattttgaggatctggactccgtttcctgccttgctctttggaccacattgtcaattcacaccgaataccgtagcagtaggcaggacagttccaattcaacaaaaacctctttaccctggcactcaaaactgtaatgatgatgaactgaaactatgttccaacttcctgtcaacaatcttggcagtttaagaaaagcccggaaaactgtgaaaaaaatacttagtgacattgggttggaatactgtaaagaacatatagaagattttaaacaatttgaacctaatgacttttatttgaaaaacactacatgggaggatgtaggactgtgggacccatcacttacgaaaaaccaggactatcggacaaaacctttctgctgcagcgcttgtccattttcctcaaaattcttctctgcctacaaaagtcatttccgcaatgtccatagtgaagactttgaaaataggattctccttaattgcccctactgtaccttcaatgcagacaaaaagactttggaaacacacattaaaatatttcatgctccgaacgccagcgcaccaagtagcagcctcagcactttcaaagataaaaacaaaaatgatggccttaaacctaagcaggctgacagtgtagagcaagctgtttattactgtaagaagtgcacttaccg

SEQ ID NO: 321382 - DNA, 3309 bp, Artificial Sequence
  derived and/or modified sequence
atgttccagctgcccgtgaacaacctgggcagcctgagaaaggccagaaagaccgtgaagaagatcctgagcgacatcggcctggagtactgcaaggagcacatcgaggacttcaagcagttcgagcccaacgacttctacctgaagaacaccacctgggaggacgtgggcctgtgggaccccagcctgaccaagaaccaggactacagaaccaagcccttctgctgcagcgcctgccccttcagcagcaagttcttcagcgcctacaagagccacttcagaaacgtgcacagcgaggacttcgagaacagaatcctgctgaactgcccctactgcaccttcaacgccgacaagaagaccctggagacccacatcaagatcttccacgcccccaacgccagcgcccccagcagcagcctgagcaccttcaaggacaagaacaagaacgacggcctgaagcccaagcaggccgacagcgtggagcaggccgtgtactactgcaagaagtgcacctacagagaccccctgtacgagatcgtgagaaagcacatctacagagagcacttccagcacgtggccgccccctacatcgccaaggccggcgagaagagcctgaacggcgccgtgcccctgggcagcaacgccagagaggagagcagcatccactgcaagagatgcctgttcatgcccaagagctacgaggccctggtgcagcacgtgatcgaggaccacgagagaatcggctaccaggtgaccgccatgatcggccacaccaacgtggtggtgcccagaagcaagcccctgatgctgatcgcccccaagccccaggacaagaagagcatgggcctgccccccagaatcggcagcctggccagcggcaacgtgagaagcctgcccagccagcagatggtgaacagactgagcatccccaagcccaacctgaacagcaccggcgtgaacatgatgagcagcgtgcacctgcagcagaacaactacggcgtgaagagcgtgggccagggctacagcgtgggccagagcatgagactgggcctgggcggcaacgcccccgtgagcatcccccagcagagccagagcgtgaagcagctgctgcccagcggcaacggcagaagctacggcctgggcagcgagcagagaagccaggcccccgccagatacagcctgcagagcgccaacgccagcagcctgagcagcggccagctgaagagccccagcctgagccagagccaggccagcagagtgctgggccagagcagcagcaagcccgccgccgccgccaccggccccccccccggcaacaccagcagcacccagaagtggaagatctgcaccatctgcaacgagctgttccccgagaacgtgtacagcgtgcacttcgagaaggagcacaaggccgagaaggtgcccgccgtggccaactacatcatgaagatccacaacttcaccagcaagtgcctgtactgcaacagatacctgcccaccgacaccctgctgaaccacatgctgatccacggcctgagctgcccctactgcagaagcaccttcaacgacgtggagaagatggccgcccacatgagaatggtgcacatcgacgaggagatgggccccaagaccgacagcaccctgagcttcgacctgaccctgcagcagggcagccacaccaacatccacctgctggtgaccacctacaacctgagagacgcccccgccgagagcgtggcctaccacgcccagaacaacccccccgtgccccccaagccccagcccaaggtgcaggagaaggccgacatccccgtgaagagcagcccccaggccgccgtgccctacaagaaggacgtgggcaagaccctgtgccccctgtgcttcagcatcctgaagggccccatcagcgacgccctggcccaccacctgagagagagacaccaggtgatccagaccgtgcaccccgtggagaagaagctgacctacaagtgcatccactgcctgggcgtgtacaccagcaacatgaccgccagcaccatcaccctgcacctggtgcactgcagaggcgtgggcaagacccagaacggccaggacaagaccaacgcccccagcagactgaaccagagccccagcctggcccccgtgaagagaacctacgagcagatggagttccccctgctgaagaagagaaagctggacgacgacagcgacagccccagcttcttcgaggagaagcccgaggagcccgtggtgctggccctggaccccaagggccacgaggacgacagctacgaggccagaaagagcttcctgaccaagtacttcaacaagcagccctaccccaccagaagagagatcgagaagctggccgccagcctgtggctgtggaagagcgacatcgccagccacttcagcaacaagagaaagaagtgcgtgagagactgcgagaagtacaagcccggcgtgctgctgggcttcaacatgaaggagctgaacaaggtgaagcacgagatggacttcgacgccgagtggctgttcgagaaccacgacgagaaggacagcagagtgaacgccagcaagaccgccgacaagaagctgaacctgggcaaggaggacgacagcagcagcgacagcttcgagaacctggaggaggagagcaacgagagcggcagccccttcgaccccgtgttcgaggtggagcccaagatcagcaacgacaaccccgaggagcacgtgctgaaggtgatccccgaggacgccagcgagagcgaggagaagctggaccagaaggaggacggcagcaagtacgagaccatccacctgaccgaggagcccaccaagctgatgcacaacgccagcgacagcgaggtggaccaggacgacgtggtggagtggaaggacggcgccagccccagcgagagcggccccggcagccagcaggtgagcgacttcgaggacaacacctgcgagatgaagcccggcacctggagcgacgagagcagccagagcgaggacgccagaagcagcaagcccgccgccaagaagaaggccaccatgcagggcgacagagagcagctgaagtggaagaacagcagctacggcaaggtggagggcttctggagcaaggaccagagccagtggaagaacgccagcgagaacgacgagagactgagcaacccccagatcgagtggcagaacagcaccatcgacagcgaggacggcgagcagttcgacaacatgaccgacggcgtggccgagcccatgcacggcagcctggccggcgtgaagctgagcagccagcaggcctag

SEQ ID NO: 321383 - DNA, 3455 bp, Artificial Sequence
  derived and/or modified sequence
gggaaataagagagaaaagaagagtaagaagaaatataagagccaccatgttccaactgccggtgaacaatctcgggtcattgcgcaaagcccgcaagactgtcaagaaaatcctgtcagacatcgggctcgagtactgtaaggaacatattgaggatttcaaacaattcgaacctaacgacttctacctcaagaatacgacttgggaggacgtagggctgtgggatccctcactcacaaagaatcaggattaccgcacaaagccattttgctgttcagcctgcccattttcgagcaaattcttttcagcgtacaagtcacactttaggaacgtccactccgaagattttgagaatcgcattctccttaactgcccttattgcacgtttaacgcagacaagaaaactctcgaaacacacattaagatcttccacgcgccgaatgcctcagcgcctagctcgtccctctcaacctttaaagacaagaataagaacgacggtttgaagccgaaacaggcagactcggtcgagcaggcagtctactactgtaagaagtgcacgtatcgggacccgctgtatgaaatcgtgcggaagcatatctaccgcgagcactttcaacacgtggcagcgccctatattgcgaaggcgggagaaaagagcctgaacggagccgtgccgctcggatcaaacgccagggaggagagcagcatccactgcaaaagatgtttgttcatgcccaaatcgtatgaggcactcgtgcagcatgtaatcgaggaccacgagaggattgggtaccaagtcactgcgatgatcggacataccaacgtcgtggtgcctagaagcaaacctttgatgctcatcgcgccgaagccccaagataagaagtcaatgggattgcctccccgaattggcagcctcgcatcggggaatgtcagatcattgccctcacagcagatggtgaatcggctctcaatcccgaagcctaacttgaacagcactggagtcaacatgatgtcctcggtacacttgcagcaaaacaattacggagtgaagagcgtgggacaaggttactcggtgggacagtcgatgcgccttgggctgggagggaacgcaccggtatccattccccagcaatcacagtcagtgaagcagcttctcccatcaggtaacggtagatcatatggacttggtagcgaacagagatcacaggcacccgcacgatattcgcttcagagcgctaatgcctcatccctctcgtcgggacagttgaagtccccatcgttgtcacagtcacaggcgagcagggtattgggtcaatcgtcctcgaaaccggccgcggcggcgacggggccaccgcctggtaacacgtccagcacacagaaatggaagatttgcaccatttgcaatgagctttttcccgagaatgtctactcagtgcacttcgaaaaagaacacaaggccgaaaaggtaccggccgtggcaaactatatcatgaagatccataacttcacgtcaaagtgtctctactgcaaccggtacctccccacggataccctcttgaatcatatgctcatccacgggctttcctgtccctattgccgctcaacgttcaacgacgtagagaagatggccgctcatatgcgcatggtacacattgatgaggagatgggtcctaagacagattcgacgctgtccttcgacttgactttgcagcagggatcgcatacaaacattcatctgctcgtcaccacttacaacttgcgggatgctccggccgagagcgtggcgtaccacgcgcagaataaccctcctgtcccgcccaagccgcagcctaaagtccaagagaaggcggacattcctgtcaaatcgtcgccccaggcggcagtgccgtacaagaaagacgtgggaaaaacattgtgtccgctgtgtttctcaatccttaagggaccgatctccgatgcactggcccaccacttgagagaaaggcatcaagtaatccagacagtccatcccgtggagaagaagttgacgtataagtgcatccattgcttgggagtgtatacctcgaacatgacggcgtcgacgatcacactgcatcttgtgcactgcagaggcgtcggtaaaacacagaacggacaggacaaaactaacgcgccctcacgcctcaaccagagcccctcgctggcacctgtcaagaggacatatgagcaaatggaatttcctcttttgaagaagagaaaattggatgatgattcggactcgcccagcttctttgaagaaaagccggaagagccggtggtcttggcgcttgacccgaaggggcacgaagatgacagctacgaggcgaggaaatcatttctcaccaaatacttcaacaaacaaccatatccgacgaggagagagattgaaaaactggctgccagcctctggctttggaagagcgacatcgcgagccacttctccaataagcgaaagaaatgtgtgcgggactgtgagaagtataagcccggagtactgctggggttcaatatgaaggagcttaacaaagtaaagcatgagatggatttcgatgcggaatggctttttgagaaccacgatgaaaaagattcgcgcgtgaatgcttcgaaaacagcagacaaaaagcttaatcttgggaaagaagatgattcctcatccgactcgtttgaaaacttggaagaggaatcgaacgaaagcgggagcccctttgaccccgtgtttgaagtcgagcccaagatctcaaatgataatcccgaggaacatgtattgaaggtgattcccgaggacgcctcggagtcagaggagaagctcgatcagaaggaggacggctccaaatacgaaacgatccaccttacggaggagccgacgaaactgatgcacaacgcctccgattccgaggtcgaccaggatgacgtcgtcgagtggaaggacggtgccagccccagcgagtcaggaccaggatcacaacaggtgtcggattttgaagataacacgtgtgagatgaagcccggaacgtggtcagatgaatcctcgcagtccgaagatgcgcggtcaagcaaaccggcagcaaagaagaaggccactatgcagggagatagagagcaacttaagtggaaaaacagctcatatggaaaggtggaagggttctggtccaaggatcagtcgcagtggaagaacgcatcagagaatgacgagcggttgtcgaatccccaaattgagtggcagaattccacgatcgactcggaggacggggaacagttcgacaatatgacggatggagtggcggaacctatgcatgggtcgctggccggagtcaaactttcatcccagcaggcgtgataataggctgccttctgcggggcttgccttctggccatgcccttcttctctcccttgcacctgtacctcttggtctttgaataaagcctgagtaggaag

SEQ ID NO: 321384 - DNA, 3309 bp, Artificial Sequence
  derived and/or modified sequence
atgtttcaactgcccgtcaataatctcggctcccttagaaaggccagaaaaaccgtcaagaagatcctttccgacatcggattggagtattgtaaggagcatattgaggacttcaaacagttcgaaccaaacgacttttatctgaagaacaccacatgggaggacgtcgggttgtgggacccctccttgacgaaaaaccaggactatcgcaccaagcctttctgctgctcagcttgcccattcagctccaagtttttctctgcctacaaatcgcattttcgcaatgtgcattctgaggactttgagaatcggatcctactcaattgtccctattgtacctttaatgctgacaaaaagactctggagactcacattaagatatttcacgctcccaacgctagtgccccgtcttctagtttgagcaccttcaaagataaaaacaaaaacgacggattaaagcccaagcaggcagactcggtagaacaggcagtgtattactgtaagaagtgtacgtatcgcgatcctctctatgaaatcgtccgtaaacatatttatagggaacattttcagcacgttgccgccccttacatcgccaaggctggggagaaaagcctgaatggggccgtccccctgggcagcaacgcaagagaggagagcagcatccactgcaagaggtgtctttttatgcccaagagctacgaggctcttgtgcagcacgtgatcgaagatcatgagaggatagggtatcaggtcactgcgatgatcggccatacgaacgtggtcgtgcccagaagcaagcctcttatgttgattgcacccaaacctcaagataaaaagagcatgggtttgcctcctaggataggatccctagcttcgggcaatgttcggagtctcccatcgcagcagatggtgaaccggctatctattcctaagccaaacctgaattccaccggggttaacatgatgtcctccgtgcatcttcagcagaacaactatggcgtaaaatccgtgggccagggatactctgtaggtcagtctatgcgactgggactgggagggaatgccccagtgtctatccctcaacagtcacaatcagtgaaacagctcctgccctcaggtaacggcagatcttacgggcttgggagcgaacagagatcacaggctccagcgaggtacagtctgcagtctgcaaatgcctcatcactctctagcggacagctcaagtccccgagcctgagccaatctcaggcttccagagtgctgggccagagttcctccaagcctgccgccgccgccactggcccccctccaggcaatacctcatcaacgcagaagtggaagatctgtactatttgtaatgagctgttcccagaaaacgtgtactcagtgcacttcgaaaaagagcacaaggccgaaaaggtccctgccgtggccaattacatcatgaagatacacaatttcacttctaaatgcctgtactgtaataggtatcttccaaccgataccctattgaaccacatgcttatccatgggttaagctgtccttactgccggagcacattcaacgatgttgagaagatggccgcgcatatgcgcatggttcacattgacgaggaaatgggacccaaaaccgatagtacattgtcttttgaccttactttgcagcagggctctcacaccaacatccacctactcgtgaccacttacaacctgagggatgccccagccgagtctgtcgcttaccatgctcaaaacaatcctcccgtgcctccaaagccacagcctaaggtacaggagaaagccgacattccggttaagtcaagccctcaagccgccgtaccctacaagaaagatgtaggaaaaaccctgtgccctctgtgcttcagcattctgaaagggccaatttccgatgctcttgcccatcacttgagagaacggcatcaggtgatccagactgttcaccctgtcgaaaagaagcttacctacaagtgcatccattgtctcggagtctacacgtcgaacatgacagcttctacaattactctccaccttgtccattgcaggggagtcggaaaaacccagaacggccaagacaaaaccaacgccccatctagactcaatcaatcgcctagcctggcgcccgttaagagaacttacgagcagatggagttccccctgttgaagaaaaggaaattagacgatgatagtgactctccgtcattctttgaggaaaaacctgaagagccggttgtgctcgctttagatcctaagggacatgaggatgacagctatgaggcccggaagagttttctgacaaagtattttaacaaacagccctatcctactcgtagggagattgagaaactcgcagcctccttgtggctctggaagtccgacatagcttcacatttctctaataagaggaagaaatgcgtgagggactgcgaaaaatacaagcccggtgttctgcttggattcaacatgaaagagctcaataaagtgaaacacgagatggactttgatgccgagtggctctttgaaaaccacgacgagaaggatagccgggtcaacgcttccaagaccgccgataaaaagctgaacctcgggaaggaggatgactcgtcttcagacagctttgaaaatctagaagaagaatctaatgagtctggcagccccttcgaccctgtgttcgaggtggagccaaagatttccaatgataacccagaggaacatgtgttaaaggtgatcccagaagacgcgagtgagtcagaggaaaagctggaccaaaaagaggacggctccaaatacgaaaccatccatctcaccgaagagccgaccaaactgatgcacaatgcatcagactctgaagtggatcaggatgatgttgtggagtggaaggatggcgcgagtccctcggagtctggccctgggtctcagcaggtctccgacttcgaagacaatacctgtgagatgaaacctggcacttggagcgacgagtcatctcaaagcgaggacgcacggtctagcaaacctgccgccaaaaaaaaggccacaatgcagggcgacagagagcagctgaaatggaagaactccagttacggcaaagtggagggcttctggtccaaggaccagtcacagtggaagaacgctagcgaaaacgatgaaagactgtccaacccgcagatagaatggcaaaattccacgatcgatagtgaggacggtgagcagtttgataatatgaccgatggcgtggctgagcccatgcatggctcactggctggtgtcaagctcagttcccagcaggcctag

SEQ ID NO: 321385 - DNA, 3309 bp, Artificial Sequence
  derived and/or modified sequence
atgtttcaactgcctgtgaataacctgggcagcctcaggaaggcccgcaaaaccgtgaaaaaaatcttaagtgatattggcctggagtattgtaaagaacacattgaagacttcaaacaattcgaacctaacgatttctacctgaagaacactacgtgggaagacgtcggcctttgggatccaagcctcacaaaaaaccaggattataggactaagcctttttgctgttccgcatgccctttctctagcaagttttttagcgcttacaagtcgcacttcaggaatgtgcactcggaagactttgaaaaccgtatcctgctgaattgtccatattgcacctttaacgccgacaaaaagaccctcgagactcacatcaagattttccatgcccccaacgccagcgcaccaagcagtagcctgtctactttcaaggacaagaataagaacgacgggctcaaacctaagcaagcagatagtgtcgaacaagctgtctactactgcaaaaaatgtacatatagggatcctctctatgagatcgtgaggaagcatatctaccgggagcattttcagcatgtcgcggctccgtatattgccaaagctggcgaaaagagcctgaacggtgccgtccctcttggatcaaatgcacgtgaagagagttcaattcactgtaagcggtgtctgtttatgcccaagtcctatgaagccttagtgcaacacgtcattgaggaccacgagcgcattggataccaggtcaccgctatgattgggcataccaatgtggtagtgccaaggagtaaacctctcatgctaatagcgcccaaaccacaggataaaaagtcaatgggcctaccccctcgcatcggaagtctggcttcaggcaatgtgcgttccctcccgtcccagcagatggtgaaccggctgagtatacctaagccaaatcttaattcgacaggggtgaacatgatgtctagcgtgcacctccaacaaaacaactacggggtgaagagcgtggggcagggatactctgtgggccaatccatgagactgggcttaggaggcaacgcccccgtgtctataccacagcagtcccagtccgtcaagcaacttctgccaagcggcaatggtcggtcctacggtttggggtccgagcaacggagccaggcccctgcacgctactcactgcagtcggcaaatgcttcctccctcagcagcggccagctaaagtcaccctcactgtcacagtcgcaggccagcagagttttaggccagtcctcttccaagcccgcagcagccgccacgggtccacctcctggaaatacttcatccacacagaagtggaagatatgcactatttgtaatgagctgttcccggagaacgtgtactccgtgcattttgagaaggagcataaggccgagaaagtgcccgccgtggccaattatatcatgaagattcacaatttcacctcgaagtgcttgtactgtaaccggtatctgcccaccgacacccttcttaatcacatgttgatccatggcctgagctgtccgtactgtcggagcacctttaatgacgttgagaagatggcggctcacatgcgtatggtgcatattgatgaggaaatgggacctaagaccgacagcaccctcagtttcgatctgacattgcaacaggggtctcacacaaatatccacttgcttgttaccacttataatttgagggatgcaccagcagagtcagttgcatatcacgctcagaacaaccctcccgtgccccctaagcctcagcctaaggttcaggaaaaagcggacattcccgtgaagagcagccctcaggcagcggttccttataaaaaggacgtggggaagaccctgtgtccgttgtgcttttccatcctgaaggggcccattagcgatgcccttgcccaccatttgagagaacgccatcaggtgatccagactgtacatccggtggaaaagaagctcacgtataaatgcattcattgcttgggggtttatacctctaatatgacagcctccacgatcacccttcacctggtacattgccgaggtgtaggcaagacacagaatgggcaggacaagactaacgctccttctcggcttaaccaaagccctagcctggcccccgtcaagcgtacctacgaacagatggagttcccattgcttaagaaacgtaagttagacgatgactctgacagtccgtctttctttgaggaaaagcccgaggaacccgtggtgttggcccttgaccctaaaggccacgaagacgatagctatgaggcccgaaagagcttcttaacaaagtacttcaacaaacaaccgtacccgacccggcgcgaaattgagaagttggctgcctccctatggctgtggaagtcagatattgcaagccactttagcaacaagcgtaaaaagtgcgttagggactgcgagaagtacaaaccaggggttcttttgggcttcaatatgaaggaacttaataaggtgaaacatgaaatggactttgacgctgagtggttattcgagaaccacgacgaaaaggacagtagggtcaatgcaagcaaaactgctgataagaaactgaacctgggaaaagaagatgactcctcttccgactcatttgagaacctcgaagaggagagtaatgagagcggctcaccattcgatcccgtgttcgaggtcgagccaaaaataagtaacgataatccagaagagcatgtcctgaaggtgatccccgaggacgccagtgagagcgaagaaaagctggatcagaaggaggatggttcaaagtatgagactattcatttgacggaggaaccaactaagcttatgcacaacgccagcgattccgaagtggaccaggacgacgtggtggaatggaaagatggcgccagcccatcggagtcaggacctggatctcagcaggtgagcgattttgaggacaacacgtgcgaaatgaaacctggtacatggtcagacgagagttcacaatcagaggacgcaagaagtagcaagcccgcagccaagaagaaagctaccatgcagggtgatcgggaacaactgaaatggaagaacagtagttatggcaaagtggagggcttctggtcaaaggaccagtcacaatggaaaaacgctagcgagaacgatgaacgtctgtctaacccacagatagaatggcagaatagtacgatagactctgaggatggagaacaatttgataatatgacagatggcgtggccgagcccatgcatgggtcccttgcaggcgtaaagctatccagccagcaggcctag

SEQ ID NO: 321386 - DNA, 3309 bp, Artificial Sequence
  derived and/or modified sequence
atgttccagctgcccgttaataatctggggtcactgaggaaagctcgtaagactgtcaagaaaattctgtcagacatcgggttggagtactgtaaagagcacatcgaagacttcaagcaattcgaaccaaacgatttttatctgaaaaacacaacttgggaggacgttggtctctgggaccccagtcttacaaagaaccaggattatcgaacgaagccgttctgttgttctgcttgtccgttttcaagcaaatttttctccgcttacaaaagtcacttccgaaatgtgcactcagaagacttcgaaaacagaattctgcttaattgcccctactgcacctttaacgccgacaagaaaacccttgaaacccacattaaaatcttccacgccccgaacgctagcgcgccaagtagcagtctcagtacatttaaggacaaaaacaagaacgatggcctcaagcctaaacaggccgactccgtggaacaggccgtgtattactgcaagaaatgcacatatagagatccactgtatgaaatcgtcaggaagcacatataccgggagcactttcaacacgtagcagccccttacatcgccaaggcaggcgaaaagtccttgaacggagccgttccgctcggatccaatgcaagagaagaatcatcaatccattgtaagagatgtctgttcatgccgaagtcctatgaggccctggtccaacacgttattgaggaccatgagcgcatcggataccaggtgaccgctatgataggccacacaaatgtggtggtgccacgtagtaagcctttaatgttgattgctcccaagccacaagacaaaaagagtatgggtctcccgccacgaatcggctcgctggcctcaggcaacgtgagatcactgccctcgcagcagatggtgaaccgcctttctatacccaagcctaatttaaactcgacaggagttaacatgatgagttccgttcatctgcagcaaaacaactatggcgtcaaatctgtgggccagggctattctgtcggtcagagtatgaggcttggtctaggcgggaacgctcctgtgtccatacctcagcaaagtcagtcagtgaagcagctcctgccaagtggaaatggtcgatcttacggtctgggcagcgaacagcggagccaggcacctgcccgctactctctgcaaagcgccaacgcatccagcctgagctcaggccagttgaagtcgccgtcgctgtcgcaatcccaggcttcccgggttctaggccagtcttcctccaagccggctgccgccgcgaccggcccgcctcctggaaacaccagttcaactcagaagtggaagatttgcaccatttgcaatgagctgtttcccgagaatgtctactccgtgcattttgaaaaggaacacaaagccgagaaagtgccagctgtggccaattacattatgaagattcataacttcactagtaagtgcctgtactgtaacagatacctgcccacagacacacttttaaatcacatgctcattcacggactgtcctgcccctactgtagaagtacctttaatgacgtcgaaaagatggcagcacacatgaggatggtccacatcgacgaggagatggggcctaaaaccgattcaaccctatcgttcgacttaaccctgcagcagggttctcacaccaatatacacttgctagtcacaacttataatcttagggacgccccggctgaatctgttgcctaccacgcacagaacaacccccccgtcccccccaagccacagccgaaagtgcaggaaaaggcagatatccctgtgaaatcgagcccacaagctgcagtaccttataaaaaagatgtggggaagaccttgtgcccactctgctttagcatactcaagggtcccatttccgacgctctagcacatcatctcagggaacggcaccaggttatccagacagttcatcctgtggaaaaaaagctgacctataaatgcatccattgtctgggagtgtatacaagcaatatgacagcatccaccatcacactgcacttggtgcattgcaggggagttggcaaaactcagaacggccaggacaagacaaatgctccgtccagactcaatcagagcccatcactagcccccgtgaaaagaacctatgaacagatggagtttccattgctcaagaagcggaagctggacgatgactcagatagtccctcctttttcgaggagaaacctgaagagccagtggtcctggcgttggatcctaagggtcacgaggacgatagctacgaagcaagaaaaagctttctgacaaaatattttaataaacaaccctatcccacacgacgtgagatcgaaaagctggctgcttccttgtggctgtggaagtcagacatcgcctctcacttctcgaataagagaaagaagtgtgtgcgggattgcgagaagtataagccgggcgtgctgttgggtttcaacatgaaagagcttaataaggtgaagcatgagatggattttgacgccgagtggctgttcgagaaccacgacgaaaaagactctagagtgaacgcctcaaagacggccgacaagaaattgaacctagggaaagaggatgattcatctagcgacagtttcgaaaacctggaagaagagtccaatgagagcggaagccctttcgaccccgtctttgaggtggagccgaaaattagcaatgacaatccagaagaacatgtactcaaggtgattcccgaggatgcctccgaatccgaagagaagctagatcaaaaggaagacggatctaagtacgagactatccacctgacagaagaacctactaaactcatgcataacgcctctgacagcgaggtggaccaggatgatgtagtagaatggaaagacggcgcctcaccctccgagagcgggccaggaagccagcaagtgagtgattttgaagataatacctgcgaaatgaaacccggaacatggagtgacgagtccagtcagtccgaagacgccaggtctagcaaaccggctgccaagaaaaaggccaccatgcagggggatagggagcagctgaaatggaagaacagcagctacggaaaggtggaaggcttttggtcaaaggatcagtcccagtggaagaacgcctctgagaatgacgaaagactctctaacccgcaaattgagtggcagaatagcaccattgattccgaagacggagagcaattcgataatatgaccgatggcgtggccgagcctatgcacggatccctcgctggagtgaagcttagttcacaacaagcatag

SEQ ID NO: 321387 - DNA, 3309 bp, Artificial Sequence
  derived and/or modified sequence
atgtttcagctccccgtgaacaatctgggttctcttcgcaaagcgcgcaaaacagtcaaaaagatcttatccgatatcgggttggaatattgcaaggagcacattgaagattttaagcagttcgaaccgaacgatttttacctgaagaacaccacatgggaggacgtcggtctgtgggacccaagtctcaccaagaatcaggattatcgaacaaaacccttctgttgctctgcgtgtccattctcatctaaattcttttccgcctacaagtcccacttcagaaacgtccatagcgaagacttcgaaaatcgcatcctactgaactgtccctactgcacatttaacgccgacaagaaaacccttgagacgcacattaagatattccacgcccctaacgcctctgctccgagttcaagcctgagtacattcaaggataaaaacaagaatgacggcctgaagcccaagcaggcagattccgtggagcaggctgtttactactgcaagaagtgcacttatagagatcctttatatgaaatcgtgcgcaagcacatctatagggagcatttccagcatgtggctgctccatatattgctaaggccggtgaaaagtctttaaatggtgctgtgccactgggaagcaatgcccgcgaggagagcagtattcattgcaaacgatgtcttttcatgccaaaaagttacgaggcgctggtgcagcacgtaatcgaggaccacgaaagaataggataccaggtaaccgccatgatcgggcatacaaacgtcgttgtgccgcggtctaagcccctcatgctgatcgccccaaagccccaagataagaaatcaatgggcctgccccctcgcattggcagcctcgctagtggaaatgttcgctccctgccctctcagcagatggtcaacaggctgagcatccccaagccaaacctgaattccaccggagtaaacatgatgtcctctgtgcacctgcagcagaataattacggtgtgaaatctgtggggcaagggtacagcgtcggccagagcatgcgtttaggcttaggaggcaacgctcccgtgtccattccgcagcaatcccagtcagtgaaacagttgctcccctctggtaatggtaggagctacggtctgggtagcgagcagcggtcccaagcccctgcccggtatagccttcagagcgctaatgcatcttcactgtccagcggtcaactcaaatcaccgagtctaagccagagccaggcttctcgggttctaggccagagtagtagcaagcctgccgctgctgcaacaggaccacctccgggtaatacatcttcaacacagaagtggaagatatgtacaatttgcaatgagctttttcccgaaaatgtgtacagtgtgcacttcgaaaaggaacataaagcagaaaaagttcctgccgtggccaattatatcatgaagattcataacttcactagcaagtgtctgtactgtaaccggtatctgcctacggacactctgttgaatcacatgctgatccacgggctttcctgtccgtactgtcgatcaacgtttaatgatgtggagaaaatggccgctcacatgcggatggtccatattgatgaggaaatggggcctaagacagatagtactttgtctttcgatcttactttacaacagggctcccacaccaatattcacttgttggtgactacctataatctgcgggacgctcctgccgaatcagtggcctaccatgcacagaacaacccccccgtgccccccaagccgcagccaaaagtgcaggagaaagcggacataccggtcaagtcttcaccacaggcagccgtgccctataaaaaggacgtggggaagaccctctgcccgttgtgcttttcgatcctgaagggtccaatctcggatgccttagcccaccatctcagggaaagacaccaggtcattcagaccgtccatccagttgagaaaaagttgacttacaaatgcatccattgcctgggcgtctatacttctaatatgactgcgagtaccattactttgcacctggttcactgccgcggggtgggaaagacccagaatggccaggacaaaacaaacgcaccttctcgcctaaaccagagcccttccctggctcccgtgaagaggacatatgaacagatggaatttccactactcaagaagagaaagttagatgatgactccgacagcccctctttctttgaagagaaacctgaggagccggtggtgttggccttggacccgaagggccatgaagacgacagttatgaagcccggaaatcatttctcacaaaatatttcaataaacaaccctatcccaccaggcgcgagatcgaaaagctggccgcatccctgtggctgtggaaatctgacattgcaagccacttctcaaataagcgtaagaaatgtgtgcgcgattgcgaaaagtacaaacccggagtcctcctgggtttcaacatgaaagagttgaacaaggtgaaacatgaaatggactttgacgctgagtggctgtttgagaatcacgatgaaaaggacagtcgcgtcaatgcttccaagaccgcagataagaaactcaacctgggcaaggaggacgattccagcagcgatagcttcgagaatcttgaggaagagagcaatgaatctggatcaccttttgatccggtgtttgaggtggagcctaaaatcagcaatgacaatcctgaagaacatgtgttgaaggttatcccagaggacgccagtgagagcgaagagaagctcgaccagaaggaggacggatctaaatacgaaaccattcacctcacagaagaacccaccaagttgatgcacaatgcttcggacagcgaagtggatcaggacgacgtagttgagtggaaagatggtgcaagcccttcagaaagcggccctgggtcccagcaggtgtccgactttgaggacaacacctgtgaaatgaagccaggaacgtggagtgatgaatctagtcagtctgaggatgcccgctccagcaagccggctgcaaagaaaaaggccactatgcagggcgaccgggaacagttgaaatggaagaatagttcctacggtaaggtcgaggggttctggtcgaaagaccagtcccagtggaaaaacgctagtgagaacgatgagagactatctaaccctcagatcgaatggcagaactccaccattgattctgaggacggtgagcagttcgataatatgactgacggtgtggcggaaccaatgcacggctcgctcgctggggtgaagctatcctcgcagcaggcctag

SEQ ID NO: 321388 - DNA, 3309 bp, Artificial Sequence
  derived and/or modified sequence
atgttccagctgcctgtgaacaacctgggcagcctgaggaaggccaggaagacagtgaagaagatcctgagtgacatcggcctggagtactgcaaggagcacatcgaggacttcaagcagtttgagcccaatgacttctacctgaagaacaccacctgggaggatgtgggcctgtgggaccccagcctgaccaagaaccaggactaccgcaccaagcccttctgctgcagcgcctgccccttcagcagcaagttcttcagcgcctacaagagccacttcagaaatgtgcacagtgaagattttgagaaccgcatcctgctgaactgcccctactgcaccttcaatgctgacaagaagaccctggagacccacatcaagatcttccacgccccaaatgccagcgcccccagcagcagcctgagcaccttcaaggacaagaacaagaatgatggcctgaagcccaagcaggccgacagcgtggagcaggccgtgtactactgcaagaagtgcacctacagagaccccctgtatgaaattgtgaggaagcacatctaccgggagcacttccagcacgtggccgccccctacatcgccaaggccggggagaagagcctgaatggagctgtgcccctgggcagcaatgcccgggaggagagcagcatccactgcaagcgctgcctcttcatgcccaagagctatgaggccctggtgcagcacgtgattgaggaccacgagagaattggctaccaggtgacagccatgattggccacaccaacgtggtggtgcccaggagcaagcccctgatgctgattgcccccaagccccaggacaagaagtccatgggcctgcccccaagaattggcagcctggccagcggaaatgtgcgcagcctgcccagccagcagatggtgaaccggctgagcatccccaagcccaacctgaacagcactggagtgaacatgatgagctctgtgcacctgcagcagaacaactacggcgtgaagtctgtgggccagggctacagcgtgggccagagcatgaggctgggcctgggcggcaatgcccctgtgtccatcccccagcagagccagagcgtgaagcagctgctgcccagcggaaatggccgctcctatggcctgggcagcgagcagaggagccaggccccagcccgctacagcctgcagagcgccaatgccagcagcctgagcagcggccagctgaagagccccagcctgagccagagccaggccagccgggtgctgggccagagcagcagcaagccagctgctgctgccactggacctcctcctggcaacaccagcagcacccagaagtggaagatctgcaccatctgcaatgaactcttcccagaaaatgtgtacagcgtgcactttgagaaggagcacaaggccgagaaggtgcctgctgtggccaactacatcatgaagatccacaacttcaccagcaagtgcctgtactgcaaccgctacctgcccacagacaccctgctgaaccacatgctgatccacggcctgagctgcccctactgccgcagcaccttcaatgatgtggagaagatggccgcccacatgaggatggtgcacattgatgaggagatgggccccaagacagacagcaccctgagctttgacctgaccctgcagcagggcagccacaccaacatccacctgctggtgaccacctacaacctgagagatgccccagctgagagcgtggcctaccacgcccagaacaacccccctgtgccccccaagccccagcccaaggtgcaggagaaggctgacatccctgtgaagagcagcccccaggccgctgtgccctacaagaaggatgtgggcaagaccctgtgccccctgtgcttcagcatcctgaagggccccatcagtgatgccctggcccaccacctgcgggagcggcaccaggtgatccagacagtgcaccctgtggagaagaagctgacctacaagtgcatccactgcctgggcgtgtacaccagcaacatgacagccagcaccatcaccctgcacctggtgcactgccggggcgtgggcaagacccagaatggccaggacaagaccaatgcccccagccggctgaaccagagccccagcctggcccctgtgaagaggacctatgagcagatggagttccccctgctgaagaagaggaagctggatgatgacagcgacagccccagcttctttgaggagaagccagaggagcctgtggtgctggccctggaccccaagggccatgaagatgacagctatgaggccaggaagagcttcctgaccaagtacttcaacaagcagccctaccccacccggcgggagattgagaagctggccgccagcctgtggctgtggaagagtgacatcgccagccacttcagcaacaagaggaagaagtgtgtgcgggactgtgagaagtacaagccaggagtgctgctgggcttcaacatgaaggagctgaacaaggtgaagcatgagatggactttgatgctgagtggctgtttgaaaatcatgatgagaaggacagccgggtgaatgccagcaagacagctgacaagaagctgaacctgggcaaggaggatgacagcagcagtgacagctttgagaacctggaggaggagagcaatgaaagtggcagcccctttgatcctgtgtttgaggtggagcccaagatcagcaatgacaaccctgaggagcacgtgctgaaggtgatcccagaagatgccagcgagagcgaggagaagctggaccagaaggaggatggcagcaaatatgagaccatccacctgacagaggagcccaccaagctgatgcacaatgccagtgacagcgaggtggaccaggatgatgtggtggagtggaaggatggagccagccccagcgagagcggccctggcagccagcaggtgtctgactttgaggacaacacctgtgagatgaagccaggcacctggagcgatgagagcagccagagtgaagatgcccggagcagcaagccagctgccaagaagaaggccaccatgcagggcgaccgggagcagctgaagtggaagaacagcagctatggcaaggtggagggcttctggagcaaggaccagagccagtggaagaatgcctctgaaaatgatgagcggctgagcaacccccagatcgagtggcagaacagcaccattgattctgaagatggagagcagtttgacaacatgacagatggagtggccgagcccatgcacggcagcctggccggcgtgaagctgagcagccagcaggcctag

SEQ ID NO: 321389 - DNA, 3309 bp, Artificial Sequence
  derived and/or modified sequence
atgttccagctgcccgtgaacaacctgggcagcctgcggaaggcccgaaagacggtcaaaaagatattgtctgacatcggcttagagtattgcaaggagcacattgaggattttaaacagtttgaacccaacgatttctatctcaagaataccacgtgggaggatgtcggcctgtgggaccctagcctaaccaagaaccaagattatcgcacgaagcctttttgctgctctgcatgcccgttctcgagcaaattcttcagcgcctacaaatctcacttccgtaacgtgcacagcgaagatttcgaaaatcggattcttctcaattgcccatactgtaccttcaatgcggataagaaaacactggaaactcatatcaagatcttccatgcgcccaatgcaagcgctcctagcagcagtctgagcacctttaaggataagaacaaaaacgacggcctcaagcccaagcaggctgattccgtcgagcaggcagtctattactgcaaaaaatgtacctatagagatcccctttatgaaattgtgaggaaacacatctaccgtgaacatttccagcatgtggcagccccttacatagcaaaggccggcgaaaaaagcctgaatggagctgtcccgttgggatccaatgcccgggaggagtcctctattcattgtaaacgatgcttatttatgcccaaaagttatgaagcgctggtgcagcacgtgatcgaggatcacgagcgaattggctatcaggtgacagccatgattggccataccaacgtggtggtgccaagatccaaacctctcatgttgatcgcaccgaagccgcaagacaagaagagcatggggcttccgcctagaatcggttccttggcatccggtaacgtgcgatccctaccgtcacaacagatggtaaataggttaagtatcccgaagcctaacctgaattctacaggcgtcaacatgatgagctctgttcacttacagcaaaacaattacggcgtaaagtccgtgggccagggttatagtgttggccagtctatgcgccttggcttgggagggaacgcccctgtcagtattccccagcagtcacaaagtgtcaaacaactcctgccgtccgggaatggaaggtcctacggtctcggatccgaacagagaagtcaggccccagcaagatacagcctgcaaagcgccaacgcttcatctcttagttctggccagctaaaaagtccctccctgtcacaatctcaggcaagcagagtgctgggacagtcgagcagtaagcccgccgccgctgccaccggacctccacctggcaatacaagttcgacacagaagtggaaaatatgcacaatctgtaatgagctcttccctgaaaacgtttattccgtgcacttcgagaaagaacacaaggccgaaaaagtccccgccgtggctaactacatcatgaagatccataactttacatccaagtgtctgtattgtaaccgctatctgcctactgatactttgcttaaccatatgctgattcacggtctgtcctgcccatactgtcggtctacgtttaatgatgtggagaaaatggctgctcacatgcgtatggtgcacatcgacgaggaaatggggcccaagaccgattcaactctgagctttgaccttacgctgcagcagggttcccataccaacatacatctgctcgtgactacttataacttgcgggacgctccagccgaaagcgtggcgtaccatgcccagaacaatccccccgtgccccccaagccacaaccaaaggtacaggagaaagccgacatccccgtgaaatcctcaccccaagccgctgtgccatataagaaagacgtcggcaaaacactgtgcccactttgctttagtatcttgaaggggccgattagtgacgccctcgcgcatcatctcagggaaaggcaccaggtgatccagacagtgcaccctgttgagaagaagttgacttataagtgtatacattgcctgggagtgtacacaagtaatatgaccgcctccacaatcaccctgcatctagttcactgtagaggggttggcaaaactcagaacggccaggataagacaaatgctccctcaagacttaaccagagtcctagtctggcaccggttaagagaacatacgaacagatggagtttcctctcctcaaaaagaggaaactggacgacgattccgattctccgtcttttttcgaggagaagcccgaggagccagtcgtcctggcccttgatcctaagggacatgaggatgacagctatgaggctcgaaagtcattcctgaccaagtacttcaacaagcagccttatcctactcgaagagaaattgaaaaattagctgcctcactgtggctgtggaaatctgatatcgcctctcacttctctaataagaggaaaaagtgtgtgcgcgattgcgaaaagtataagcccggcgtgctccttgggtttaacatgaaggagctcaataaggtcaagcatgagatggattttgacgctgaatggctcttcgaaaaccacgacgaaaaagatagtagggtgaacgctagtaagaccgcggataaaaagctcaatctaggaaaagaggatgattcatcttccgattcattcgagaacctggaggaagagtccaatgaatccggatctcccttcgatcctgtgttcgaggtggaaccaaaaatctcaaacgataaccctgaagagcacgtattgaaagtaattcctgaagatgcttcggaatcagaggagaagcttgaccagaaggaagacggctctaagtatgagaccatacaccttaccgaggaaccaacaaagctgatgcacaatgcatcagattctgaggtcgaccaggatgacgtggtggaatggaaggacggcgcatcccctagtgaaagtggccccgggtcacagcaagtttcagatttcgaagacaatacatgcgaaatgaaacccggaacttggtcagacgaatcctcacaatcagaggacgcacgaagttctaagccagctgcaaaaaagaaggctaccatgcagggggatcgcgaacagttaaaatggaagaattctagctacggaaaggtggaaggcttctggagcaaggatcagtctcaatggaaaaatgctagcgagaacgacgaaaggctgtctaatccccagatcgaatggcaaaactcaactattgacagtgaagatggcgagcagttcgataatatgactgatggagtcgcagagccaatgcatgggtcattggccggcgttaaacttagcagtcaacaggcttag

SEQ ID NO: 321390 - DNA, 3309 bp, Artificial Sequence
  derived and/or modified sequence
atgttccagctgcccgtgaacaacctgggcagcctgcggaaggcccggaaaactgtcaagaagattctcagcgatatcggccttgaatactgtaaggaacatatcgaggatttcaagcagtttgagcccaacgatttctacctgaaaaatacaacttgggaagacgtgggcctgtgggatcctagtctgacaaaaaatcaagattaccgaaccaaacccttctgctgtagcgcttgccccttttcttcaaaattcttctctgcttacaaaagccacttcaggaacgtgcacagtgaggacttcgagaacagaattctactgaattgtccttactgcaccttcaatgctgataaaaagaccttagaaactcatattaagatctttcacgccccaaacgcatccgcaccatccagcagcctcagtactttcaaggacaagaataagaatgacggtctgaaacccaagcaggcagatagtgtcgaacaggcagtatactattgcaaaaaatgtacttaccgcgaccccctgtatgagatcgtgagaaagcacatatacagagaacacttccaacatgtggctgccccttacatcgccaaagccggagagaagagcctcaacggggcagtgcccttgggctctaatgctcgtgaggagagttcaattcattgtaaacgttgcctgttcatgcccaaaagctatgaggcgttagtacagcatgttattgaggaccacgagcgcatcgggtaccaggtgacggcaatgatcgggcatactaacgtagtggtgccccggagcaaaccgctgatgttaatcgctccaaaaccccaggataaaaaatcaatgggactgcctcccagaattggaagtcttgctagtggaaacgttcggagcctcccatctcaacaaatggtcaataggctctcaatccccaaacccaacttaaactcaactggagtcaacatgatgtccagcgtgcacttgcagcagaataactatggagtgaagagtgtgggccagggatactctgtggggcaatccatgcgactaggcctcggagggaatgcccctgtaagcatcccccaacagtctcagtccgttaagcagctgctgccgagcggaaacgggagatcttacgggctcggttccgaacagcggtctcaggcccctgcacgttattcactgcaatcagcgaacgcatcatctctgagtagtggacagctgaagtcccctagtctctcacagtctcaagcctcacgggttctaggccagtcctcttctaagcctgcggccgccgccaccggcccaccccccggtaacacctctagcacccagaaatggaaaatctgtacaatctgtaatgagctgttcccagagaacgtgtactctgtccatttcgagaaagaacataaagccgagaaagtgccagctgtggcaaattacatcatgaagattcataactttactagcaaatgcttatattgtaacaggtatctgccaaccgatactcttctgaatcacatgttgatccacggtttgtcttgcccttactgtcgttccaccttcaacgatgttgaaaaaatggcagcgcacatgagaatggttcacatcgacgaggaaatgggccctaagacagactcaaccctctcattcgatcttacattgcagcagggatcacacaccaatatccacctgctggttactacatacaatctccgagacgcccccgccgaaagtgtggcctatcatgctcaaaacaatcccccagtgcctcctaagccccagcctaaggtccaggaaaaggcggatatccctgtgaaatcttcaccccaggcagcagttccctataaaaaggacgtgggcaagaccctctgcccgctttgctttagcattctcaagggccccatctctgatgccttggcccaccatctgcgggagcggcatcaggtcattcagactgtgcatccagttgaaaagaagctgacttacaaatgtatacactgtctgggagtttacaccagcaacatgacagcttctaccatcacgttgcatttggttcactgtcggggcgtcgggaagactcagaatgggcaagataaaaccaacgctcccagccgattgaatcagtccccttctcttgcgccagtaaaaaggacttacgaacagatggaattcccgctactcaaaaagagaaagttagatgacgacagcgactccccctctttctttgaagaaaaacctgaggaacccgtcgtgctggccctggacccaaaaggtcacgaggatgactcttacgaggccagaaagagtttcctgaccaaatactttaacaagcagccatatcctaccagaagggaaattgagaaactggcagcatcattgtggctatggaaatccgacattgccagtcatttcagtaacaaaagaaagaaatgtgtccgggattgtgagaagtacaaacccggcgtcctgttgggctttaatatgaaggagttaaataaggttaagcacgagatggacttcgatgcagagtggcttttcgagaaccacgatgaaaaagattcacgagtcaacgctagcaagaccgccgacaaaaaactgaacctgggcaaggaggatgattcttcttcagactccttcgaaaacctcgaagaagaatccaacgaatctggatctcctttcgatcctgtcttcgaggttgagccaaagatcagcaacgacaaccccgaggagcatgtgttaaaggtgatccctgaggatgccagtgagtccgaggagaaacttgatcaaaaggaagatggaagtaagtatgaaactatccacctgaccgaggaaccaacaaagctcatgcacaatgcctccgactctgaagtagaccaagatgatgtggtggaatggaaggatggggcttccccgagtgaaagcggcccgggatctcaacaggtgagtgactttgaagataacacctgtgaaatgaaaccaggaacttggtcagacgagtcctcgcagagtgaggacgctcggagctctaagccagcagccaagaagaaggccactatgcagggcgacagagaacagctgaagtggaagaatagtagttatggtaaagtggaaggattttggtcaaaagaccagtcgcagtggaagaatgcatcagaaaatgatgaacgactgtcgaaccctcagatcgaatggcagaacagcacaattgattctgaagacggggagcagttcgataacatgaccgatggagttgctgaaccgatgcacggtagccttgccggggtgaagctgtccagccagcaggcctag

SEQ ID NO: 321391 - DNA, 3309 bp, Artificial Sequence
  derived and/or modified sequence
atgttccagctgcccgtgaacaacctgggcagcctgcggaaggccaggaagaccgtgaaaaagatcctgtcagatataggtctcgaatactgcaaagagcacatcgaggacttcaagcagttcgagccaaatgacttctacctgaagaatacaacgtgggaggatgtaggactgtgggacccctcgcttaccaaaaaccaggattatcgcacaaagccattctgttgttctgcatgtccattttcatccaaatttttcagtgcgtacaaatcccactttagaaacgtacacagcgaggatttcgaaaaccggattttgctgaattgcccttactgtaccttcaatgccgataagaaaacactggaaacacacataaagatatttcatgccccaaatgccagtgcacctagctcctctctgagtacctttaaagataagaacaaaaacgacgggctgaaacccaagcaagcggactcggtcgaacaggccgtctactactgtaagaaatgtacttatagggacccactctatgagatcgtgcggaagcacatctaccgtgagcacttccagcacgtggccgccccgtatatagcaaaagcaggtgaaaaatctctgaatggcgctgttccgttaggatctaacgccagggaagagagtagcatccactgtaaacgatgcctgtttatgcctaaatcttacgaagcactggttcagcacgttattgaggatcacgaaaggattggttaccaggtcactgcaatgattgggcacaccaacgtggttgtccccagaagcaaacctcttatgttgattgctccaaagccgcaagataagaagagcatgggactgcccccccggatcggctcgcttgccagcggaaacgtgagatccctgcccagccagcagatggtgaatagactgagcatacctaagcctaaccttaacagcacaggggtcaatatgatgtctagcgtgcacttgcagcagaacaactacggagtcaagtctgtaggccaagggtattcagttggacagtcaatgcgactgggcctaggtggtaatgcccccgtttcaatccctcagcaatctcaaagcgtgaagcagttgttaccgagcgggaacgggcggtcttacggcctgggctcagagcaacgctcccaggcacccgctagatacagccttcagtcagcaaacgcctctagcctgagcagcggccagcttaagagcccaagcctgagccagtcacaagcttcacgggttctcgggcaatcctcttccaaacccgcagccgctgcgacaggcccaccacccggaaacacttcatccacccagaagtggaagatttgtaccatctgcaatgagctgttcccagagaacgtgtactccgtacattttgagaaggagcacaaggccgagaaagtgcccgccgttgccaactatatcatgaagattcacaattttacaagcaagtgcctctattgtaaccggtatcttccaacggacacactgttaaatcacatgctgattcacggcttaagctgtccatactgcaggtctacattcaatgacgtcgagaagatggccgctcacatgcggatggtgcacatcgacgaagaaatggggccgaaaactgactcgaccctgtctttcgatctcacactgcagcagggatcacacaccaatattcacttattggtgacaacctacaatctgagagatgcccctgcagaatccgtggcctatcacgcacagaacaatcctcccgtccctcctaagcctcagcccaaagtgcaagaaaaagccgacataccagtcaagagcagcccacaggcggcagtaccatacaagaaggacgtcggtaagactctttgccctctgtgcttctccattctaaaggggcctatcagcgacgcgctcgcccaccaccttagagagagacaccaggtaatccagacagtccatccagtagagaaaaagctgacctacaagtgtatccattgtctgggtgtatacacatccaacatgactgcctccactattacactccatttagtccactgccggggagtgggcaagacacagaatggtcaggataaaacaaatgcccccagccggctgaaccagtcgccctcactagcccctgtcaagcgaacatatgaacagatggagttccccctgctgaaaaagcgcaagctcgatgacgactccgacagtccctctttcttcgaggaaaagcccgaggaacccgtggttctcgccctcgacccgaagggtcacgaggatgactcctacgaggctcggaaatccttcctgacaaaatacttcaacaaacagccctaccccacaaggagggaaatcgagaaattagctgccagcctgtggctctggaagtctgatattgctagccatttttccaacaagaggaaaaaatgcgttagggactgtgagaagtataaacccggggtgctgctggggttcaacatgaaggaattgaacaaggtaaagcatgagatggactttgacgccgagtggctgttcgagaaccacgacgagaaagacagccgggtgaacgcatccaagaccgccgataaaaagctgaacttgggcaaggaagacgactcttcctctgactcttttgagaatctcgaggaagaaagcaatgagtcaggatctccctttgatcctgtgtttgaagtggaacctaaaatcagcaacgataatcctgaagagcatgtgctgaaggtgattcccgaggacgcctccgagtccgaagagaaacttgatcaaaaagaagacggcagcaagtatgagaccatacatctgactgaagagcctacaaaactgatgcataacgcaagcgacagtgaagttgaccaagacgatgtagttgaatggaaagatggcgcatcgccgagtgagtctggcccagggagtcaacaggtaagcgatttcgaagataacacttgtgagatgaaacctgggacttggagcgatgagtcttcacagagcgaggacgccagatctagcaaacctgctgccaagaagaaagccacaatgcagggagaccgagaacaattgaaatggaaaaatagtagttatggaaaggtggagggattttggtccaaagatcagagccagtggaagaacgcaagcgaaaacgatgagcgcctttcaaatccccagatcgagtggcagaatagtaccattgatagcgaggacggagaacagttcgataacatgactgacggcgtagcagagccaatgcacgggagtctcgctggcgtaaagctcagttcgcagcaggcttag

SEQ ID NO: 321392 - DNA, 3309 bp, Artificial Sequence
  derived and/or modified sequence
atgttccagctgcccgtgaacaacctgggcagcctgcggaaggccaggaagacagttaaaaagattctgtccgacatcggccttgagtattgtaaggagcacattgaggatttcaaacagtttgaaccgaatgacttttatctgaagaatacaacttgggaggatgttggtctatgggacccaagcctgactaaaaaccaggactaccgcacgaaacccttctgttgctcggcttgtcccttctcttcaaagtttttttcagcttacaagtcccactttcgcaacgtgcacagcgaagacttcgagaatcgaatactgctgaattgcccctactgcacctttaacgctgacaagaaaactctcgagacacacatcaagatcttccacgccccgaacgcttcggccccttcttcttccctttcgaccttcaaggataagaacaagaatgatggacttaagccaaaacaagctgacagcgtggaacaagcagtttactactgtaagaagtgtacatatcgtgaccctctctacgaaattgtacgtaagcacatctaccgcgagcactttcagcatgtcgcagccccctacatcgccaaggctggcgaaaagtcattgaacggggcagtgcccttgggcagtaacgccagagaagagagtagcatccactgtaagaggtgcctgtttatgcccaagtcttacgaagctctagtgcaacacgtcattgaagatcacgagcgaattggttaccaggtgacggcaatgattggtcacaccaatgtagtggtcccacgctcaaaaccactcatgctcatcgcccctaaaccacaagacaagaaatccatggggttgccgccaaggataggctcactagcctctggcaatgtgagaagccttcccagtcagcagatggttaatcggttatcaataccaaagccgaatttaaattctaccggtgtgaacatgatgtcatccgtgcacttgcagcaaaacaattatggagtaaaatctgtgggacagggttattctgtcggtcagagtatgcggctggggctaggcggcaatgctccagtgtcaatcccccagcagtctcagagcgtgaagcagctgctcccaagcgggaatggccggagctacggcttggggagcgaacaacggagtcaggcgccagctcgctactctctgcaatccgcaaacgcttctagcctgtcaagtggtcaactcaaaagtccatcactgagtcagtcacaggcatcgagagtcctcggccagagcagtagcaagccagctgcagctgccactgggcctcctcccgggaatacaagctccacccagaaatggaaaatatgcaccatttgcaacgagttattccctgaaaacgtctacagcgtccacttcgaaaaggagcacaaagctgaaaaagtgccagccgtcgccaattacatcatgaagatccacaacttcaccagcaaatgcttgtattgtaaccggtaccttcccactgatacgttattaaatcacatgctgatccatggcttgtcttgcccctactgcagatctacatttaatgacgtcgaaaaaatggccgctcatatgaggatggtgcatattgatgaagaaatgggcccaaagacagatagcacacttagtttcgatctgaccttacagcaggggtcccacacgaatatccatttattagtcactacctacaatctaagggacgctcccgcagaaagcgtggcttatcacgcccagaacaaccccccagtacctcctaagccgcaacccaaagtacaggaaaaggctgatattccagtgaagtcctcgccccaggcagccgtgccttacaagaaggatgtgggaaagactttatgccccctgtgcttctccatccttaaaggtcctattagtgacgcattagctcaccatctgagggaaagacaccaggtgatccaaaccgtgcacccagtggagaaaaaactcacctacaagtgtattcattgtctcggagtctatacttccaatatgacagcctccaccatcaccctccacctggtacactgcaggggagtgggcaaaactcaaaatggtcaggacaagacgaatgccccgtctcggctcaatcagtctccctctttggcgcccgtgaaacgcacgtatgaacaaatggagttccccttgcttaaaaaacggaagttggatgatgatagcgacagcccctcttttttcgaagaaaagccagaggagcccgtagtgctagctctcgatcccaaagggcacgaagatgacagttacgaagcccggaaatcctttctcacgaaatatttcaacaagcagccatatccaactaggcgggagatcgagaagttggcggctagcctttggctctggaagtccgacattgcctctcacttctcaaacaagagaaagaaatgcgttcgcgactgcgaaaagtacaaaccaggcgtccttctaggatttaatatgaaggagctcaacaaagtaaaacacgagatggactttgatgcagaatggctttttgaaaatcatgatgagaaagattccagggtgaacgcatcaaagacagctgataagaaacttaatctcggaaaggaggacgacagtagctctgactcctttgagaatttagaggaggagagcaacgagtctggcagccctttcgaccctgtgtttgaggtcgaacctaaaatcagcaatgacaaccccgaagaacatgtactgaaggtaattccagaggacgcatccgagagcgaagaaaaactagaccagaaagaggacggctccaaatatgagaccatccatctcacagaggaaccaacaaaactcatgcacaacgcctcagacagtgaggtcgatcaagatgacgtggtggagtggaaggatggagctagccctagcgagtcagggccaggcagccagcaggtttccgatttcgaagataacacgtgcgaaatgaaacctgggacctggtccgacgagtcctcacagtcagaggatgcccggagctcaaagccggctgccaaaaagaaagccactatgcaaggggacagggagcagctgaaatggaaaaactcaagctatggtaaggtggaaggcttttggtccaaggatcagtcccagtggaagaatgcgagcgagaatgacgagaggttatcaaatccacagattgagtggcagaacagcacgatcgactccgaggatggagagcaattcgacaacatgaccgatggcgtggcagagccgatgcatgggtcccttgccggcgtgaagctctcaagtcaacaggcatag

SEQ ID NO: 321393 - DNA, 3309 bp, Artificial Sequence
  derived and/or modified sequence
atgtttcaactgcccgtcaataacctgggtagccttaggaaagcacgaaaaaccgttaagaagattctctccgacattggactagagtattgtaaagaacatattgaggacttcaagcaattcgagccaaacgacttttatttaaagaacacaacatgggaagacgtgggactgtgggatcccagccttaccaagaaccaggactaccgaactaagccgttttgttgtagcgcctgtcccttctcctctaaattcttctctgcctataagtcccactttcgaaacgtccacagtgaagattttgagaatcgaattctgctcaattgcccctactgcacatttaatgccgataaaaaaaccttggaaacacacatcaaaatttttcacgcccctaacgccagcgcacccagtagttccctgagtacatttaaagataagaacaaaaatgatggactcaaacccaaacaagccgatagcgtggagcaggctgtgtactattgcaagaaatgtacctacagagatccgttgtacgagattgtcagaaagcacatctatcgcgaacacttccagcacgtagcagccccatacatcgccaaggcgggagagaagtctcttaacggtgctgtgcccctggggtccaacgcccgagaggagtccagcatccactgtaagagatgccttttcatgcccaaatcttatgaagccctggtgcagcatgtcatcgaggaccatgagcgcatcggctaccaggttaccgctatgattggacataccaacgtagtggtgccaaggtcaaagcctctgatgcttatagcacctaaaccgcaagataaaaaatccatgggcttgccccctcggattggcagtctcgccagtgggaatgtgagaagcctgccaagccagcaaatggttaataggttgtccataccgaaaccaaatctgaattctactggcgtgaacatgatgagtagcgtgcatcttcaacagaataactatggagtgaagtctgttggtcaaggctatagtgtagggcagtccatgagactgggactggggggtaatgcccctgtctcaatcccccagcagtcccaaagcgtgaagcagctgctcccgtccgggaatggcaggagctacggtctgggctccgaacaacgatcacaggctccagcgaggtactcactgcagagtgcaaatgcaagcagcctcagcagcggacagctcaagagcccaagtctgagtcagtcccaggcatcccgggtcctggggcagagttcctcgaagcctgccgctgcggctacaggccctcctccagggaacactagtagcacccagaagtggaagatttgcacaatctgcaacgagctgtttcctgagaatgtatacagcgtacactttgagaaggaacacaaggctgaaaaagttccggctgtggcaaattatattatgaaaatccacaacttcacatcaaaatgtctgtattgtaatagatatctgcccactgatactctcctaaatcacatgttgatccatggcctgagttgtccctactgtcggagcaccttcaatgatgtggaaaagatggcagctcacatgcgaatggtgcatatcgatgaggagatgggaccgaagactgactctaccctttctttcgacctgactttgcagcaagggtcccataccaatattcaccttcttgtgacaacctacaaccttcgcgacgctcccgctgagagcgtggcatatcatgcacagaacaatccaccagtgccacctaagccccagcctaaagttcaagagaaggcagacattcccgtcaagtctagcccacaggctgcggtcccttacaagaaggatgtcggaaagacgctctgccccctgtgttttagtatcctgaaagggccaattagcgatgcattagcccaccatctccgggaacgtcatcaggtgattcaaacggtccacccagtggagaaaaaactcacatataagtgtatacactgccttggagtgtatacaagcaatatgaccgctagcaccatcacactccatttggtccattgtaggggggtagggaaaacacagaacggacaggacaagaccaacgctcccagccggctcaaccagagcccttccctggcacctgtgaaacgaacatacgagcagatggaatttccactcctgaagaagcgcaaattagacgacgatagcgatagcccctcattcttcgaggagaaacctgaagaaccagtcgtgctggcgctcgacccaaaaggccacgaggacgactcctacgaagccagaaaatcatttcttaccaaatattttaataagcagccttaccccacacgacgggaaattgaaaagctcgctgcttcactatggctctggaagtcagatatcgcttcccatttctcaaacaagagaaaaaaatgtgttcgcgattgtgagaaatacaaacccggagttctgcttgggtttaacatgaaggaattgaacaaggtgaagcatgagatggacttcgatgcagagtggttgtttgagaaccatgatgaaaaagactcccgtgtgaacgcgtccaagaccgccgataaaaaattgaacctgggcaaagaagatgactcctcatccgattctttcgaaaaccttgaggaagaaagtaacgagtctggatcccctttcgatccagtgtttgaggttgagcccaaaatttcaaacgataaccctgaagagcatgtgctcaaagtaatcccagaagatgcaagcgagtccgaagaaaaactggatcaaaaagaggatggctccaagtacgagacaatccatctgacggaggaaccaaccaagctgatgcacaacgcctctgacagcgaagtagaccaggacgacgtggtggaatggaaagatggagcaagccctagcgaaagcgggccaggatcacaacaggtgtccgatttcgaagacaatacatgcgagatgaagccaggaacatggagcgatgaatcttctcaaagcgaagacgctcggagctccaagcccgcagccaaaaaaaaagcgactatgcaaggtgatagagagcagttgaagtggaagaacagctcttatggcaaggtagaagggttttggtccaaggatcaatcccagtggaaaaacgcctcagaaaatgacgaacgcctatctaaccctcagattgagtggcaaaactctaccattgacagcgaagacggagagcagttcgataacatgactgatggcgttgctgagcctatgcacgggagcttggccggagtgaagctctctagccagcaagcttag

SEQ ID NO: 321394 - DNA, 3309 bp, Artificial Sequence
  derived and/or modified sequence
atgttccagctcccagtcaataacttaggcagcctgcgcaaagcacggaagaccgttaagaaaattctgagcgatataggcctggagtattgcaaagagcatattgaagatttcaaacagttcgaacccaacgatttttacctgaagaacactacttgggaagatgtggggttgtgggatccctccctcacaaaaaatcaggactataggaccaaaccattttgttgcagcgcatgtccttttagttctaagttcttctccgcttacaaaagtcactttcgcaacgtgcattcggaagatttcgaaaaccgcattttgctaaactgcccctactgtacgttcaatgccgacaagaagacgctcgaaactcatatcaaaatctttcatgccccaaatgcatccgcgccatcttcatctctgtctaccttcaaagataaaaataaaaacgatggcctgaagccaaagcaggcagacagcgtggagcaggccgtgtactactgcaaaaagtgtacttatcgtgatccgctatatgaaatcgttagaaagcatatctatcgcgaacacttccagcatgtggcagcgccttatatcgcgaaagccggagagaagtccctgaatggcgcagtgcctctggggtctaacgcacgggaggagagctctattcactgcaagagatgtctcttcatgcctaaatcctatgaagccctcgtccaacacgtaattgaggatcatgagaggatcggttaccaggtgacagccatgatcggacacactaacgtggtggtgcctcgaagtaaacccttgatgctcatcgccccaaagccacaggataagaaaagcatgggcctgcctccaagaatcggatctctcgcttctggcaatgtaagaagcctgccatcacagcagatggtgaacaggttatctatccccaagcctaacctgaactccaccggcgtcaacatgatgagcagcgtgcacttacagcagaacaattacggtgtgaaaagcgtgggacagggttactctgtgggccagtctatgcggctggggctgggaggaaacgcccctgtttccatccctcaacagtcacagtcggtcaagcagctgttgcctagcgggaacggtcgatcctacggcctggggtcagaacagcgctctcaggctccagccaggtatagccttcagagcgcaaatgcctctagtctcagttcaggacagttaaagtctccatctctaagtcagagccaggcgagccgagtgctgggtcagtcatcctctaagcccgctgccgcagctaccggcccacccccaggaaatacaagcagcacccaaaagtggaaaatctgtacaatttgtaatgaactgtttcccgagaatgtatatagcgtgcacttcgagaaggaacacaaagccgagaaagtgcccgcagtggctaactatataatgaagatacacaatttcacttcaaagtgcctctattgcaatagatatctcccaaccgacaccctgctgaaccacatgttgatacacggccttagctgcccatattgtcgatcaacctttaacgacgtggagaagatggccgcacacatgcggatggtccatatagacgaggaaatggggcctaagactgattccaccctgagcttcgaccttactcttcaacagggaagccacactaacattcatctgctagtgactacttacaacctgagggacgctccagccgaaagcgttgcctaccacgcccagaacaatccgccagtgccccctaagccccagccgaaagtccaggagaaggctgatattcctgtcaaaagtagtccccaggcagctgtgccgtataaaaaagatgttggaaagaccttgtgtccactttgcttctcgatcctcaagggcccaatttcagatgcactcgcacatcatctgagggagcggcatcaggtgatccagacagtgcaccctgtagagaagaaactgacgtataagtgtatccactgtcttggagtgtacacctcgaatatgaccgcttcaacaatcaccctgcacctggtgcactgcaggggggtcggaaagacgcagaatggacaagataagaccaatgcacccagtcggctgaatcaatcaccatccttagctcccgtcaaaaggacatatgagcagatggagttcccactgctgaagaagcgtaagcttgacgacgactccgacagtcctagttttttcgaggaaaagcctgaagaacccgtggtgctcgccctcgatcctaagggacacgaagacgactcatatgaagctaggaagagcttccttactaaatacttcaacaaacagccttatccaacgcggagagagatcgagaagttggctgcgtccctctggctgtggaagtcagatatcgcttcccacttctctaataaaaggaaaaaatgtgtgcgggactgcgagaagtataagccgggagtactcttaggattcaacatgaaagagctgaataaagtgaaacacgagatggacttcgatgctgagtggctttttgaaaatcatgatgaaaaggattctagagttaacgctagcaaaaccgccgacaagaagctcaacttgggcaaggaggatgatagcagctccgactcatttgaaaatctcgaagaggaatctaacgaaagcggctctccatttgatccggtctttgaggtggagcccaagattagtaacgataaccccgaagaacacgttttaaaagtcattccggaggacgcatcagaaagcgaagagaagcttgatcaaaaagaggatgggtcgaagtacgagaccatacatctgacggaggaaccgacaaagctgatgcataatgcctccgactccgaggtggaccaggacgatgtggtcgaatggaaggacggcgcaagcccatcagagtccgggcctggcagtcagcaggtgtctgactttgaggacaatacttgtgaaatgaagcccggtacctggagtgatgagtcatcacagtcggaagatgctcgctcttcgaaacccgctgccaaaaagaaagccaccatgcagggagacagggaacagctcaagtggaaaaattcaagttatgggaaggttgagggattttggagcaaggatcagtctcaatggaagaatgcgagcgaaaatgacgaaagactatctaacccccagattgaatggcagaacagcaccatcgactctgaggatggggagcaatttgacaacatgacagacggagtggccgagcccatgcacgggagccttgccggtgtgaaattgtcttcccagcaggcatag

SEQ ID NO: 321395 - DNA, 3309 bp, Artificial Sequence
  derived and/or modified sequence
atgtttcaactccccgtgaacaacctgggatcgcttcggaaagccaggaagaccgttaagaagatcctttcagatattggactggaatactgcaaggaacacatcgaggatttcaagcaattcgagccaaatgatttttatctgaagaacaccacctgggaggacgtggggttatgggacccatcactgacaaagaaccaggactatagaacgaagcccttttgttgctctgcctgcccattttcctctaaatttttctccgcctacaagtctcactttcggaatgtccactccgaggacttcgagaacagaatcttgctaaattgcccttattgcacatttaacgcagacaagaaaactctcgagacgcacataaagatcttccacgcccctaacgcatctgcgcctagctcgtctctgtcaacctttaaggataaaaacaaaaacgacggtttaaagcctaagcaggctgattcggttgagcaggccgtgtattactgtaagaaatgcacctacagggacccgctctatgagattgtgaggaagcacatctaccgggaacatttccaacatgtcgctgctccctacattgccaaggccggagagaagagtctaaacggggctgtgcctctagggagtaatgctcgagaggagtcctccattcactgtaagcgatgtttattcatgcccaaatcgtatgaggccctggtgcagcacgtcattgaggatcatgaaagaattggttaccaagtgactgctatgattggacacactaatgttgtagtgcccaggagcaagcccttgatgctgattgcgcctaaaccccaggataaaaaatcaatgggactccctccacggatcggaagtctggcctcagggaatgttcgctccctgccctcacagcagatggtcaataggttgagcataccgaaacccaatcttaattctacaggagttaacatgatgtcaagtgtgcacctgcaacagaataactacggcgtgaagagcgtaggtcaaggctattccgttggccaatcaatgaggcttggtctgggaggcaacgcacctgtgtcgatcccgcagcagtcacagtccgtaaaacaattgctaccctctgggaatggcaggtcctatggactgggtagtgaacagaggagccaggcccctgccagatattctcttcagtcagctaatgccagctccctgtcatctggccaattaaaatcacccagccttagccagtctcaggcttctagagttttggggcaaagttccagtaaacctgcggctgccgcaacaggacctccaccgggtaatacaagcagcactcaaaaatggaagatttgcaccatctgcaatgaactctttcccgagaacgtgtactcggtgcacttcgagaaagagcacaaggctgaaaaagtaccggcagtcgccaattacatcatgaaaatccacaattttaccagcaagtgcctctactgcaaccgctatttgcctactgacacactcctcaatcacatgctaatccacgggttgtcatgcccatattgccgctccaccttcaacgatgtcgagaagatggctgctcacatgcggatggttcacatcgacgaggaaatggggcctaagaccgattccaccctgagctttgacctgactcttcagcagggatctcacactaatatacacctactggtgacgacctacaatctccgcgatgcacctgctgagagcgtcgcataccacgctcagaacaaccctcctgtccccccaaagcctcagcctaaagttcaggaaaaggctgatattcctgtgaagtcatctccccaggcagccgtgccctacaagaaagatgtgggtaagaccctgtgtcctttgtgtttttccattctgaagggcccaatctcagacgccctggcccaccacttgcgtgaacgacaccaggtaatccagaccgtgcatcctgtggagaaaaagctaacctataaatgcatccattgcttaggtgtttatacatcaaatatgactgccagcactattacccttcacttggtccattgtagaggcgtgggaaagacacagaacggacaggacaaaactaacgcaccgagcaggctcaatcaaagtccaagtctggcacccgttaagagaacctatgagcaaatggaattccctctgttgaagaaacgcaagctggacgacgacagtgactctccctccttttttgaagagaaacccgaagagcctgtagtgttggcactcgacccaaaaggtcacgaagatgactcatacgaggctaggaagtcctttctaaccaaatacttcaacaagcagccataccctactcggcgtgaaattgagaagttagctgcttccctctggctgtggaaatccgacatagcctcacatttcagcaataaaaggaagaagtgtgtgcgggattgcgaaaagtacaagccaggggttctcctcggcttcaatatgaaagagctgaataaggtgaaacatgaaatggattttgatgccgagtggttattcgagaatcatgatgaaaaagactcacgtgttaacgcttctaagaccgcagacaagaaactcaacttagggaaagaggatgatagcagctcagattcctttgaaaacttggaggaagagtcaaacgagtcaggctccccttttgaccccgtcttcgaggtggagccaaaaatttccaatgacaatcccgaggagcatgtgctcaaagtcatccccgaagacgcttcagaaagtgaggaaaagctcgatcagaaggaggacggttctaaatatgagacaatccaccttaccgaggaacccactaagctgatgcacaacgcctccgactctgaggtcgaccaagacgacgtcgtcgaatggaaggacggagcctccccctccgaaagcggtcccggatcccaacaggtgtcagactttgaagataatacctgcgagatgaagcccggtacttggtccgacgagagctcccagtccgaagacgcaaggtcctctaagcccgctgccaagaaaaaggccactatgcagggggaccgggagcagctcaagtggaagaatagctcctacgggaaagttgaaggcttctggtccaaggatcagtcccagtggaaaaacgccagtgaaaatgacgaaagactgtccaaccctcagatcgaatggcagaattctactattgacagcgaagatggtgagcaatttgataacatgacagatggcgtagctgagcccatgcacggctcactagccggtgtaaagctgtcttcgcagcaggcctag

SEQ ID NO: 321396 - DNA, 3309 bp, Artificial Sequence
  derived and/or modified sequence
atgttccaattgcccgtcaacaacctgggcagcctgaggaaggcccgaaagaccgtcaagaaaattctgtcagatatcggactggagtactgcaaggagcacattgaggacttcaagcaatttgagcccaatgacttttacctgaagaacaccacttgggaagacgtgggactctgggatcccagtttgacgaagaatcaggattacagaaccaagcctttctgctgttcggcttgccccttttcctccaaattctttagtgcttacaagagtcatttcagaaatgtgcactcagaagactttgagaatcggattctgcttaactgtccatactgcacattcaacgctgacaagaagacgctggagacccacatcaaaatcttccacgcccctaatgcttcagccccatcctctagcctgtcaaccttcaaagacaagaacaaaaatgatgggctgaagcccaagcaggcagatagtgtggagcaggccgtctattattgtaaaaagtgcacttaccgcgaccctctctatgaaattgtgaggaaacatatttaccgcgaacacttccaacatgttgcagctccctatatcgcaaaagccggagaaaagagtttgaacggcgctgtccccttgggttccaatgcccgagaagagtcatccatacactgtaagaggtgtttatttatgcccaagagttatgaagcgttggtccagcacgtaattgaggaccacgagagaatcggataccaagtgacggccatgatcggacacacgaacgttgtcgtgccacgatccaagccgctgatgttgatcgcccctaaaccgcaagataagaagagcatggggttgccaccgaggatcggttcactggcgtctggaaacgtgcgttctctgccttcgcagcagatggtaaacaggctgagcatccctaaaccaaatcttaatagcactggtgtcaatatgatgtcttcagtacacctccagcagaataactacggcgtcaagtcagtgggacagggctatagcgtgggccagtcaatgcgcctgggtttgggcggtaacgctccagtgagcattccccagcagagtcaatccgtgaaacagctgttaccctcgggcaatggacggagctacggtctagggtccgagcagaggagccaagcccctgcaagatatagcctgcagagcgctaatgcaagttctttatcttccggacagctgaagtcgccatccctgtctcagagccaagcaagcagggtgcttgggcaatcatcatctaaacccgcagccgcagctaccgggcctccccctgggaacacgagcagcacccaaaagtggaaaatctgcaccatctgtaacgagttgttccccgaaaacgtgtacagtgtgcacttcgagaaagaacacaaggccgagaaagttccagccgtggcaaattatataatgaagatccacaactttacttccaagtgcctttattgcaatcgttaccttcctactgacacgctgcttaaccatatgctgatccatggtcttagctgcccatattgtagaagcacctttaacgacgttgaaaaaatggcagctcatatgcggatggtgcacatcgatgaagagatgggccctaagaccgattccaccttgagttttgatcttaccctgcaacagggatcccatacaaacatccatctgttggtgacaacgtacaacctgagggacgccccagcggaaagcgtggcctatcacgctcagaacaatcctccagtgcctccaaaacctcagccgaaggttcaggagaaagccgatatcccagtcaagagctcaccccaagccgctgtaccctacaagaaagacgttgggaagaccctatgcccactctgcttcagtatcctgaagggacccatttccgacgcactggcacaccatctccgagagcgacaccaggttatccagacagtgcaccccgttgagaagaaactcacatataagtgcattcattgtctaggcgtctatacttctaacatgacagcgtcgacaattacgctgcacctggtccactgcagaggcgtaggcaaaacccagaacggccaagacaagacaaacgcccctagccgcctgaaccagagtcccagtttagcccctgtgaagcggacttatgagcaaatggaatttcctctcttgaagaagcgcaaactagacgacgactctgattctccttccttcttcgaagaaaagcccgaggagccagtcgtgctggcgctggatcctaagggccatgaggacgactcatatgaagctagaaagtccttcctgacaaaatacttcaacaaacagccttaccccaccaggagggagatcgaaaagttggcagcatccctttggctctggaagagcgacatcgcgtcccatttctcaaataagcggaagaagtgtgtgcgggattgtgagaagtacaaacctggggtgctgcttggctttaatatgaaggagctgaacaaagttaagcacgagatggatttcgacgccgagtggttgtttgaaaaccacgacgagaaggactctagagtcaacgcttccaagactgccgataagaaactgaaccttggtaaagaggacgattcctcgagtgattctttcgagaatctggaggaggagtcaaatgagtctggcagtccattcgatcctgtgttcgaagttgaacccaaaatttccaacgacaacccggaggaacacgtgcttaaagtcatccccgaagacgcttccgagtcagaggagaaactggaccagaaggaagatgggtcgaagtatgaaaccattcacctgaccgaggagcctacaaaactcatgcataacgcgtctgattccgaagtcgaccaggacgacgtggtcgaatggaaggatggggcttctccttctgaaagtggcccaggatcccagcaggtctctgacttcgaagataacacctgcgagatgaagccgggtacctggagcgatgaaagctctcagagcgaggacgccagatcatctaaacccgcagcgaagaagaaagcaaccatgcaaggcgacagagaacagctgaagtggaaaaactcatcctatggcaaggtagagggattctggagcaaggaccagtcacagtggaagaatgcaagcgaaaatgatgaaaggctatctaacccccaaattgagtggcagaattccacaatcgactctgaggacggagagcagtttgataatatgaccgatggcgtggcagagccaatgcatggttcattggctggtgttaaattaagctcccaacaggcgtag

SEQ ID NO: 321397 - DNA, 3309 bp, Artificial Sequence
  derived and/or modified sequence
atgttccagcttcctgtcaataacttgggcagcttacgaaaggcccggaaaactgtaaagaaaattctctcagatattggtctagaatactgtaaggagcacattgaggactttaagcagtttgaaccaaatgatttttacttgaagaacacaacttgggaggacgtcggtttgtgggacccaagtctgacaaagaatcaagattacagaaccaaaccattttgctgttcagcctgccccttttcttcaaagtttttcagcgcctataagagtcacttccggaacgtccacagtgaggatttcgagaaccgcatcttacttaattgcccctattgtacttttaacgcagataagaaaacattagagacgcacatcaagatatttcatgctccgaacgcctcagccccttcaagcagcttatcaacattcaaggataagaacaagaatgacggccttaaacccaagcaagcagacagtgtggagcaagcagtgtattattgcaaaaagtgtacatatcgggaccctctttatgagatcgtgcgaaaacacatctacagagaacacttccaacacgtggccgctccctacatcgcaaaagctggcgaaaaatcactgaatggggctgtgcctctggggtccaacgcgcgcgaagaaagcagtattcattgtaaaaggtgcctgtttatgcctaaatcttacgaagccctggtgcagcacgtaattgaagaccatgaaaggatcggctaccaggtgactgccatgataggtcatactaatgtcgtggtccctaggagcaaaccattaatgctgatcgcccctaagccacaggacaagaaatcgatggggctgccccctcgtatcgggagcctggcctcaggaaatgttagatccctgccctcacaacagatggtgaacaggctttccatccctaaaccgaacttaaactccacaggggtgaacatgatgagttccgttcacttgcaacagaacaattatggagtcaaatccgtgggccaggggtattcagtgggacagtcgatgaggctgggactgggtgggaacgctcctgtctcaataccccaacagtctcaatccgtcaagcaattgttgccatccggtaacggcaggagctatggcctcgggagtgagcaaagaagtcaagcgcctgcccgttactccctgcaatctgccaatgcatcatccctttctagcggacagctgaaatcgccctcccttagccagtcccaggcaagccgagtgttaggacagagctccagtaagcccgccgctgccgctaccggtccaccaccaggaaacactagttccacgcagaaatggaagatctgcacaatctgcaacgagctatttccagagaacgtgtacagtgtgcactttgaaaaagagcacaaagccgagaaagtcccagccgtggctaactacattatgaaaattcacaattttactagtaagtgtttgtactgtaataggtatttgcccactgacactctactaaatcatatgctaatacacggactgtcctgcccttattgccgctccaccttcaacgacgtcgaaaagatggctgcccacatgcgtatggtccacattgacgaggagatggggccaaaaacagacagcactctttcatttgaccttacgctgcagcagggctcccacacaaatatacacctgttagtcacaacatacaacctgcgggacgcacctgccgaatccgtagcttaccacgctcaaaataatcccccggtcccccccaagccacaacctaaagtgcaggagaaggcagacatcccagtgaagtctagcccccaggctgcagtaccctacaagaaggatgtgggaaagacgttgtgccctctgtgcttctcgatcctaaagggtccaatttccgatgctttggctcaccacctgcgcgaacgccatcaagtgatccaaaccgtccatccagttgagaaaaagttgacttataaatgtattcactgtctgggcgtctacacctccaatatgaccgctagcaccatcaccctccatctggtgcactgcagaggagtgggcaaaactcagaacggacaggacaaaaccaacgcaccaagccgcctcaatcagtccccatctctggcacccgtaaaacgaacctatgagcaaatggaatttccccttcttaaaaaacgcaagctcgacgacgatagtgattcccccagcttctttgaggaaaagccagaggagccggtcgtgttggccctggaccctaaaggccacgaggacgattcttacgaagccagaaagtcgttccttactaagtactttaataaacagccctatcctacccggagggaaatagaaaagctcgctgcctctctctggttgtggaaatcagacattgcttctcatttcagcaataaaaggaaaaaatgcgtccgtgattgtgagaaatacaagccaggggtgctgctgggattcaatatgaaagaacttaacaaagtgaaacacgaaatggacttcgacgccgaatggctgtttgagaaccacgatgaaaaggatagccgcgtcaatgcatcaaaaactgcagacaaaaagctcaatctgggtaaagaggatgatagcagcagcgatagtttcgagaatctggaggaagaatccaacgaaagcggtagccctttcgaccccgttttcgaagtggaaccgaagatcagcaacgataatcctgaagaacacgtgctgaaggtgattccagaagacgcttctgagtccgaggaaaagctcgaccagaaggaagatgggtctaaatatgaaactatacacctgacggaggaacccactaagctcatgcacaatgcgtcagattcagaggtggaccaggacgatgtggttgagtggaaggacggcgcctccccctctgagagcggtccaggctcccaacaggtgagcgatttcgaggacaatacgtgtgagatgaaaccaggcacgtggagtgatgaatccagccagagcgaggatgccagaagcagtaagcctgcagccaaaaaaaaagccaccatgcagggcgatagagagcagttaaaatggaagaacagctcttatggaaaagtcgaaggcttctggtctaaagaccagagccaatggaagaacgccagtgaaaacgatgaaagactgtccaacccacaaatcgagtggcagaatagcaccatagacagtgaagacggggaacagtttgacaatatgacagacggcgtggctgagccaatgcatggctccctggcaggcgtgaaactgagtagtcaacaggcctag

SEQ ID NO: 321398 - DNA, 3309 bp, Artificial Sequence
  derived and/or modified sequence
atgttccagctgcccgtcaataatttgggaagcttgaggaaagcacgcaaaaccgtaaagaagatactctctgatatcggtctcgagtattgcaaagagcacatcgaggactttaaacagttcgagccgaacgatttctacttaaagaatacaacctgggaggatgtgggtctgtgggatcctagcctgaccaaaaatcaagactacaggacaaaaccattctgttgcagtgcgtgcccttttagctctaagtttttttccgcatataaatcccacttcaggaatgtccactctgaggacttcgaaaacaggatcttgctaaattgtccctactgcaccttcaatgcagacaaaaagacgctggagacacacatcaaaattttccacgctcccaatgccagcgccccttcatctagcctgagtacattcaaggacaagaacaaaaacgacggtcttaagcccaagcaggctgattctgtagagcaggcagtctattactgtaagaagtgcacataccgcgacccattatatgagattgtgcgaaagcacatctaccgtgaacatttccagcatgtggccgccccatatattgcaaaggctggagaaaaaagcttgaatggagctgtgccgttaggatccaatgcgagagaagagtccagtattcactgtaagcggtgtttgtttatgcccaagagttatgaggccctggtccagcacgtgatcgaggatcatgagagaattggctatcaggtgactgctatgatcggccacacaaatgtggtcgtgccccgctccaagcctttgatgcttatagcccccaaacctcaggataaaaaaagtatgggtctgcctccacggataggttctctggcgtccggtaatgtgaggagtctgcccagccagcagatggtaaatcgcctcagtatcccgaaacctaacctaaacagcacgggagttaacatgatgagcagtgtgcacttgcagcagaacaactacggcgtgaaatcagtcggtcagggctatagtgtgggacaaagtatgagattaggtctaggcggcaacgcgcccgtgtctatacctcagcagtctcagagtgtcaagcagcttctgcccagcggaaatggacgaagttatggccttggctctgagcaacggtcacaggctccagccagatactccctccagtcagccaatgcaagcagtcttagttccggccagttgaagtctccttccctatctcagtcccaggcctccagggtgttgggacagtcctcatccaaaccagccgccgcagcgacagggcccccccccggaaatactagtagtactcaaaaatggaaaatctgcacaatctgcaatgaactgttcccggagaatgtctactctgttcattttgaaaaggaacataaagctgaaaaagtgccagctgtggccaattatattatgaaaattcataactttacgtccaagtgtctttattgcaacaggtatttgccgacggacaccctattgaaccacatgctgatccatggattgagttgcccatattgccggtccacatttaatgacgtggaaaagatggctgcgcacatgcgcatggtgcacattgatgaggaaatgggccctaaaacggattccactctgtcattcgaccttaccttgcagcaaggctctcacactaatattcacctgctggtgaccacatacaatctgcgggatgcccctgccgagtccgtcgcttatcacgcccagaacaatcctcctgtgccacccaaacctcagcctaaggtgcaagaaaaggctgacattcccgtgaaaagtagccctcaagcagccgtaccctacaaaaaggatgtgggcaaaactttgtgccctctctgcttttccattctcaagggccctatctcagacgcgctggcccaccatcttagggaaagacaccaggtcattcagactgtccatccagtcgagaaaaaactaacatacaagtgcattcactgcctcggtgtatatacgtccaacatgaccgcctctaccataactctgcacttggtgcattgccgaggagttgggaaaacccagaatggccaggacaagaccaatgccccctctcgcctgaaccaatcacccagtcttgcccccgtgaaacgaacttacgagcagatggaattccccttgcttaagaagaggaagctggatgatgactccgatagcccttcttttttcgaagagaaacctgaggaacccgtggtgcttgctttagacccaaagggccacgaggacgattcgtatgaagcacgcaagtctttcctaactaaatattttaacaagcaaccttatcctactcggcgtgaaatcgagaaattagccgctagtctctggctctggaagtccgatatcgctagtcacttctctaacaagcggaaaaagtgtgtgcgggactgcgaaaagtacaaacccggcgtgctgctggggttcaacatgaaagaactaaacaaggtcaagcatgaaatggactttgacgcggaatggctgtttgaaaatcatgacgagaaagactcgagagtaaatgctagtaagacagccgataaaaaactgaatctcggaaaagaggatgatagcagctcagacagctttgaaaatttagaggaggaatccaatgagtccgggtccccattcgatccagtgttcgaagtggagcccaagatctccaacgataacccagaagaacacgtgttgaaagttataccggaagatgctagcgagagtgaggagaaactggaccagaaagaagacggatctaagtatgagactatccatctcactgaagagccaactaaattaatgcataacgcctctgacagcgaggtggaccaggatgatgttgtcgaatggaaggatggagcatcgccttcagagtcaggtcctggaagtcaacaggtcagcgattttgaggataacacatgcgaaatgaagccaggcacatggagcgacgagtcatctcagtccgaggatgcccgcagctcaaagcctgcagctaagaaaaaagccaccatgcagggcgatcgggagcagctcaagtggaaaaacagttcgtatggaaaggttgagggtttctggtctaaggatcagtctcaatggaaaaatgccagtgagaacgatgaaaggctctcaaatccccagatagaatggcaaaactctaccattgacagcgaagacggcgagcagttcgacaatatgaccgacggagttgcagagcccatgcatgggtccctcgccggtgtgaaattatctagccagcaggcctag

SEQ ID NO: 321399 - DNA, 3309 bp, Artificial Sequence
  derived and/or modified sequence
atgttccaactcccagtgaataatctcggaagtttaagaaaagcgagaaaaactgtgaagaagattctgtccgatattggcttggagtattgcaaagagcacattgaggactttaagcagtttgagccaaatgatttttatttgaaaaataccacatgggaagacgtgggcctgtgggatccttccctcacaaaaaaccaggactaccgcaccaagccattctgctgctcagcgtgtccattcagcagcaaatttttctctgcttacaagtcccattttcgaaacgtccattcagaggactttgaaaacagaatactactcaattgcccatactgtacctttaacgcagacaagaaaactctggagactcacatcaaaatctttcacgcgcccaatgccagcgctccgtctagctctctatcaacatttaaggacaaaaataagaatgacggactgaagcctaaacaggcggactctgtggaacaggctgtgtattactgtaaaaaatgcacctaccgggatcctctgtacgagattgttcgaaaacatatatatcgggagcattttcagcacgtggcggccccttatattgcaaaagccggtgaaaagtctttgaacggagccgtaccgttgggtagcaacgcccgcgaggaatcttccatccactgtaaacgatgtctgttcatgcccaaatcctacgaggccttggtgcaacatgttattgaagatcacgagaggatcggctaccaggtgacagcaatgattggtcatactaatgtggtagtgccccgctccaagcctcttatgctcattgctcctaaaccccaggacaagaaaagtatgggactgcctccccggattggttcactcgcctcggggaacgtgcggtctcttccaagccagcaaatggtcaaccgcttgtcaattccgaaaccaaatttaaatagtaccggcgttaacatgatgtctagcgttcacctgcagcagaataattacggggtgaaatctgtgggtcaaggctactccgtgggtcaatcgatgaggttgggactgggcggtaacgctcctgtctccattcctcaacaatcccagtctgttaaacagctgttgccttctggcaatggccgatcttacggccttggatcagagcagagatcccaggcgccagcccgatattccctgcaatccgccaacgcatccagtcttagctctgggcagctcaaaagtccctcccttagccagtcgcaggcgagccgcgttctcggccagagttcctccaaacctgccgcggctgcaacaggtcccccacctgggaacacctcgtccacgcagaaatggaagatttgtactatctgcaacgagctctttcccgagaacgtgtactcagtccatttcgaaaaagaacataaggccgagaaagtccccgccgtcgccaactacatcatgaaaatccacaattttacatccaaatgcctgtattgtaatcgttaccttccaaccgatacacttctcaaccacatgcttattcacggactctcctgcccctactgcaggtcgaccttcaacgacgtggagaagatggcagctcatatgaggatggttcacatcgacgaagaaatgggccccaagacagattcaaccttaagcttcgaccttaccctccagcagggcagccataccaacatccatctgttagtgaccacctataacctccgcgacgccccagctgagagcgtggcataccacgcgcagaataacccacctgtgcccccgaagccccaacctaaagtacaggaaaaggctgacatcccggtaaagtcctcgccccaagcagcggttccctacaagaaggatgtaggcaaaacactgtgcccactctgcttctcaattctgaaggggcccatatctgatgcactcgcccatcacctgcgggaacggcaccaggttatacagactgtgcaccctgtggagaaaaaactgacttataaatgcatccactgtctgggcgtttatacttccaacatgaccgcctcaaccatcactcttcacctcgtccattgccgcggtgtgggcaagacccaaaacggtcaggacaaaacaaatgccccaagcaggctcaatcagtctccatcactagcccctgtgaagagaacatacgagcaaatggaattccctttattaaaaaaaagaaagctagatgatgactcagactcccctagcttctttgaagaaaagccagaggagccagttgtgctggcattggacccaaagggacatgaagatgactcttatgaagccagaaagagttttctgactaagtactttaacaagcagccctacccgacaaggagagagatagaaaaactggccgcatcgctctggttgtggaaaagtgacattgcgtctcatttctcaaacaagcgtaagaaatgcgttcgcgactgcgagaaatacaagcccggcgtgctcctggggtttaacatgaaggaactgaacaaagtgaagcatgagatggatttcgacgcggagtggcttttcgaaaatcacgacgagaaagattccagggttaacgcttctaaaacagcagacaagaaactgaacctaggtaaagaagatgattcttcctccgactcctttgaaaatctcgaggaggaaagtaatgaatccggctcacccttcgatcctgtgtttgaagttgagcctaagattagcaatgacaatcctgaagagcacgtcctgaaagtcatacccgaagacgcctcggagagtgaggaaaaactggaccagaaagaagacggtagcaagtacgaaacgatccacctgacagaggagcccaccaagttaatgcataacgcctcagacagcgaggtggatcaagatgatgtggtcgagtggaaggacggagcgtcaccgagtgaaagcgggcctggtagccagcaggtctcggattttgaagataacacatgtgagatgaaacctggcacctggtctgatgagtcaagtcaaagcgaggacgcgcggtccagcaagccagctgcgaaaaaaaaggctacgatgcagggagaccgcgagcagttgaaatggaaaaactcatcttacggtaaggtggagggcttttggagcaaggaccagtctcaatggaaaaacgcatccgagaacgacgagaggctgagtaacccccagattgagtggcaaaactctactatcgattccgaggatggcgaacagtttgataacatgacagatggggtggcagagcccatgcacgggagccttgcgggggtcaagctgtcaagtcagcaagcctag

SEQ ID NO: 321400 - DNA, 3309 bp, Artificial Sequence
  derived and/or modified sequence
atgttccaactgcccgtcaacaatttaggatctctgcgcaaagcaaggaagacggtgaaaaagattctttccgacattggacttgagtactgtaaagagcatattgaggacttcaagcagtttgagcccaacgatttttacctgaaaaacactacttgggaagatgtggggttgtgggatccttccctcaccaagaaccaagattaccggacaaaaccgttctgctgtagcgcatgtcctttttcatctaaattcttcagcgcatacaaatcccacttccgcaatgtccactctgaagatttcgagaataggattctcttaaactgcccctattgcaccttcaacgccgataaaaaaaccctcgaaacacatatcaaaatctttcacgcgcctaatgcatcagccccatcctcaagtctctcaaccttcaaagacaagaacaaaaatgatgggctgaaaccaaaacaagccgactccgtggaacaagccgtgtattattgtaagaaatgtacctatagggacccactatacgagatcgttcggaaacacatctaccgcgaacatttccaacacgttgcagctccctatatcgctaaggccggcgagaagagtctgaatggcgccgtgcccttaggctctaatgcacgcgaggagtcctccattcactgcaagcggtgtctcttcatgcccaagtcgtacgaagccctggttcaacatgtgattgaggatcacgagagaatcgggtaccaagtgacggccatgattggacatacgaacgtagtggtgcccagatctaaacctctgatgctgattgcccctaagccacaggataaaaaaagtatggggctaccaccgcgtatcggatccctggccagtgggaacgtgcggtcccttccctctcagcagatggtcaatcggctttcaattcccaagcctaacttgaacagcacgggcgttaatatgatgagcagtgtccatctccagcagaataattacggggtgaaatctgttggccaaggatattctgtggggcagagtatgcgattagggctcggtggtaacgcacctgtgtcaatcccccagcagagccagtccgtcaaacagctacttccatccggtaatggcaggtcttatggactcgggtctgagcagcggtcacaagcaccagcaaggtactcccttcagtcagccaatgccagtagcctatctagcggacagttgaaatcaccaagcctgtcacagtcccaggctagtagagtattgggccaatcatcctcaaaacccgccgcagctgcaactggccctccgcctgggaacaccagcagcacccagaaatggaaaatttgtactatctgtaacgagttgttcccagagaacgtttatagcgtgcacttcgaaaaagaacacaaggcagagaaggtgccagctgtggctaactatatcatgaaaatacataattttaccagcaaatgcctgtactgtaaccgttacctaccaaccgacacattgcttaaccatatgctgatacacggtctctcatgtccttactgtaggagcaccttcaacgatgttgaaaagatggccgcccacatgagaatggtgcatatcgatgaagagatgggtcccaagacggatagcacccttagtttcgacttaaccctccagcaaggttcccataccaacatccacctgctcgtgacaacatataacctgagagatgccccagcggaatctgtggcataccacgctcagaacaacccccctgtcccccccaaaccacaacccaaagtgcaggagaaggcagatatccctgtaaaatctagtcctcaggcggctgtgccctataaaaaggacgttggcaagactctatgccccctttgcttttctatcttgaagggtcctatttcagacgccctggcacatcatctgcgcgaaaggcaccaggtgatccagaccgtgcacccagtggagaagaagctgacctacaagtgcatccactgtctcggagtctacacgtccaacatgactgccagcaccatcacattacatctagtgcattgcaggggcgtcggcaaaacccaaaacggtcaggataagacaaacgctccaagccgtctgaaccagagtcctagtctagctcctgtgaaacggacctatgagcaaatggaattccctctcttgaaaaagcgcaaactcgatgatgactctgattccccttcattctttgaagagaagccggaggagcctgtggtgctcgccttggatcctaaaggccacgaggacgactcatacgaggcccgcaaatcattcctcaccaaatacttcaacaagcagccctaccccacccgtcgcgaaatcgagaagctcgccgcgtctctgtggctctggaagagtgatatcgcttctcacttctccaataaaagaaagaagtgtgtacgcgattgtgagaaatacaaaccgggggttttactgggatttaacatgaaggaactcaacaaagtgaaacatgaaatggactttgatgccgagtggctcttcgaaaatcacgacgagaaagattcccgggtgaacgcctcgaagaccgccgacaaaaaactgaatctcgggaaggaagatgattcgagcagtgattcctttgagaacctcgaggaggagagcaacgaatcagggtccccatttgaccccgtttttgaggtggagcccaaaattagcaacgacaaccccgaagagcatgtacttaaagtgattcccgaggatgccagcgaatccgaagagaaactggatcagaaggaggatggtagtaagtacgaaactattcatctcaccgaggagccgacaaaattaatgcataacgccagtgattctgaagtggatcaagatgatgtggttgaatggaaggacggggctagcccttcagagagcggccccggttctcagcaggtgtcagattttgaagacaacacttgtgaaatgaagcccggcacctggagcgacgaaagctcgcagagtgaagacgctagatcttccaaacccgctgcaaagaaaaaagccacgatgcagggcgatcgcgagcaactcaagtggaaaaactccagctacgggaaagtagaaggattctggagcaaagatcagtcacagtggaaaaatgcatcagagaatgatgaacggctctcaaatccccagatcgagtggcaaaatagtaccatcgactccgaagacggtgagcaatttgataatatgaccgacggcgtagccgagcccatgcatggatcactggccggggttaaactctcaagtcagcaagcctag

SEQ ID NO: 321401 - DNA, 3309 bp, Artificial Sequence
  derived and/or modified sequence
atgttccaactgccagtcaataaccttggatccctccgtaaggcgagaaagaccgtgaagaaaattctgtctgatattggactcgaatactgtaaagaacacatcgaggacttcaagcaatttgaaccaaatgatttttacctaaaaaacacaacctgggaagacgtgggattatgggacccaagcttgactaaaaatcaagattatcggactaagcccttttgttgcagcgcatgccccttctcatccaagttctttagcgcttataaatcacacttcagaaatgtccattcagaggatttcgaaaatcgcatcctccttaactgtccctactgcacattcaacgccgataaaaaaaccctggaaactcatattaaaatcttccacgctccaaatgcctctgctccctctagtagcctgtccacttttaaagataagaataagaatgatggattgaaaccaaagcaggccgactccgtagaacaggctgtgtactactgtaaaaagtgcacctacagagaccccttgtacgaaattgttagaaagcacatctacagagagcactttcagcatgtggccgcaccttatatcgctaaagctggagaaaagtcattaaatggtgccgtgcctttggggagcaacgccagagaagagtcctccattcactgtaagcgatgtctgtttatgcctaagtcctacgaagcccttgttcagcacgttattgaggaccatgaacggattggataccaggtgaccgctatgatcgggcatacaaacgtggtggttccacggtcaaagcctctgatgctaatagctccgaagcctcaggacaagaaatctatgggtctccctccccgcataggaagtctggccagtggaaatgttaggtcccttccttcgcagcaaatggtaaatcgactgtctattccaaaacccaacctcaattctacaggagtaaacatgatgtcttccgtgcacctgcaacagaacaattatggagtaaagagcgtcgggcagggatactcagttggtcaaagtatgcgcctcggcctcgggggaaatgcacctgtcagcattcctcagcaatcccaatcagtgaagcaactcttacccagcgggaacggcaggagctacggtctagggtctgaacagagaagtcaagcaccagcccgctactctctccagtctgccaatgcttcctcactttcaagcggtcaactaaaaagtccctctctgtctcaatctcaggcctcaagagtattaggccagtcttcctctaaacctgctgctgccgcaactggacccccccccggcaacaccagttctacccagaagtggaagatttgtacaatttgtaacgaacttttcccagaaaatgtatactctgtacattttgaaaaggagcacaaagctgagaaggttcctgctgtcgcaaactatatcatgaagattcacaattttacttctaaatgcctttactgtaaccgatatttacccacggacactctactaaatcatatgctaatacacggactgtcctgcccttattgccgctccaccttcaacgacgtcgaaaagatggctgcccacatgcgtatggtccacattgacgaggagatggggccaaaaacagacagcactctttcatttgaccttacgctgcagcagggctcccacacaaatatacacctgttagtcacaacatacaacctgcgggacgcacctgccgaatccgtagcttaccacgctcaaaataatcccccggtcccccccaagccacaacctaaagtgcaggagaaggctgacatcccagtcaagagctcaccacaggcagccgttccatacaaaaaggatgtgggtaagacgctgtgtcctctgtgcttcagcatcctcaagggtccaattagcgatgccctagcccaccacttacgtgagagacaccaggtcatccaaaccgttcaccccgtggagaagaaactcacctacaagtgcattcactgcctaggcgtctacacatctaatatgaccgcttcgaccatcacacttcatctcgtccattgcagaggtgtgggcaaaactcaaaacggacaagacaagacgaatgccccatcccggctcaaccagagtcctagcctcgcacctgtcaaaagaacgtacgagcagatggaatttccccttttaaagaagcgtaaactcgacgatgatagcgacagccctagtttttttgaagaaaagcctgaggaacccgtcgtgctggcattagatcccaaaggtcatgaagatgattcatatgaggcccggaagtcttttcttacaaagtactttaataaacagccgtatcctacacgccgcgaaattgaaaaacttgccgcctcactctggctgtggaagagcgacattgcttcccacttcagcaataagagaaaaaagtgtgttagggattgtgaaaaatacaaaccaggcgtgctgttaggcttcaacatgaaggaactgaataaagtgaaacacgaaatggacttcgacgctgaatggctgttcgaaaaccatgatgaaaaagattctcgagtgaacgcgtccaagaccgccgataagaaactaaacctggggaaggaggacgactcatcttcagacagttttgagaacctagaggaagaatctaacgagagcggctcaccctttgatccagtgtttgaagttgaacctaaaattagcaacgataaccccgaggagcatgtgttgaaggtgatccctgaggacgcgtctgaaagcgaagagaaactggatcagaaagaggacggatctaaatacgagactattcatctgaccgaggaaccaacaaaactgatgcacaacgctagcgatagcgaagttgatcaagatgatgtcgttgagtggaaggacggagcatcccccagtgaatccgggcccggcagccagcaggtttctgactttgaggataatacatgcgagatgaagcctggcacatggagcgatgagagctcccagtcagaggacgctaggagctccaagcccgctgccaaaaaaaaggctacaatgcagggggatcgagaacaactgaagtggaaaaactcaagttacggcaaggtggaaggattctggtcaaaagaccaatctcagtggaaaaatgcttctgaaaatgatgagcggctgtcgaatccccaaatcgagtggcagaattcaacaatagactccgaagatggcgaacagttcgataatatgacagacggtgtcgcggagccaatgcatggatcactggctggagttaaactttcatcccaacaggcgtag

SEQ ID NO: 321402 - DNA, 3309 bp, Artificial Sequence
  derived and/or modified sequence
atgttccagttacccgttaataatctgggaagtctgcgtaaagcgcggaaaaccgtcaaaaaaatcctctccgatattggtctggaatactgtaaggaacatatcgaggattttaaacaattcgaacctaacgatttttatttgaagaacaccacatgggaagacgtcggcctgtgggacccctccctcacgaaaaatcaggattaccgaactaaaccattttgttgctcagcatgcccttttagctctaaattcttctccgcctacaagagtcactttcgaaacgtccactccgaagacttcgagaacaggatcctcctgaactgtccatactgtacctttaacgccgataagaagactctggagactcacattaagatcttccatgccccaaatgcgagcgcgccgtcctcaagcctgagcacttttaaagacaaaaacaaaaacgacggactgaagcctaaacaagccgactctgtggaacaggcagtctactattgcaaaaagtgtacctacagagatccactatatgagattgtgcgtaaacatatatacagagaacacttccagcatgttgccgcaccctacattgccaaagccggcgagaagagtctgaatggcgccgtcccgctgggcagcaacgccagagaagaatctagcattcattgcaaaaggtgtttgttcatgccaaaaagctacgaggctttggtccagcatgtcatcgaagaccatgagcgaatagggtatcaagtaaccgccatgatcggacacacaaatgtggtggttccccgttccaaacccctaatgctcattgcccccaaacctcaagataagaagtccatgggccttcccccccgcatcggttcattagccagcggtaatgtaaggtcccttccctcccagcaaatggtcaatcgactgtccatccccaaacccaacctgaatagcacaggggtgaatatgatgtcctcagtgcatctccaacagaataattacggagtaaagtctgtggggcagggatactccgttggtcaatccatgagactcggactgggcggtaacgctccggtctcaattccccagcagtcacaatcagttaagcagcttttgccatctggcaacggaaggtcgtacggactgggaagcgaacaacgaagtcaagcgcccgctcgttatagcctccaatccgcgaacgctagcagtttatctagtggacaactgaaatctcctagtctgagtcaatcgcaggcctcccgtgtcctgggccaatcctcttcaaaacccgctgccgccgccaccggccctcctcccgggaatacttcaagcacacagaaatggaagatctgcactatttgtaacgagctgtttccagagaatgtctactccgtccacttcgaaaaagaacataaggctgaaaaggtccctgccgtagccaactatatcatgaagattcacaatttcacgagcaaatgcctatactgtaatcgctatctacctaccgacaccttacttaaccacatgctgatccatggcctgtcctgtccatattgtcgctctacctttaacgacgtggagaaaatggcagcgcatatgcgtatggttcatatagatgaagagatgggccctaaaacggactcaacgctttcctttgacttaacacttcagcagggatcccacacaaacatccatctgcttgtgacaacttataatctccgcgatgcacctgccgagagtgtcgcttaccacgctcaaaataacccaccagtaccccctaaaccacagccaaaagtgcaggagaaagctgatattcctgtgaaatcaagcccacaagcagctgtgccttacaagaaagatgttggtaaaaccttgtgcccgctatgtttttcaatccttaaaggccccatttcggacgccctggcccaccacctgagagaacgccaccaggttatacagacagtccatcctgtggagaaaaagctgacctacaaatgcattcattgcctcggtgtgtatacttcgaacatgacagccagtaccatcaccttgcatttggtccactgcagaggcgtgggaaagacccagaacggccaagacaagacaaatgccccctctcgcctgaaccaatcacccagtcttgcccccgtgaaacgaacttacgagcagatggaattccccttgcttaagaagaggaagctggatgatgactccgatagcccttcttttttcgaagagaaacctgaggaacccgtggtgcttgctttagacccaaagggccacgaggacgattcgtatgaagcacgcaagtctttcctaactaaatattttaacaagcaaccttatcctactcggcgtgaaatcgagaaattagccgctagtctctggctctggaagtccgatatcgccagtcacttcagcaacaagcggaagaagtgcgttcgggactgcgaaaaatataagcccggtgtactccttggatttaacatgaaagaacttaacaaagtaaaacacgagatggactttgatgctgaatggctgttcgagaatcacgatgaaaaagatagtagagtaaatgctagcaagaccgcagataaaaagttaaatctaggaaaagaggatgattctagttctgactcttttgaaaacctcgaggaggaatccaatgaaagcggtagcccattcgacccagtgtttgaggtagagcccaagatctccaacgataacccagaagaacacgtgttgaaagttataccggaagatgctagcgagagtgaggagaaactggaccagaaagaagacggatctaagtatgagactatccatctcactgaagagccaactaaattaatgcataacgcctctgacagcgaggtggaccaggatgatgttgtcgaatggaaggatggagcatcgccttcagagtcaggtcctggaagtcaacaggtcagcgattttgaggataacacatgcgaaatgaagccaggcacatggagcgacgagtcaagccaaagcgaggacgcacgcagcagcaaaccagcagctaaaaaaaaggcaacaatgcaaggagaccgagagcagctgaagtggaaaaatagcagctatggtaaggtcgagggcttttggagtaaggatcagtcacagtggaagaatgcctccgaaaacgatgagcgattgtccaacccacagatcgaatggcaaaacagcactatagattctgaggacggtgaacagtttgataatatgacagatggagttgctgagccaatgcatggcagcctggccggagtcaaactgagcagccagcaggcctag

SEQ ID NO: 321403 - DNA, 3309 bp, Artificial Sequence
  derived and/or modified sequence
atgttccagctccctgtaaacaatttgggaagcctccggaaagccagaaaaaccgtgaaaaaaattttaagtgacataggtctggaatattgtaaagaacacatagaagatttcaaacaatttgaaccaaacgatttttaccttaaaaacacaacatgggaagacgtcggattgtgggatccttctctgaccaaaaatcaagactatcggaccaaacctttctgctgttcagcctgtcctttcagcagcaagttctttagcgcgtataagtcccatttcagaaacgtgcacagcgaggatttcgagaacagaattttactcaactgcccatactgtacattcaacgcggacaagaagacactggaaacgcacatcaaaattttccacgcccccaacgcctcagcgccttcatcatcactttcgacctttaaggacaaaaataaaaatgatggactcaagcctaaacaggccgactctgtcgagcaagccgtttattactgtaagaagtgcacgtaccgcgaccctttatacgagatcgtccgaaaacatatctaccgagaacactttcaacacgtcgcagccccttacattgctaaggcgggggaaaaatcgctgaatggagccgtgcccttaggtagtaacgcaagagaggaatccagcattcattgcaaacggtgtctcttcatgcccaagtcctacgaggctttagttcagcatgtaatcgaagaccatgagcgcataggctaccaggtgaccgccatgatagggcatactaacgtcgttgtgcccagaagcaaacccctcatgctaattgcccctaaaccacaagacaagaaatcaatgggacttccaccaagaatcggctcacttgccagcgggaacgttagaagcctgcctagccagcagatggtgaaccgcctcagcatccccaaaccgaatttgaatagcaccggagtaaatatgatgtcaagcgtccatctgcagcagaacaactatggtgtgaagtccgtgggccaaggatattctgtgggacagagcatgcggttggggcttggcggaaatgcccctgtaagcatccctcagcaaagtcagagcgtaaagcaactccttccatccggcaacggcagatcctatggcttgggcagtgagcaaaggtcccaggcgccagccagatacagtctccagtcagccaatgcttcgagtctttcctcaggacaactaaaatcacccagcctgtcccaatcacaagccagtcgggtcttaggtcagtctagttcaaagcccgccgccgctgctaccggtcccccccccggtaacacttcctccacccagaaatggaagatttgtacaatctgcaacgagctgttccccgagaacgtgtatagtgttcacttcgagaaagaacacaaggccgaaaaggtgcctgcagtagctaactacatcatgaagattcacaacttcaccagcaagtgcctgtactgtaaccgctaccttcctacagataccctactcaatcatatgttgatccacgggctgtcatgtccctactgccgctccacttttaacgatgtcgagaaaatggcagcacatatgcggatggttcatattgatgaggaaatgggcccgaagaccgattccactctcagttttgacttgacgctccaacaaggatcccacaccaatattcacctcttagtaactacgtataacctaagggatgcaccagcagagtcagtggcttaccacgcccagaacaacccccctgtgccacccaagcctcagccaaaagttcaggagaaggctgatattccagttaaaagtagcccgcaggccgcggtcccttacaaaaaggatgtaggtaagactttatgtccactgtgtttctccattctaaaagggcccatcagcgatgctttagctcaccacctacgcgaacgacaccaagttatccagaccgtgcaccccgtggagaaaaaactgacctataagtgcatccactgtctgggagtttatacatccaatatgactgcctcgactattaccttacacctggtgcattgtagaggggttggcaagacccaaaatgggcaagacaagactaacgcacccagcaggttaaatcagtcaccttctttggccccagtgaaaagaacatatgagcagatggagtttcctttgctcaagaagcgaaagctcgatgacgatagtgacagcccctcttttttcgaagaaaaaccagaagaacccgtagtattagctctggatcctaaaggccatgaagacgattcttacgaggcaaggaagagtttcctgacaaaatatttcaataaacagccttatcctaccagacgcgaaatagaaaaactggccgcatctttgtggctttggaaatctgacattgcatcccatttttccaacaagagaaagaaatgtgtcagggactgtgagaaatacaagcctggcgtgctgcttggcttcaacatgaaggaactgaacaaagtcaagcatgagatggattttgacgccgaatggttgtttgaaaaccacgacgagaaggatagtagagttaatgcttctaaaacggccgacaaaaagctgaatctcggcaaggaggatgatagtagtagcgacagtttcgagaacctagaagaggaaagtaacgaatccggctcgcccttcgatcctgtgttcgaggtagagcctaagatttctaatgacaaccctgaagagcacgtgctgaaggtaattcctgaggatgcgtctgagtcagaagaaaaactcgatcaaaaagaagacggttcaaagtatgagacaatccatctgaccgaagagccaactaagttaatgcacaatgcttccgattctgaggtggatcaggatgacgttgtcgaatggaaggatggagcgtcgccaagtgaatccggcccgggctcccaacaagtgagcgactttgaagataatacttgcgaaatgaaacctggtacctggtcggatgagagctcacaaagcgaggacgcacgctcctctaagccagctgctaaaaagaaagccacaatgcagggggatagggaacagcttaaatggaagaacagttcatacgggaaggtcgagggtttctggagcaaagaccagagccagtggaagaatgcatccgaaaacgacgagagactgagtaatccacagattgaatggcagaattcaaccattgactccgaagatggggaacaattcgataatatgacagacggcgtggccgagccgatgcacgggtccttggcgggtgtgaagctgagcagccagcaggcctag

SEQ ID NO: 321404 - DNA, 3309 bp, Artificial Sequence
  derived and/or modified sequence
atgttccagcttcccgtgaataacctgggttccctgcgtaaggcgagaaaaactgtaaagaagatcctgagtgacattggcctggaatattgcaaggagcatatcgaggacttcaagcaattcgaaccaaacgacttttacctgaaaaatacgacctgggaggacgttgggctctgggaccccagtctgactaagaatcaagactatcgcactaaacctttctgctgttccgcatgccccttctctagcaaattcttctccgcatacaaatcacattttcgtaacgtccactctgaagacttcgagaaccggatactgctgaactgcccttattgtacttttaatgctgacaagaaaaccctcgagacacacatcaagatttttcacgcaccgaacgcttccgcaccgtcctcctcactttcaacttttaaagacaaaaacaagaacgatggcctaaaaccaaaacaagctgatagtgttgagcaagcagtgtactactgtaagaaatgtacgtaccgcgatcctctctacgaaattgttaggaaacacatctaccgagaacacttccagcacgtcgctgcgccgtacatcgctaaagccggggagaagtcgctgaatggagccgtgcccctcgggtctaacgctagagaggagagctctattcattgtaagcgatgtttatttatgccaaagtcatatgaggcgctcgtccaacatgtaatcgaggaccacgagagaattggctatcaagttactgctatgatcggacacacaaatgtcgttgtacctcgttcaaagccgctgatgttgatagcacctaagccacaggacaagaaaagtatgggcttacccccacgaatcggaagtctcgctagtggaaatgttcgctcactcccatctcagcagatggtcaatcggctttcaattcccaagcctaacttgaacagcacgggcgttaatatgatgagcagtgtccatctccagcagaataattacggggtgaaatctgttggccaaggatattctgtggggcagagtatgcgattagggctcggtggtaacgcacctgtgtcaatcccccagcagagccagtccgtcaaacagctacttccatccggtaatggcaggtcttatggactcgggtctgagcagcggtcacaagcaccagcaaggtactcccttcagtcagccaatgccagttcactctcctccggtcagcttaagagccccagtttatcccaatctcaagccagccgggtgttaggacaatcttcatccaaaccggcagcagctgccaccggcccgccccccggaaacacatcaagcacccagaagtggaagatctgcaccatttgtaatgagctattccctgagaacgtttatagcgtgcatttcgaaaaagagcataaagccgagaaagtcccagccgttgccaattacatcatgaaaattcacaatttcaccagcaaatgcttgtattgcaataggtacctgcccaccgatactcttctcaaccacatgctcattcacggcttaagttgtccatactgcagatccacatttaacgatgtggaaaagatggctgcccatatgcgcatggtacatatcgacgaggagatgggacctaagacggattctaccctatcattcgatctgacactgcaacagggaagtcacaccaatattcatctgctagttactacatacaaccttagagatgctccagccgaatcagtcgcctaccacgctcagaacaatcctcctgtcccccccaagcctcagccaaaagttcaagaaaaggcagacatacctgtcaagtcatccccacaagccgcagtcccctataagaaggatgtcggaaagactttatgtcccctttgcttctccattcttaaaggcccaatctcagacgcactggcccaccatctcagagagcgtcaccaagtcattcagacagtacaccctgtcgaaaaaaagcttacctacaaatgcatccattgtctcggcgtgtacacatctaatatgacagctagcactatcaccctgcacctggtgcattgtcggggcgtgggcaagacccaaaatggtcaggacaaaactaatgccccatccagactcaaccagtctccctctctggcccccgtaaagcgaacctatgaacaaatggagtttcccctcctgaaaaaacgcaaactcgacgatgattctgattctccgtctttttttgaagagaaaccggaagagccggtcgtactggccttagatccaaaagggcatgaagacgattcatatgaagcccgaaagagtttcctgacgaagtatttcaacaagcaaccctatccgacacgcagagagatcgagaagctcgcagcctcgctctggctctggaaaagtgacattgcaagccacttctccaacaaaaggaaaaaatgtgtccgtgactgtgagaagtacaagcctggagtactgcttgggtttaacatgaaggagctgaataaagtaaaacacgaaatggattttgacgctgaatggctcttcgaaaaccacgacgaaaaggacagccgcgtaaacgcctccaaaactgccgataaaaaactaaatttagggaaagaggatgattcatctagtgacagctttgaaaatctagaggaggagagtaacgaatccggcagccccttcgacccggtttttgaggtagagcctaaaataagtaacgataatcccgaagagcatgtgttgaaggtcatcccggaagatgcttcagagagcgaagagaaactggaccagaaggaggacggcagtaagtacgaaactatccatctgacagaagagccgacaaaactcatgcataatgcttcagattcagaggtcgaccaggatgatgtagtggaatggaaagacggcgcttctccaagtgagagtgggccgggatcccaacaggtgagcgatttcgaagataatacgtgcgaaatgaagccaggtacctggtccgacgaaagctcgcagagtgaagacgctagatcttccaaacccgctgcaaagaaaaaagccacgatgcagggcgatcgcgagcaactcaagtggaaaaactccagctacgggaaagtagaaggattctggagcaaagatcagtcacagtggaaaaatgcatcagagaatgatgaacggctctcaaatccccagatcgagtggcaaaatagtaccatcgactccgaagacggtgagcaatttgataatatgaccgacggcgtagccgagcccatgcatggatcactggccggggttaaactctcaagtcagcaggcctag

SEQ ID NO: 321405 - DNA, 3306 bp, Artificial Sequence
  derived and/or modified sequence
atgttccagctgcctgtcaataaccttggcagcttgcggaaggcccggaaaacagtcaaaaagatcctgagtgacattggcctcgaatactgtaaggaacacatcgaggactttaagcagttcgaacccaacgacttctatttgaagaatacaacatgggaggacgtgggcctttgggatccctcccttacaaaaaatcaggattatcgtacaaaacccttctgttgtagtgcatgcccttttagtagtaagttcttttccgcatataagagccacttccgcaacgttcattccgaagacttcgagaaccgcatcctgctaaactgcccctactgtacctttaacgccgataaaaagacgctcgaaacccacattaaaatcttccatgcccccaacgcctccgctccgagttcctcactgagcacgttcaaagacaagaataaaaatgatggcctgaagcctaaacaggcagacagcgtggagcaggcggtctactactgtaaaaaatgcacttacagagatcccttatacgagattgtgaggaagcacatttatagagaacatttccagcatgtcgccgccccatacattgcgaaggcgggggagaagtcgctaaatggagccgtgcctctgggctccaacgcgcgggaagaaagcagtattcattgcaaaagatgtttatttatgcccaaatcttatgaagccctcgttcagcatgtgatcgaggaccatgaaaggattggttatcaggttactgccatgatagggcacacaaatgtggtcgtacctcggtcgaagcccttaatgttgattgcccccaagccacaggataaaaaaagcatggggctccctcctagaattggctccctggcctccgggaatgtgcgatctctgccctcccagcagatggtaaatcgcctatctatacctaagccaaacctgaatagcacgggagtaaatatgatgtcatcggtacacctccagcagaataactacggtgtaaaatctgtcggccagggatacagcgtcgggcagagtatgaggctcggactgggtggtaacgccccagtgtccattccccaacaatcccagtcagtgaagcagctcctcccctctggaaacggccggtcatatgggcttggctcggagcaacggtctcaggcccctgccagatattcccttcagtctgctaatgcgtcctcgctgagcagcggccagctcaagagcccctcactgtcccagtcacaggcctcacgggtactgggccagtcatccagcaagccagcggccgctgcgactggtcctccaccaggcaatacttccagcacgcagaaatggaagatttgtaccatctgcaacgagctattccccgaaaacgtctacagtgtgcactttgagaaggagcacaaagcagagaaagttccggccgttgccaactacattatgaagattcacaacttcaccagtaagtgcttatactgtaaccggtatctgcccactgacaccctactgaatcacatgctcatccatggactgtcttgtccctactgccgctccacctttaacgatgtggaaaaaatggcagcccatatgcgaatggtacacatcgatgaggagatgggacctaaaacagacagcacactctcctttgatctcactctgcaacaaggcagtcacaccaatatccatctactcgtcactacgtataacctccgggatgcaccagcggagtctgttgcataccacgctcaaaacaaccctcccgtgcctcctaaaccccagcctaaagtacaggagaaggccgatataccagtgaaaagctccccccaggcagccgtgccctacaagaaggacgttggcaagacactttgtcccttgtgtttctccattctaaagggtccaattagcgacgcccttgctcaccacctgcgagaaaggcatcaggtgatacagaccgttcaccccgtagagaagaagctgacatataaatgcattcactgccttggcgtctacaccagtaatatgaccgcaagcactatcacactccatctggtccactgccggggggtgggaaagactcagaacggtcaggacaagacgaatgccccttcgaggctcaaccagtccccctccttggccccagttaagcgcacttacgagcagatggagtttcccttgctcaagaagcgcaaactcgacgatgattccgattctccatcgttcttcgaggagaaaccagaggagcctgtggtcctggcacttgatcctaaggggcatgaagatgattcctatgaggcacggaagtctttcctaaccaaatatttcaataaacagccctatccaactcgacgcgagatcgagaagctcgctgccagcctttggttgtggaaatctgatatcgcaagccatttcagtaacaaacgtaaaaaatgcgtccgagattgcgaaaaatacaaaccaggtgtgctgttgggattcaatatgaaggagctcaacaaggtcaagcacgaaatggactttgacgccgagtggctgtttgagaaccacgacgagaaggactctcgggttaacgcatccaagaccgcggataagaagctaaatctgggcaaagaagatgactcatcgtcggattcctttgaaaacctagaagaggagagtaacgaaagcggttcccctttcgatccagtcttcgaagtcgaacccaaaatcagcaacgataaccctgaggaacacgttttaaaggtcatcccggaagacgctagtgaatctgaagaaaagctggaccagaaagaggacggttcgaagtacgaaaccatccatctcactgaagaacccaccaaactgatgcataatgctagcgactctgaggtggatcaggacgacgttgtagaatggaaggacggggcttcccctagcgaatctggtcctgggtcccagcaggtgtctgacttcgaagataacacatgcgagatgaagcccggcacatggtccgacgaatcaagccagagtgaagatgcaaggtcgagcaagccggccgccaagaaaaaagccactatgcaaggggacagagagcagttaaaatggaagaacagtagctatggcaaagttgagggtttttggagcaaggaccaatcacagtggaagaatgcaagcgaaaacgacgagaggctgagtaatccacagatcgagtggcagaattccaccatcgattctgaagatggagagcagttcgacaacatgacagatggagttgccgagcctatgcacgggagcttggccggggtcaagttaagctcacaacaggca

SEQ ID NO: 321406 - DNA, 3306 bp, Artificial Sequence
  derived and/or modified sequence
atgtttcaattaccagtgaacaatttgggatctctccggaaggcaagaaaaactgtaaaaaaaattctctccgatataggattggaatattgtaaggagcatatagaagatttcaagcaatttgagccaaatgatttttatttgaagaacacaacttgggaggacgtgggactgtgggatccctctttgacaaaaaatcaagattaccgtactaagcccttttgctgttcagcgtgcccattttcatcaaagtttttctctgcatataagtcacactttagaaatgtgcatagtgaggattttgaaaatcgcatattgctcaattgtccgtattgcactttcaatgctgacaaaaagactttggaaacacatattaaaatttttcatgctcctaacgcgtctgctccatcatcatcgctctcaactttcaaggataaaaataagaatgacggtctcaagcccaaacaagcagatagtgtcgagcaggccgtatactattgcaaaaagtgtacttacagagacccactttacgaaattgtgcgtaaacacatttaccgtgagcatttccaacatgttgctgctccgtacattgccaaagccggagagaaatcactcaatggagcggttccactaggctctaatgcacgggaggaatccagtatccactgtaaacgctgtttatttatgccaaagtcgtacgaagcccttgtgcaacatgtaatcgaagatcatgaacgcattgggtatcaagttaccgctatgattggacacacgaacgtagtcgtccctcgttcgaaaccgctcatgctgattgccccgaagcctcaggataaaaaatctatgggtttgccacctcgcataggatctttggccagtggaaatgtgcgttcgctaccatcacaacaaatggtcaaccgcctgtcgattccaaaaccaaatctaaactcgactggagtcaatatgatgtcgtcagtacacctccaacaaaataactacggggttaagtccgtcggacagggatattcggtcggacaaagcatgcgacttggacttggaggcaatgctccggtgtctattccacaacagtcccaatctgttaaacaactcctaccatcgggtaatggtcgttcttatggattaggttcagagcagcgtagtcaggctccagctagatattccctacaatctgctaatgcatccagtttgagttccgggcaactgaagagcccttcgctgtctcagtcacaagcatcgagagttctcggacaatcatccagtaaaccggcggcagcagctacgggaccaccaccaggaaatacatcgagcacacaaaagtggaaaatttgcacaatttgtaatgagttgtttccggagaatgtatactctgtgcatttcgaaaaagaacataaagctgagaaagtaccagccgttgcaaactacataatgaaaattcataatttcacctcgaagtgcttatactgcaatagatacttacctacggataccttattaaaccatatgcttattcatggtctttcttgcccatattgtcgtagtactttcaacgatgttgaaaagatggctgcacacatgaggatggttcacatcgatgaggaaatgggccctaagaccgattcgacacttagctttgatctgacacttcaacaaggctcacatacgaatatccacctccttgtgacaacttataatctaagagatgcacctgctgaatctgtggcttaccatgctcagaataatccaccagttccgcccaaacctcagcctaaggttcaagaaaaggctgacatcccggtcaaatcatcgcctcaggctgctgttccttataagaaggatgtgggtaagactttgtgcccactttgtttctctattttaaaaggaccaatctcagacgctctggcacatcatcttcgagagagacaccaagtgatccagacagtgcatcccgtcgagaaaaagctgacatacaagtgtattcactgccttggagtttacactagtaatatgactgcatctactataacgctccatctggtccattgtcgcggagtcggtaagactcaaaatggtcaggataaaaccaatgcgccaagccgcttaaaccaatcaccgtcgttggcaccagtcaagcgcacttatgaacagatggagtttccattgcttaaaaagcgtaaacttgatgatgattctgattctccatcgtttttcgaggagaagccggaagagccagttgtgttggcccttgatccgaagggacatgaggacgattcgtatgaggctagaaaatcgtttctaacaaagtactttaataaacaaccatacccaacccgaagggaaatagaaaaacttgcagcttcattgtggctttggaagagtgatattgcgtctcatttttccaacaaacggaagaaatgcgtaagagactgtgaaaagtacaagccgggagtactcctcggatttaacatgaaagaacttaacaaggtaaaacatgaaatggatttcgatgcagaatggttatttgaaaaccatgacgaaaaagattcgagagttaatgcaagtaaaacagctgataagaagcttaacctcggaaaggaagatgattcttcctcagatagcttcgagaacctggaagaagaaagtaatgaaagtggttctccgtttgacccagtgtttgaagttgagccaaagatctcgaatgacaaccctgaggaacatgtgctcaaggtgatcccagaggacgcttcggaatccgaagagaagctagatcaaaaagaggacggaagtaagtacgagacaattcatcttacggaagaaccgacaaaattaatgcacaatgcgtcagattctgaggtcgatcaagatgatgttgtcgaatggaaggatggagcgtccccatctgaatcaggaccagggagccagcaggtatcggattttgaggacaatacgtgcgagatgaagccagggacgtggtccgatgagtcatcacagagtgaagatgctcgttcaagcaagccagcagcaaaaaagaaagcgactatgcaaggagatcgtgaacaattgaaatggaaaaattcttcttacggaaaagttgaaggattctggtcaaaggatcaatcacaatggaagaatgcatcagaaaatgatgagcgtctttcaaatcctcaaattgaatggcaaaactcaacaattgatagcgaagatggggagcagttcgataatatgactgatggtgtcgcagagccaatgcatggatctcttgcaggtgtaaaattgtcttctcaacaggct

SEQ ID NO: 321407 - DNA, 3306 bp, Artificial Sequence
  derived and/or modified sequence
atgtttcagttgcctgttaataatctcggtagcctccgcaaagctcgaaaaactgttaagaagatcctgagtgacattggactggagtactgtaaggagcacatcgaggacttcaaacagttcgaaccgaacgatttttatttgaagaacacgacgtgggaagacgttggcctgtgggaccccagcctgacaaaaaaccaggactacagaaccaagccattctgttgctccgcttgtcctttcagcagtaagtttttctccgcttacaagagccatttccggaatgtacattctgaggacttcgagaatcggatcctcttaaattgcccctactgtacattcaacgccgacaagaagaccctagagacccatatcaaaattttccatgcccctaacgcctccgccccttctagtagtctgagcacatttaaagataagaacaagaacgacgggctgaagccaaaacaggccgacagcgtggagcaagcagtctactactgcaaaaagtgtacatacagggacccattatacgagatagtgcgcaaacacatttatagagagcacttccagcatgtggccgccccatatatcgcaaaggccggcgagaagagccttaacggagcggtgcctttagggagtaacgcaagagaagaatcctctatccactgtaaacgttgcctgtttatgccgaaatcttatgaagcattggtacagcatgtcatagaggatcatgaacggattggataccaggtcacggcgatgattggccacactaatgtggtagtcccccgatccaaaccactgatgctcatcgctccaaagccccaagataagaagagcatggggctgccccctcggattggcagtttggccagcgggaacgtcaggtctctgcctagtcaacagatggtcaatcgcctaagcatccccaaacctaacctgaatagcacaggggtgaatatgatgtccagtgtgcatctgcagcagaataattacggagttaaatctgttggacagggatattcagtcggacagagcatgaggctgggcctcggcggcaatgcgccagtgtcgatcccccaacagtctcagtcagtcaaacagctgttgccgagcgggaacggaaggagttatggcctgggcagcgagcaaaggtcacaagctccagccaggtactccctgcagtctgccaatgcttctagcttgagtagcggccagctaaaatcgccaagtctgagccagagccaagctagtagggtcctcggacaaagtagctctaagccggccgccgcagctacaggccctcccccgggcaatacatccagcacccagaagtggaagatctgtaccatatgtaacgagcttttcccagagaatgtctacagcgtgcattttgaaaaagagcacaaggccgaaaaggtgcctgccgtggcaaactacataatgaagatacataatttcacttctaagtgcctttactgtaacagatatttgccgaccgataccctgttaaatcacatgttgattcacggcctcagctgcccttattgtagatctaccttcaatgatgttgaaaagatggctgcacatatgcggatggtgcacatcgacgaggagatgggccctaaaacagactccacgctgagcttcgaccttactcttcagcaaggaagccacactaatattcatctgcttgttactacctataacctgagagatgctcccgccgagtccgtagcctaccacgcccagaacaaccctcctgttccccccaaaccgcagccaaaggtgcaggagaaggccgatattccagtaaagagcagcccccaggcggcggttccctacaagaaagatgtcggcaagaccctgtgccccttgtgcttctctatcttgaaaggtcccatctctgatgccctggcccatcacctcagagaacgccatcaggttattcaaacggtgcaccctgtagaaaagaagctgacatacaagtgcattcattgcttgggtgtgtacacttctaatatgaccgcgagcacaataaccctgcatttggtacattgtcgaggcgttgggaaaacacagaatggtcaggacaaaaccaacgccccttctagattaaaccagtcaccttctcttgcccccgtgaaacgcacctatgagcaaatggagtttcccctgcttaagaaacgcaagctggacgacgacagtgattctccatcattctttgaggagaagcccgaggagcctgtggtcctggctctcgatccgaagggccacgaggatgactcctacgaggcgcgcaaatcttttctcaccaaatattttaacaagcagccgtaccctactcgcagagagatcgaaaagctcgcagcaagcctgtggctctggaagtctgacattgcaagccactttagtaacaaacgcaaaaagtgcgtgagagattgtgagaagtacaagcccggggtcttgctggggttcaatatgaaggaactaaacaaagtgaaacacgaaatggacttcgatgccgaatggctgttcgagaaccatgacgagaaagacagccgagtgaacgcttccaagactgcagacaaaaaactaaacttgggaaaggaggatgatagttccagcgattctttcgaaaatttagaggaggaatcaaatgagagtgggtcgccgttcgaccctgtgttcgaagtagaacctaaaatctcaaatgataaccctgaagagcacgtcctgaaagtcattcctgaagatgcgtccgagagcgaggaaaaactggaccagaaggaagacggaagtaagtatgagacaatccatctaacagaagaaccaaccaaactgatgcataacgccagcgattctgaggtcgaccaggatgacgtggtggagtggaaagacggagcatctccttccgaatcaggtccaggctcacaacaggtgagcgactttgaggataatacgtgcgaaatgaaacctgggacgtggagtgacgagtcctcacagagcgaagatgctaggagctcaaaacctgctgctaaaaaaaaggccactatgcagggcgatcgcgaacagttgaaatggaagaattcttcttatggaaaggttgaggggttttggtccaaagaccagagccaatggaagaacgcctctgaaaacgacgagcgactttctaatccacagattgaatggcagaacagcaccatcgactctgaggatggtgaacagtttgacaacatgactgatggggtcgcagagcctatgcatggatcgctcgctggcgtcaaattgagctcacagcaggct

SEQ ID NO: 321408 - DNA, 3306 bp, Artificial Sequence
  derived and/or modified sequence
atgtttcaactgcccgtgaacaaccttggctccctacgcaaagctcgtaagacggtgaagaagatcctgagcgacattggccttgaatattgcaaagagcatatagaggattttaagcaattcgaacccaacgatttctacctgaagaatacaacctgggaagacgttggtttgtgggacccctcgctgacgaagaatcaagactatcgaacaaagccgttttgctgtagcgcttgccccttctcatccaagttttttagcgcctacaagtcccatttccgaaatgttcactcggaagatttcgagaaccgtatactgctgaattgcccgtattgtacattcaatgccgataagaaaacactggaaacgcatatcaagatattccacgcacccaatgcgagcgccccatcttcttcgctgagcaccttcaaagacaaaaacaagaacgacggtttgaaaccgaaacaggccgactcagttgagcaggccgtgtattactgtaagaagtgtacataccgcgatcctctttacgagatcgtccgcaagcatatctacagggaacactttcagcatgttgccgcaccgtacatcgcgaaggctggcgagaagtcactcaatggcgccgtgccgctcggctcgaacgcacgggaggagagtagcatacactgcaagcgttgcttgtttatgccgaagagctatgaagcactcgtgcagcacgtgattgaggatcatgaacgtataggttatcaggtcaccgcgatgattggacacacgaacgtggttgttccgcgctcgaagccgctgatgctaatcgcgcccaagccgcaggataagaagagtatgggcctaccgccccggatcgggagcttagcatcgggaaacgtaaggtctctgccctcccaacagatggtgaaccgtctgagcattcccaaacccaatctaaactcaaccggcgtgaatatgatgagttcggtgcaccttcaacagaataactacggcgtgaagtccgtgggccaggggtacagtgtgggtcagtcaatgcgcctgggtttaggcggcaatgcgccagtgagtattccccagcagtcgcagagtgttaagcaactgcttccaagcggtaacggacggtcctatggtctcggatccgagcagcgctcgcaggcgcctgcaagatactcgctgcagtcagcaaacgccagttccttgtcctcgggccagctgaagtctccctcattgtcgcagtcccaggcctcgcgagtgcttggccaatcttcaagcaagccagccgccgctgccactggacccccgcctggcaacacctcgtccacccagaaatggaagatatgcacaatttgtaacgaattgttccccgaaaatgtttacagcgtgcatttcgaaaaggagcataaggccgagaaggttcccgctgtggcaaactacataatgaagatacacaacttcacgtctaaatgcttgtattgcaacaggtacttacctaccgacacgctgctgaatcacatgctgatccacggtctaagttgcccctattgccggagtacgttcaacgatgttgaaaagatggcagcccacatgcgtatggtgcacatcgatgaggaaatgggcccgaagacggacagcactttgtccttcgacttgaccctgcaacagggcagccacactaacatacacctgctggttaccacctataacctgcgagatgctccagcggaatccgtcgcctaccatgcgcagaataacccgccggttccacccaaaccccagccaaaggtccaagaaaaggcagatatccccgtcaaaagttctccgcaggccgccgtgccctataagaaggacgttgggaaaaccctttgtcccctgtgcttctcgatattgaagggaccaatctccgacgccttggcgcaccacctgcgcgagcggcaccaagtgattcagaccgtgcatccggtggagaaaaaactgacctacaagtgtattcactgcctgggcgtgtacacatctaacatgacggcatcgacgatcacgctgcatctggtacactgccgaggagtgggcaagactcagaatggacaggacaagacgaacgccccctctcgcttaaatcagagcccaagtttagccccggtgaaacgcacctacgagcagatggaattcccgttgttgaagaagcgtaagctcgatgacgactcagacagcccatccttctttgaggagaagcccgaggagcccgtggtgctggccctcgatccaaaaggtcacgaagacgatagttatgaggcaagaaagtccttcctgacgaagtactttaataaacagccgtacccaacgagaagggagatagagaaactcgccgcctctctgtggctctggaagagcgacatcgcctctcattttagcaacaaacgtaagaagtgcgtgcgcgattgtgaaaaatacaagcccggcgtgttgctgggtttcaatatgaaggaactgaacaaagtcaagcatgaaatggatttcgatgccgagtggctattcgaaaatcacgacgagaaggacagcagggtcaacgcaagcaagactgctgacaagaagctcaatctgggcaaggaagatgacagttccagcgactctttcgagaatctcgaggaggagagcaacgagagcggaagtccctttgatcctgtgtttgaggttgaaccgaagatctcgaatgataacccggaggagcacgtgctgaaggtgatacccgaggacgcgtcggaaagcgaggagaagctcgatcaaaaagaagacggcagcaagtatgagaccatccatttgacggaggagccaacgaagttgatgcataatgcttcagacagtgaggtggatcaggatgacgttgtggagtggaaagatggtgcctccccctctgagtccggccccggctcccaacaggtgtccgatttcgaggacaacacgtgcgagatgaagccaggcacctggagcgacgaatcgtcgcagagcgaagacgcccgttctagcaaaccggctgccaagaagaaggcgaccatgcaaggagaccgcgagcagctgaagtggaagaacagttcttacggaaaggtggaaggcttctggtctaaggaccaatctcaatggaagaacgccagtgagaatgacgagcgtttatctaacccccaaatagaatggcaaaattcgactatcgacagcgaggatggggagcaattcgacaatatgaccgacggtgtcgctgagcccatgcatggatccctggccggcgtgaagctgtcatcccagcaggct

SEQ ID NO: 321409 - DNA, 3306 bp, Artificial Sequence
  derived and/or modified sequence
atgtttcagctccccgtcaataaccttggcagccttaggaaggctaggaagaccgtgaaaaagatcttgagcgatatagggctggaatattgcaaagagcatattgaagattttaaacagttcgaacctaacgatttttatttgaaaaatacaacatgggaagatgtcgggttgtgggacccttccttgacaaaaaatcaggattaccggactaagcctttctgttgttctgcctgtccattcagcagtaagtttttttctgcctataaatcccacttcaggaatgtgcacagcgaggatttcgaaaaccgaattctgttgaactgtccttattgcacctttaacgcggacaaaaagactctggagacacacatcaagatctttcacgctcctaacgcttctgcccctagcagcagtctaagcacattcaaagacaagaataagaacgatggattaaaacccaaacaggcagacagcgtggaacaggctgtttactattgtaagaaatgtacttatcgggacccattgtatgaaattgtccgaaagcacatctacagagagcatttccagcacgtagccgctccatacatagccaaggcaggagagaagtcacttaatggcgccgtgccgctgggctctaacgcacgtgaggaaagtagtattcattgtaagaggtgcttatttatgccaaaaagttacgaagcgttggtgcaacacgttattgaagatcacgagaggatcggctatcaagttactgcaatgataggccacactaatgttgtggtccctaggagcaagccgctgatgctcatagcccccaagccgcaggacaagaagtccatgggcctccctcctcgaatcgggtctctggcgtcaggcaatgtccggtcactgccaagtcagcagatggtgaatagactgtccattcctaaaccaaacctgaattcgacaggggtgaatatgatgtctagtgtgcatttacagcaaaacaattacggtgtgaagtccgtgggacagggctactccgtagggcagagcatgagacttgggttgggcggcaacgccccagtgagtattccgcaacagtcccagtcggtcaaacagttacttccctctggcaatgggcgttcctacggtttaggttcagaacagaggtcccaggcccctgccaggtactctctgcagtctgccaatgcctcctcactgtcttccggccaactcaagtccccatctctctcacagtcccaggccagcagagtgctggggcagagtagttctaagcctgctgctgccgccactgggcctcctccagggaataccagcagcactcagaagtggaagatttgcactatctgtaatgaactgttccctgagaacgtgtattccgttcacttcgagaaggaacataaagccgaaaaagtccctgctgtcgctaactatataatgaaaatccacaacttcacttcaaagtgcctgtactgtaacaggtacttaccaacggatacacttctgaaccatatgcttatccatggcctgtcttgcccctactgccgctcgacttttaatgatgtggaaaaaatggccgcccacatgcgaatggtccatattgatgaggagatgggaccgaagacagattccacactctcgttcgacctgactctgcagcaggggagccatacaaacattcatctcttggtgaccacatacaacctcagggacgctccagccgaatctgtggcataccacgcccagaataacccacctgtccctcccaagccccagccgaaggtccaggagaaggctgacattcctgttaagagttcaccccaagccgcagtgccgtacaagaaggatgttggcaaaacactgtgtcccctctgtttctctattttaaaaggaccaattagcgatgccttagctcaccatctgcgagaacggcatcaggttatccagacagtgcaccccgtcgagaagaaactgacctacaagtgtattcattgcctgggagtgtatacttcaaatatgacagcgtccaccataactctccatctggtacactgcaggggcgttgggaagactcaaaatggtcaagacaagaccaatgcaccaagcagactcaatcagtccccttcattagctcctgtgaagcgtacctatgaacagatggaatttccccttctgaagaagcgaaaactggatgacgactcagactccccaagtttctttgaggagaagccggaagagccagtagttttagctctcgacccgaagggacacgaagacgacagctatgaagcccgaaagtccttcctgaccaaatacttcaataaacagccatatcccacaagacgggagattgagaaattggctgccagcctgtggctgtggaaatctgatatcgcctcccatttctccaataaaaggaagaagtgtgtgcgagactgcgagaaatacaaaccaggcgtcctgctgggcttcaacatgaaagagctaaacaaagttaaacacgaaatggatttcgatgccgaatggctgttcgaaaatcatgatgagaaagacagtagagtgaatgctagcaagaccgcggataagaaactcaatctgggcaaggaggatgacagctcttccgattcatttgaaaacttagaggaagaaagtaatgagtccgggagtcccttcgaccccgttttcgaagtcgaacccaagatcagtaatgacaatccagaagagcacgttttgaaggtgatacccgaagatgcctctgagagcgaagaaaagttggatcaaaaagaagatggttccaaatatgagaccattcacttgaccgaggagcccactaaactgatgcacaatgcctctgatagcgaggtagaccaggatgatgtggttgaatggaaagatggggctagtcccagcgaaagcgggccgggatctcagcaagtatcagattttgaagacaacacgtgcgaaatgaagcccggcacgtggagcgacgaatctagccagagcgaagacgccagatcaagcaagccggccgcaaaaaagaaagctaccatgcagggtgatcgagagcaacttaaatggaagaatagcagctacggtaaggtggaaggcttctggagcaaagaccagagtcaatggaaaaacgcctccgaaaacgatgaacgtttgagcaacccacagattgaatggcagaattctaccattgactccgaggatggggaacagttcgacaatatgacggatggtgtggccgaacctatgcatggttcgttagccggagtgaaactgtcgtctcaacaggcc

SEQ ID NO: 321410 - DNA, 3306 bp, Artificial Sequence
  derived and/or modified sequence
atgttccaacttccagtgaacaatttgggctccctccgcaaggccagaaagacggtgaagaagatcctgagcgatattggcctggagtactgcaaggaacacattgaggatttcaaacaatttgaacccaacgatttctacctcaagaacactacttgggaagatgtgggactgtgggacccctcccttactaaaaaccaggattatcggactaagcctttttgttgttccgcgtgtccattctcgtcgaaattcttttcggcctacaaatcacacttccgcaatgtccactctgaagatttcgagaaccgtattctgcttaattgtccctactgtacctttaatgccgataagaaaactctcgagacgcacattaagatctttcacgcaccaaacgcatcggcaccgtcgtcgagcctgagcacctttaaggacaaaaacaagaatgacggactgaagcccaaacaagcagattcagtcgaacaggcggtttactactgtaagaaatgcacctaccgggatcccctttacgagattgtccggaagcacatttacagagaacactttcaacacgtggcggccccatacattgcaaaagcaggagaaaaatccctcaatggtgccgtgccccttggatcaaacgcacgagaggagtcctcaattcattgcaagcggtgtctgtttatgcccaagtcgtacgaggcccttgtgcaacatgtgatcgaagatcacgagagaatcggctaccaggtgaccgcaatgatcggacacaccaatgtggtggtgccccggagcaagccattgatgcttattgcacctaagcctcaagacaagaaatcgatggggcttccacctaggatcggctccctggcaagcggaaacgtgagatcgttgccatcgcagcaaatggtcaatcgcctgtccattcctaagcctaatctgaactcaacgggtgtcaacatgatgtccagcgtgcatcttcagcaaaacaactacggtgtcaagtccgtgggacagggttactctgtgggccaatcgatgagactggggcttggcggaaacgcaccagtctccatccctcagcagagccagtccgtcaagcaactgctcccaagtggtaacggacgctcatacggacttggttcggaacaaagatcgcaagccccagcaaggtactcacttcaatcggcaaacgcctcctcgctgagcagcggccaacttaaatcgcctagccttagccagtcacaggcatcaagagtgcttggacagtcctcctcaaagcccgccgcggcagcgactggtcctccccccggcaacacctcgagcacccaaaaatggaagatctgtactatctgtaacgagctgtttcctgaaaacgtctactcggtgcactttgaaaaggagcataaggccgaaaaggtgccagcagtggcgaattacatcatgaagattcataactttacctccaagtgcctctactgcaacaggtacctgcccaccgatacgctgctcaatcatatgttgatacacgggctttcgtgtccatactgccgatccacgtttaacgatgtggagaagatggcagcacatatgaggatggtccacatagacgaagagatgggccctaagaccgattcgacgctttcattcgacctgactctgcaacaaggatcccatactaacatccacctgcttgtcaccacttacaatctccgagatgctcccgcggaatccgtggcataccatgcacaaaacaaccctcctgtgcctccgaagccgcaacctaaggtgcaggaaaaggcagatatccctgtcaaaagctcgccacaagcggccgtcccttacaagaaggacgtgggcaagaccctctgtcctctgtgtttttcaattcttaaaggccctatttccgatgcattggcacatcacttgagagaacgtcaccaagtgattcagactgtccatccagtcgagaagaaactgacctacaagtgcattcattgtcttggtgtgtacacttcgaatatgactgcatccacgatcacccttcaccttgtgcattgtcgaggagtgggtaagacccaaaatggccaggacaaaaccaacgcgcctagcagacttaaccagtccccctcgctcgcgcccgtcaagcggacgtacgagcaaatggaatttccgctgctgaaaaagagaaagctcgacgatgattccgactccccttcgttcttcgaagagaagccagaggagccggtggttctggccctggatcctaaggggcatgaggatgatagctacgaagcgcgcaagtccttccttacgaagtacttcaataagcagccctaccccaccaggcgcgagatcgaaaaactggccgcatcactgtggctgtggaagtcggacattgcttcacatttctcaaacaagagaaagaagtgcgtgagagattgtgagaagtacaagcctggagtgctgctgggatttaacatgaaggaacttaacaaagtcaaacatgaaatggatttcgatgcagaatggctttttgaaaaccacgatgagaaggatagcagggtgaacgcgtccaagactgcagacaagaaacttaatctcggaaaggaggatgattcttcctcggattcctttgaaaacctggaggaggagtcgaacgagagcggatcccctttcgatccagtctttgaagtggagcctaagatatccaatgacaatcctgaggaacatgtccttaaagtgatccctgaagatgccagcgagtccgaggaaaaacttgaccaaaaggaagatgggagcaagtacgagactatccatctgaccgaggaaccaactaaactgatgcataacgcaagcgacagcgaagtggatcaagacgatgtcgtggagtggaaagacggtgcaagccctagcgaatccggacccggatcacagcaagtgtcagattttgaggacaatacttgcgagatgaaacccgggacttggtccgacgagtcctcgcagtcggaggatgcacgatcatccaagcctgcagccaagaagaaagcaaccatgcaaggagatagagaacaactgaagtggaaaaacagctcgtacggcaaggtcgagggcttttggtccaaggatcagtcgcagtggaagaacgcatccgagaatgacgagagacttagcaacccgcaaattgaatggcagaactctactatcgattcagaagatggagaacaatttgacaatatgaccgatggagtggctgagccaatgcatggttccctcgcaggagtcaaactttcatcacaacaggcc

SEQ ID NO: 321411 - DNA, 3306 bp, Artificial Sequence
  derived and/or modified sequence
atgtttcagctcccagttaacaacctcggttctctgcgaaaggcccgaaaaacagtgaagaaaattctctctgacattggactggaatactgtaaggaacatattgaggacttcaaacagtttgagcccaatgatttctatctgaagaacactacgtgggaagacgttggactctgggacccctccttgacgaaaaaccaggactacaggacaaagcccttctgctgcagtgcttgcccctttagcagcaaatttttctcagcatacaaaagtcacttccggaacgtacactctgaagactttgaaaaccgcatcctgctgaattgtccatattgtaccttcaatgccgacaagaaaactctggagacccacataaaaattttccatgcccccaacgcctccgctccatcatccagcctgtcaactttcaaagataagaacaagaacgacggacttaagccaaagcaggccgattctgtggagcaagctgtatattactgtaagaagtgcacatatagagacccattgtacgagatcgtcagaaagcacatataccgggaacatttccaacatgtggcggctccttacattgccaaagccggcgaaaagagccttaacggggccgtacctctggggagtaacgcacgcgaggagtcttctattcactgcaaacggtgtctgttcatgcccaagtcttacgaagctctggtacaacatgttatcgaagatcatgagcgaatcggataccaggtgacagccatgatcggacacacgaacgttgtggtcccaagaagcaagcccctgatgctgatcgctcctaagccccaggacaaaaagtccatgggactgccaccgcgaatagggagtctcgctagcggtaacgtccgctcacttcccagtcagcaaatggtcaaccggctgtctattcctaagcctaatctcaatagcaccggcgtgaatatgatgtcttcagtgcacctgcagcagaataattacggtgtgaagtctgtgggtcagggttacagtgtcgggcaatccatgcgactgggtcttggcgggaacgctcccgtatcaattccccagcaatcccagtctgttaagcaactcttgccatccggcaatggacggtcctacggactgggatcagagcagaggtcacaggccccagccagatactcccttcaatccgcaaacgccagctcactttccagcggtcagcttaaatccccctctcttagtcagagccaggcaagccgagtcctgggtcagtcttcctcaaaacctgctgcagccgctaccgggccaccccctggtaacacttccagtacgcagaagtggaagatctgcaccatatgtaacgagcttttccctgaaaacgtttattcagtccactttgagaaggagcataaggcggagaaggtgccagcagtagccaattatatcatgaagatacacaacttcaccagcaagtgtctttactgcaatagatacctgccgaccgacactctgctgaatcatatgctgattcatggactctcatgcccctactgtcgctccaccttcaatgacgtggagaagatggcagctcatatgcggatggtgcacatcgatgaagaaatgggcccaaaaaccgatagcacactgtcttttgatctgaccctgcagcaaggctcccacacgaatatccatctgctcgtaactacatacaatctgcgcgatgctcctgctgaaagcgtcgcataccacgcccagaataatcctccagttcccccgaagccacagcccaaggtacaggagaaagccgacattccggtgaagagctctccacaggctgcggtgccctataaaaaggacgtggggaagaccctgtgtccgttgtgcttcagcatccttaagggcccaatctccgacgccctggcccatcaccttcgcgagcggcaccaggtaatccaaacagtccatcccgtcgagaagaagttgacgtacaagtgtatacactgcctgggcgtatacacctctaacatgaccgcgtctacaatcaccctgcacttggttcactgcagaggtgttggcaagacccaaaacgggcaggataagactaatgcgccgagtaggctgaatcagagccctagcctggcaccagtgaagcgcacttatgaacaaatggagttcccactcctcaaaaagagaaagctggacgacgatagcgattctccatcctttttcgaagagaagcctgaagagccagtcgtcctcgctctggacccaaagggacatgaggatgatagctatgaagcgcgcaagagttttctcactaaatattttaataaacagccttaccccacaaggagagagatcgaaaagctcgctgcttctttgtggctttggaagagcgatattgcgtctcacttcagcaacaagcgcaagaaatgtgttcgggactgcgagaagtataaaccaggagtgctcctggggttcaatatgaaggagctcaataaggtgaagcatgaaatggatttcgatgccgagtggctgttcgaaaaccatgacgagaaggactcaagagtcaatgcaagcaaaacagctgataagaagctgaacctgggaaaagaagacgacagctcctcagactcattcgagaacctggaagaggagtctaacgagagcgggagtccctttgatccagtgtttgaggtcgaaccaaagatcagcaacgacaaccccgaggagcatgtcctgaaggtgatccccgaggatgcctccgaaagtgaggagaagcttgaccagaaagaggacggctctaagtacgagacaatacacctgaccgaggagccaacgaagctgatgcacaacgcatccgatagtgaggtcgaccaggacgacgtcgttgagtggaaggacggcgcaagcccaagtgagtctggccctggcagccaacaagtttcagactttgaggataatacctgcgaaatgaaaccaggcacctggtctgatgaatcttcccagtccgaagatgcccggagcagcaagcccgccgcaaagaagaaagccactatgcagggcgatagggaacagctgaaatggaagaatagcagctatgggaaagtggagggcttctggagtaaagatcaaagccaatggaaaaacgcctccgagaacgacgaacgcctgtctaatcctcagattgaatggcagaacagtaccatcgactcagaagacggtgaacaattcgacaatatgacagatggcgtagcagagccaatgcacggctccctggccggtgtgaagctgagcagccagcaggcg

SEQ ID NO: 321412 - DNA, 3306 bp, Artificial Sequence
  derived and/or modified sequence
atgtttcaattgcctgtgaacaatctgggctccctcagaaaggcaaggaaaactgtgaagaaaatactaagtgacattggactggagtattgtaaggaacatatcgaggattttaaacaatttgagccaaacgatttttatctcaaaaacaccacctgggaggacgtcggactatgggacccctcactgactaagaaccaggattatcgtactaagccgttctgctgctccgcctgccctttctcatctaagttcttcagcgcctataagtcccacttcaggaatgtgcatagcgaggattttgaaaatagaattcttctgaactgcccttattgcacattcaacgccgataaaaaaacactggaaacacatatcaagattttccatgcccccaatgccagcgccccctcttcctctctgagcacattcaaggataagaacaagaatgacggccttaagcctaaacaggccgactccgtggagcaagctgtgtactattgtaaaaagtgtacttatcgcgaccctctctacgagatcgtgagaaagcacatataccgggagcactttcagcacgtcgccgctccctacatcgccaaggcgggagaaaaatcccttaatggcgcggtgccactgggaagcaacgcacgagaggaatccagcatccattgtaagagatgccttttcatgccaaagagttacgaggcacttgtacagcacgttatcgaggaccatgagcggattgggtatcaggtcactgcaatgataggacacaccaacgtggtggtgcccagaagcaaaccattgatgctgattgcaccaaaaccccaagataagaagtcgatgggattaccgccccgaatcggatccctggccagcggtaacgtgagaagcctcccctctcagcagatggtgaataggctttccatacctaagcccaacctgaacagcacaggcgtcaacatgatgtccagcgtgcacctccaacagaacaactatggcgtaaagtctgtaggtcaagggtacagtgtaggtcagtccatgaggcttggcctgggcggtaatgccccagtgtccatccctcagcagtcgcagtcagtgaagcagctcctgccatccggcaacgggaggagctacggcctcggcagcgagcagcgtagtcaggctcctgcccggtatagcttacagagtgcgaatgcttctagtttaagcagtggtcagctgaagtccccttcactctcacagtcccaggcctcgcgggttctgggtcagtctagctccaaaccggctgccgccgccaccggtccaccccccggtaacacttcgagcacccagaagtggaagatttgcacaatttgtaacgagttatttcccgaaaacgtgtactcagtgcactttgaaaaggagcacaaagcggagaaggtgcctgcagtagccaattatattatgaagattcataattttacatccaagtgtctgtactgcaatcgttatttaccgactgacacattgcttaaccacatgctgatacatggtctgtcttgtccatactgcagatctacctttaatgacgtagagaagatggcagcacacatgcggatggtgcatatcgacgaggagatgggcccgaagactgattccacactgtccttcgatctgaccttgcaacagggctcccacacgaatatccatctgctggtgacaacatataatctgagagacgccccagccgagtctgtcgcgtaccatgcacagaacaaccccccagtgccaccaaagcctcagccgaaggtgcaggagaaggccgatatcccggtgaagagcagtccgcaggctgctgtgccttataagaaggatgtcgggaagaccctctgtccgttatgcttctcgatactcaaaggacctatcagtgatgcactcgcccatcatctaagggagcgacaccaagtcatacaaactgtgcaccctgtcgaaaaaaagcttacctataagtgtattcattgcctgggagtctatactagtaatatgactgcctcaaccatcacactgcacttagtgcactgccggggcgtgggcaaaacccaaaatgggcaggataagactaatgcaccctctcggcttaaccaatccccctcactggcacctgtgaaacgtacctatgaacagatggaattccctctcttgaagaagcggaagttggacgacgacagcgattctcccagttttttcgaagaaaagccagaggagcccgtggtcctcgccctcgatccaaaaggacatgaagacgacagctatgaggcgcgtaaatcctttctgacaaagtatttcaataaacaaccctatccaactcgacgtgagatcgagaaactcgcagcatccctatggctgtggaagagcgatatcgcaagccacttctctaataagaggaaaaaatgtgtacgagattgcgaaaagtacaaacccggtgtgctactcggatttaacatgaaagagctgaacaaagtcaagcatgagatggacttcgatgctgagtggttgttcgagaaccatgacgaaaaagattcaagggtgaatgctagcaagaccgccgataaaaaactgaaccttggcaaggaggacgattcttccagcgacagttttgagaatctggaggaagaatcaaatgaatcggggtcacccttcgatcctgtattcgaagtcgagcccaagatctccaatgataatccagaagaacatgtgctcaaggtaataccagaagacgcttctgagagcgaggaaaaactggaccagaaagaggatgggtccaagtatgagacaattcatctaacagaagagcctacgaagctgatgcacaacgcctcagacagtgaagtggatcaagatgatgtagttgaatggaaagatggtgcctccccttctgagagtggccctggatctcagcaagtatctgatttcgaagacaatacctgcgaaatgaaaccaggtacatggtcagatgagagttcacaatcagaagacgcccggagttcgaagcctgccgctaaaaagaaagctactatgcagggcgatagggaacagctcaaatggaagaactcaagttatgggaaggtcgagggcttctggtctaaggatcagtcgcagtggaaaaatgctagcgaaaatgacgaacggctgtctaatcctcaaatcgagtggcagaacagtaccatcgactctgaagacggggagcagtttgacaacatgaccgatggtgtggctgaacccatgcacgggtccctggctggggtgaaactctcttctcagcaggct

SEQ ID NO: 321413 - DNA, 3306 bp, Artificial Sequence
  derived and/or modified sequence
atgttccaactgcccgtcaacaacttgggatccctgcgcaaggccagaaagaccgtcaagaagatcttgtcagacatcggcctcgagtactgtaaagagcacatcgaagatttcaaacagttcgagcccaacgacttctacttgaagaacacaacctgggaagatgtcggactttgggatccgagcctcaccaaaaaccaggattaccgtactaagccattctgctgttctgcctgccctttcagctctaagttcttctctgcatataagagccactttcgtaacgttcatagtgaggatttcgagaaccgcatcttgctcaactgcccctactgcacattcaatgccgataaaaaaaccttggagacacacattaagatcttccacgctcccaatgcctcggcaccgtcgtcgtcgctctcgaccttcaaggataagaataaaaacgatgggctcaagccgaagcaggccgattccgtcgagcaagcggtctactattgcaagaagtgtacctatcgcgaccccctgtacgagattgtccgcaagcatatctatcgcgagcacttccagcatgtggcagccccttacatcgctaaggctggagagaagtcactgaacggagcagtccccctgggcagcaatgcacgtgaggaatcaagcatccactgcaagcgttgtctctttatgcctaagtcttatgaggctttagtgcagcacgttatcgaggaccatgaacgaattgggtaccaggtcacagccatgataggccataccaatgttgtggttccgcggagcaagcctcttatgctgatcgcccccaagccgcaagacaagaagagtatgggcctccccccgcgtattggctcgctcgcgtccggcaacgtacgttctctcccaagccagcagatggtcaacaggttgagtatcccaaagcctaacctgaatagcaccggcgtcaacatgatgtcgtctgttcacctgcagcagaataactacggggttaagagcgtgggacaggggtactcggtcggccagtcaatgcgcctcgggctcggaggtaatgcccctgtgagcattccgcagcagagtcagtccgtgaagcaactcctcccttctggcaacggtcgctcttacggcctggggtccgagcagcggagccaggcccccgcccgctatagcctgcagagcgctaacgcgagttccctgtccagcggtcaactgaagtcgccctcactctcacagagccaagcgagccgcgtgctcggtcagagttcctccaagcccgcggcggcagctaccggtccaccacccggcaacacctcgagtacccaaaagtggaaaatctgcacaatctgtaacgagctgttcccggagaatgtctattctgtccacttcgaaaaggagcacaaggcagaaaaggttccagctgtggctaattatattatgaagatccacaacttcaccagcaagtgcctttactgtaaccgttacctccccactgacacactgctgaatcacatgctgattcatggactgtcttgcccttactgtcggtctaccttcaacgacgttgagaagatggccgcgcacatgcgcatggttcacatcgacgaggaaatgggaccgaagactgattctacgttgtccttcgatctgaccctccagcagggtagccacaccaacatccacctgctcgtgaccacgtataacctgcgtgatgctcctgcagagagcgttgcctatcacgcacagaacaacccccctgtgccgcctaagcctcagcccaaggtgcaagagaaggccgatatcccggtcaagtccagcccacaggctgctgtcccgtacaagaaggacgtcggcaaaaccctgtgtcccctgtgcttctctatcctgaagggccccatctcggacgccctggctcaccatcttagagagcggcatcaggtcatccagacagtccaccctgtcgaaaaaaagttgacctacaagtgcatccactgcctcggcgtttacaccagtaacatgacggctagcaccatcaccctgcatcttgtccactgtcggggtgtgggcaagacccaaaacggccaggacaagaccaatgccccgtcccgtctcaaccagagtcctagcctcgcacctgtcaagcgtacctatgaacaaatggagttcccactccttaagaagcggaaactggacgatgactctgacagtccttcgttcttcgaggaaaagcccgaggagccggtggtcctggctctcgatcccaagggccacgaggatgactcctacgaggcccgtaaaagtttcctgaccaagtacttcaataagcagccctacccgacccgtcgtgagatagagaagctcgctgccagtttatggctgtggaagtccgacatcgctagccacttttccaacaagcggaaaaagtgcgtgcgagattgtgagaagtacaaaccgggggtccttcttggattcaacatgaaggaattgaacaaggttaagcacgagatggatttcgacgccgaatggttgttcgagaatcatgacgagaaggactcgcgcgtgaacgcgtctaagaccgccgacaagaagctcaacctcggcaaggaggacgatagcagctccgatagtttcgaaaatttggaggaggagtcaaacgagagtgggtctcccttcgaccctgtgtttgaggtcgaacctaagatctctaatgacaaccctgaagaacatgtcctcaaggtcatccccgaggatgcgtcggagtccgaggaaaaactggaccagaaagaagacgggtccaagtacgaaacgatacacctcactgaggagcccacgaagttgatgcataacgcgagtgatagcgaagtcgatcaggatgatgttgtcgagtggaaggacggcgcttctccttccgagagcggtcctggatctcaacaggtctcagactttgaggacaacacctgcgagatgaagcctggtacctggtcggacgagtcctcgcagtctgaagacgcacggagttcgaagcccgctgctaagaagaaggccacaatgcagggtgatcgggagcaattgaagtggaagaacagctcctacggtaaggtcgagggcttctggagtaaggaccagagtcagtggaagaatgcttcggaaaacgacgagcgtctctccaacccgcagattgagtggcagaactcaaccattgacagcgaagatggcgagcagtttgacaatatgactgacggcgtcgccgagccgatgcacggttcgctggccggcgtcaagttgtcgtcgcagcaggcc

SEQ ID NO: 321414 - DNA, 3306 bp, Artificial Sequence
  derived and/or modified sequence
atgtttcaattgccagtgaataaccttggctcactgcgaaaagcaagaaagactgtgaagaagatcctctccgacatcggcctcgagtattgcaaggagcatatcgaagatttcaaacagttcgaacccaacgacttttacctcaagaacacgacatgggaggacgttgggctctgggacccaagcctcactaagaaccaggattataggactaagcccttttgttgttctgcctgcccattttcttcaaaatttttctcagcctacaagtcacactttagaaacgtgcactcggaagattttgaaaaccgaatccttctgaactgtccatactgtacattcaatgccgataaaaagactctcgagactcatatcaaaatctttcacgcaccaaacgcgtctgcaccctcatcatccctctcgactttcaaggataagaacaaaaatgacggtcttaagcctaaacaggccgactcagttgagcaggcagtgtattactgcaagaaatgtacctatagggacccactgtacgaaatcgtcaggaagcacatctaccgcgagcactttcagcacgttgcagccccatatatcgccaaagctggggaaaaatctcttaacggcgccgtgcctctggggagtaacgcacgagaggaatcttccattcattgtaagcggtgtctgttcatgcccaagagttacgaggcgctagtccagcacgtgatcgaagatcacgagcggattggctatcaggttaccgccatgatcggacacacaaatgtagttgtgccccgatctaaacctctgatgcttattgctcctaaacctcaggataagaaatctatggggctgccccccagaattgggtctttagcctcaggcaacgttaggtctctaccaagtcaacagatggtgaatcgtctgtccatcccaaagcccaacctaaatagcactggtgtcaatatgatgtcatccgtacatctacagcagaacaattatggtgttaaaagcgtgggacaggggtatagcgtcggccaatcaatgagacttggcctgggcgggaacgctccggtttctataccacaacaatcgcagtccgtcaagcaactgctgccatccggtaacggccggagctacggcctgggctccgagcagcggtcccaagcccccgcgcgctactctctacagagcgcgaacgcctcgagcctgtcctcagggcaactgaagagcccgtcactatctcagagccaggcttccagggtactaggccagtcgtcatcgaaacccgccgcagccgccacagggcccccccctgggaataccagttctactcagaaatggaagatatgcaccatatgcaacgagctgtttcccgaaaatgtttattccgtccactttgagaaagaacacaaagcggaaaaagtacctgccgtcgcaaactatattatgaagattcataattttacgtcaaagtgtctgtactgtaataggtatctccccaccgacaccttattaaaccacatgctgatacacgggcttagctgtccttactgccgctccacattcaatgacgtggagaaaatggccgctcacatgaggatggtccatattgacgaagaaatgggtcccaagaccgactcgactctgtccttcgacctgactctgcaacagggcagccacaccaatatccacttactggtgacaacatataatctgcgggacgcgccggcggagagtgtagcctaccacgcccagaataaccctccggtaccacccaagcctcagcccaaggttcaggagaaggcagacattccggtaaaatcttctcctcaggcagctgtgccatacaaaaaagacgtcggcaaaactctctgtcccctatgtttcagcatcttgaaggggcccatttctgatgctctagctcaccatttacgagaaaggcaccaagtgatccagactgtgcaccccgtggaaaagaaactgacttacaaatgtatccactgtcttggcgtgtatacaagcaatatgactgcctccacaataaccttgcacttagtccattgtcgcggagtcggaaagactcagaatgggcaggacaagacaaatgctccttctaggctcaaccagtctccaagtctggctcccgtgaaacgtacgtacgagcaaatggagtttccccttctgaagaagcgtaagttagatgacgacagcgactctccatctttcttcgaagaaaagcctgaggagccggttgtgttggctctggaccccaaaggccatgaggacgatagctacgaggccagaaagagcttcctgacaaaatacttcaacaagcagccttatcctacgcggcgcgaaatagaaaagctagccgcctcactctggctgtggaaaagcgacattgccagccattttagcaataaacggaagaagtgcgtccgagactgcgagaagtacaagccaggagttcttctgggattcaacatgaaagagctgaacaaggtcaagcacgagatggatttcgacgccgagtggctattcgagaaccacgatgagaaggacagtcgggtaaacgcttcaaaaacagctgacaagaagcttaacctgggaaaggaggatgattcctcctcggattctttcgagaatctagaagaagaatctaacgagtccggcagtccattcgaccctgtcttcgaagtcgaacctaagattagcaacgataatccagaggaacacgtgttaaaggtcatccccgaagacgctagtgaatcagaagagaaattggaccagaaagaagacggttccaaatacgaaaccatacatctgacagaggaacctacgaagctcatgcataatgcctctgatagcgaagtggaccaggatgatgtagtcgagtggaaggacggcgcctcgccatcagagagtggccctgggtcccaacaggtgtccgacttcgaggacaacacgtgcgaaatgaaacccgggacgtggagtgatgagtcaagtcagtcagaggacgcccgcagttctaaacctgctgccaaaaagaaagccaccatgcagggcgacagggagcagttgaaatggaagaactctagctatgggaaggtcgaagggttctggagtaaggatcagtctcaatggaagaatgcgagcgaaaacgatgagcgactgtccaaccctcagatagaatggcagaactcgactatcgattccgaagatggcgagcagttcgacaacatgaccgatggcgtcgcagaacctatgcatgggagcctggctggcgtgaaactgtccagtcagcaggca

SEQ ID NO: 321415 - DNA, 3306 bp, Artificial Sequence
  derived and/or modified sequence
atgttccaactgcctgtaaacaatctgggctcgctgcgaaaggcgaggaaaacggtcaaaaagattctgagcgacattggacttgaatactgcaaggaacacattgaggatttcaagcagttcgaaccgaacgatttctacctgaaaaacactacctgggaagatgtcggactgtgggacccgtccctgactaaaaaccaggattacaggactaagcctttctgttgctcagcttgtccgttctcgagtaagttcttcagcgcatacaagtcgcactttcggaatgtccattcagaagatttcgagaaccgcatcctcctgaattgcccgtactgtacctttaatgcggataagaaaactctggagactcatatcaagatattccatgcaccaaatgcatcagccccatcgtcctcgttgagcacgttcaaggacaagaacaaaaacgacgggctgaagcctaagcaggccgactccgtcgaacaggccgtgtactactgcaaaaagtgtacctacagggacccgctgtacgagatcgtaagaaagcatatctatcgggagcactttcagcacgttgcggcaccatacatcgccaaggccggggagaagagcctcaacggcgcagtgccgctgggatcaaacgcacgggaagagtcgtcaatccactgtaagcggtgcctgttcatgccgaaatcatacgaagcgttggtgcagcatgtgatagaagatcatgaacggatcggataccaggtgactgccatgattggacatactaacgtggtggtcccacgctccaaacccctcatgttgatcgcgccgaaaccccaggacaagaaatcgatgggtctgccaccaaggattggatccctggcctcaggcaacgtccggagcctgccgtcacaacagatggtgaacagactgagcatcccgaagccgaacctcaacagcacgggagtcaacatgatgagctccgtgcacctgcaacagaataactacggagtgaagtcagtgggacaaggttactctgtcggccagtccatgcggctgggactcgggggaaatgcacccgtttcgataccccaacaatcccagagcgtgaaacaactcctgccgtccggaaatggccggtcgtatggactcggcagcgaacaacggagccaggcccctgcccggtactcccttcaatcggccaatgcgtcgtcgctgtcctcaggacaactgaagtccccatcactgagccagtcccaagctagccgggtcctggggcagagctcatcaaagcctgccgcggcggctaccggcccaccacccggtaacacttcatcgactcagaagtggaagatctgcaccatctgcaatgagctcttccctgagaacgtctacagcgtgcacttcgaaaaggaacacaaagctgaaaaggtcccggcggtggccaattacatcatgaagatccacaacttcacgtccaagtgcctgtactgcaaccggtacttgcccactgacacgctgttgaatcacatgctgatccatggcttgagctgcccctactgtcggagcacctttaacgacgtggagaaaatggcagcccatatgaggatggtccacatcgacgaagaaatgggtcccaagacggactcgactctgagctttgacctcactttgcagcagggctcccataccaacatccacctcctggtgaccacctacaatctgcgggatgcgccggccgagtcagtggcgtaccacgctcagaacaaccccccagttccaccaaagccgcagcccaaggtgcaggagaaagcagatattccggtgaagagctccccgcaagcggccgtcccttacaaaaaagatgtgggaaagactctctgccccctgtgcttctcgatcctgaaggggccgatcagcgatgctctcgctcaccacctgcgcgagcgccatcaagtcatccagaccgtgcatcctgtggaaaagaaacttacttacaagtgcattcactgtctgggagtttacacctcaaacatgaccgcgagcactatcaccctccacctcgtccactgcagaggggtggggaaaacccaaaatggccaagacaagactaatgctccgagccgactcaaccaatcaccgagccttgcgccggtgaagcggacctacgaacaaatggaattcccccttttgaaaaagaggaagctcgatgatgattcagactccccgtcattctttgaagaaaaaccggaggagccagtggtgcttgccctcgaccccaagggccatgaggacgattcctacgaggcacgcaagagcttcctgaccaaatacttcaacaaacagccatacccgacccgccgggagattgaaaaactggctgccagcctctggctgtggaagtccgacatcgcatcgcacttctcgaacaagagaaagaagtgcgtgagggattgcgagaagtacaagccgggcgtgctgctcgggtttaacatgaaggaactgaacaaggtgaaacacgaaatggacttcgacgcggagtggctgtttgagaatcatgacgaaaaggatagccgggttaacgccagtaagaccgccgacaagaagctgaaccttgggaaggaggatgattccagctcggacagcttcgagaacctcgaagaggaatccaacgaatccgggagcccattcgaccctgtgtttgaagtggaaccaaagatttccaacgacaaccctgaggaacatgtgctgaaggtgatcccggaggacgcgtcggaatccgaagaaaaactcgatcaaaaagaagatggatccaagtacgaaaccatccacctcaccgaggaacctaccaaactgatgcacaatgccagcgactcagaggtggaccaggacgatgtcgtcgagtggaaggatggagcgtcccccagcgaatcaggccctggatcacagcaggtgtcggacttcgaggacaatacttgcgagatgaagccgggaacctggtccgacgaatcctcacaatccgaggatgcccggtcgtctaaaccggcggcgaagaagaaggcgaccatgcaaggagatcgcgagcagctgaaatggaaaaactcctcgtacggaaaggtggaaggattctggtcgaaggatcagtcgcagtggaagaacgcgagcgaaaacgacgagagactctccaatcctcagatcgaatggcagaactcgaccatcgacagcgaggatggagagcagtttgacaacatgaccgatggtgtggccgagcccatgcatggatcgctcgccggagtgaagttgagctcccagcaggcc

SEQ ID NO: 321416 - DNA, 3306 bp, Artificial Sequence
  derived and/or modified sequence
atgttccagctgcctgtcaataacctcggctcgctgagaaaagcacgaaagaccgtcaaaaagatcctttcagatatcggactggagtactgtaaggaacacatcgaggatttcaagcaattcgagccgaatgacttttaccttaagaacacgacctgggaggatgtgggactctgggacccttcgctgaccaagaaccaggattaccggactaaaccattctgttgttcggcgtgtccgttttcatcgaagtttttcagcgcatacaagtctcacttcagaaatgtgcattcagaggattttgaaaaccgcatcctgctgaattgcccttactgcacttttaacgcggacaaaaagaccctggaaactcacatcaagatttttcacgcacctaacgcgtcggcgcctagcagcagcctgtcaacttttaaggacaaaaacaagaatgatggactgaagcctaaacaagccgacagcgttgaacaagcagtgtactactgtaaaaagtgtacctaccgcgatccgctttatgagattgtgagaaagcatatctaccgcgaacattttcagcacgtcgcagcaccctacatagccaaggcgggggagaaatctcttaacggagcagtgccactgggctcgaatgcacgggaggaatcatcaattcattgtaaaagatgtctctttatgccaaaatcttacgaggcacttgtgcagcacgtgatagaggaccacgaaaggattggataccaggtgactgcaatgattggacatactaacgtggtggtcccacgctcgaaacctcttatgttgatagccccgaagccgcaagataagaaaagcatgggacttccaccaagaatcggatccctggcctcgggtaacgtgcgcagccttcctagtcagcagatggtcaaccgcctctccattcccaaacctaaccttaactccactggtgtgaacatgatgtcgagcgtccatcttcagcagaataactacggggtgaagtcggtcggacagggttactcagttgggcagtcgatgcggttgggactcggcggaaatgcccctgtctcgattccccaacaatctcagagcgtgaagcagctgctgcctagcgggaacggaaggtcctacggtcttggaagcgagcaacgatcgcaagccccagctcggtactccctccagagcgcaaatgcaagctccctttcctccggacagcttaagagcccaagcctctctcagtcacaggcatcaagggtcctcggtcaatcctccagcaagcctgccgctgcagcgaccggacctccacctgggaacactagctcaacgcaaaagtggaagatttgtacgatttgcaacgaattgtttccggaaaacgtctattcggtgcactttgaaaaagaacacaaggccgaaaaagtgccagcggtcgcaaattacattatgaaaatccacaacttcacctccaagtgtttgtattgcaatagataccttcctactgacactcttcttaatcatatgctgatccatggactgtcctgtccttactgtcggtcaacctttaacgacgtggaaaagatggcagctcacatgaggatggtgcatatagacgaagaaatgggtcctaagacggattcgactctgagcttcgatctgactttgcaacaaggttcgcacactaacattcatctcctggtgactacgtacaacctgcgcgatgcacccgcagaatcggtggcctaccatgcccagaacaaccccccagttcccccaaagccccaaccaaaggtgcaagagaaggcggacattccagtcaagtcaagcccacaagcggcggtcccttataagaaggacgtgggaaagaccctttgcccactttgcttttcgattcttaaaggccccatatcagatgcacttgcccaccaccttagagaacggcaccaagtcatacaaactgtccaccccgtggaaaagaaactcacttacaaatgcattcattgccttggagtgtacacttcaaatatgactgcgtcaaccattacccttcatctggtgcattgccgtggggtgggtaaaacccaaaacggccaggacaagacgaatgctccgtcccgcctgaatcaatcgccaagcctcgcacctgtgaagagaacctacgagcagatggagttcccgctccttaagaaacgcaagttggatgacgattcggattccccgtcgtttttcgaggaaaagccagaagagcccgtggtcctggcgcttgaccctaagggacatgaggatgactcgtacgaggcaaggaagtcctttcttactaagtacttcaataaacaaccctacccaactcggcgggagatcgagaagctggcagcatccctgtggctgtggaagtcggatatcgcatcacacttctcaaacaagcgcaagaagtgcgtgcgggactgtgagaaatacaagcccggggtgctgcttggattcaacatgaaggagctgaataaggtcaagcacgagatggatttcgacgcagaatggctcttcgaaaatcatgacgagaaggattcgcgcgtgaatgcatcaaagaccgccgataagaaactcaaccttgggaaagaagatgactcctcatctgattcctttgagaatctggaagaggaatcgaacgaatcgggatctccatttgatccagtgtttgaagtggaaccaaagatatcaaacgataacccagaagaacacgtgctcaaggtcataccagaagatgcttccgaatcggaggagaagttggatcaaaaagaagatggatccaagtacgaaaccattcacttgaccgaggaacctactaaacttatgcataacgcatcagattctgaagtcgatcaagatgatgttgtcgagtggaaagatggcgcgtccccctcggagtccggcccaggaagccaacaagtgtccgactttgaggacaacacctgtgagatgaagcctggcacctggtcggacgaaagcagtcagtccgaagatgcacggagctcaaagccagcagcgaagaagaaggccactatgcagggggatcgcgaacaacttaagtggaagaactcgtcatacggaaaagtggaaggcttttggtcgaaggatcaatcacagtggaaaaatgcctcggaaaacgatgaacggcttagcaaccctcagattgagtggcaaaactctaccatcgactcagaggatggggaacaattcgataacatgaccgatggagtcgccgaacctatgcacggttcactggcgggtgtgaaactctcgtcacaacaggcc

SEQ ID NO: 321417 - DNA, 3306 bp, Artificial Sequence
  derived and/or modified sequence
atgttccagttgccagtgaataacctgggatccctgagaaaagctcgcaagactgtgaagaaaatcctctccgatatcggcctggaatactgcaaagaacacatcgaggacttcaagcagttcgaaccgaacgacttttatctcaaaaacaccacctgggaggatgtgggtctttgggatccatcgcttactaagaatcaagattaccgcaccaagcccttttgctgctccgcctgtccattttcttcgaagttcttctcggcatacaagtcacactttcggaatgtccactcagaagatttcgaaaatagaatcctcctcaactgcccctactgtactttcaatgcagataagaaaaccctcgaaacccacatcaagatcttccacgcaccaaatgcttcggccccatcgtcgtccctgtccaccttcaaggataagaacaaaaatgacgggctcaagcctaaacaagcagatagcgtggaacaagcggtgtactactgtaagaaatgtacctaccgtgatccgctgtacgagatcgtccgcaaacatatctacagggaacatttccaacacgtggcggccccgtacattgcgaaggcaggcgagaagtcgctcaacggcgccgtgccactgggatccaacgcacgcgaggaatcgtcgatccattgtaaaaggtgtctgttcatgccaaagtcatatgaagcgctggtgcaacacgtgatcgaggaccatgaaaggatcgggtaccaagtgaccgccatgatcggacacaccaacgtcgtggtcccacggtccaagccgctcatgctcattgctccaaagccacaggataagaagtccatgggactgccgccgagaatcggatcattggcctccggcaacgtgcgctcccttccaagccagcaaatggtcaaccgactctctatcccaaaacctaacctgaattccaccggggtgaatatgatgtcctcggtgcacctccaacaaaacaactacggagtgaagtccgtggggcagggatacagcgtgggacaatcaatgcgactcggtctgggtgggaacgcccctgtgtcaatccctcagcagtcccaatccgtgaagcagctgctgccaagcggcaacggtcggtcgtacggcctgggaagcgaacagcgctcccaggcgccagcacggtactccctgcaatccgccaacgcatcatcgctgagctctggccaactcaaatcaccgtcactgtcacagtctcaggcctcgcgcgtgctgggacagtccagctcgaagccggcagccgctgcgactggcccgccaccggggaacacgtcctcgactcagaagtggaagatctgcacgatctgtaacgagctgtttcctgagaacgtgtactcggtgcatttcgagaaggaacacaaggccgagaaggtccccgccgtggctaattacatcatgaagatccacaacttcacctcgaagtgcctctactgcaataggtacctgcctaccgataccctgctgaatcacatgctcatccacgggctgagctgcccttactgccggtcgactttcaatgatgtggaaaagatggcggctcacatgcggatggtccacatcgatgaggaaatgggaccgaaaaccgactccactctgagcttcgacttgaccctccagcagggatcgcataccaacatccatctgcttgtgaccacttacaacctccgcgatgccccggcagagtccgtggcctaccacgcccagaacaatccgccggtgccgccgaaaccccaaccgaaggtccaggagaaggcggatatcccagtcaagtcgtcgccacaggcagctgtgccatacaagaaggatgtcggaaagacgctgtgccctctttgcttctccatcctgaagggaccaatctcagacgccctggcccatcacctccgcgagcgccaccaggtgatccaaaccgtgcatccagtcgagaaaaagctcacctacaagtgcatccactgccttggagtgtacacgtccaacatgaccgcctcgaccatcactctccacctggtgcactgcagaggcgtgggaaaaacccagaatggccaggacaagactaatgcaccttcgcggctgaatcaatcacctagcctggcccctgtgaagcgcacttacgagcagatggagtttccactgttgaaaaagagaaaactggatgacgactccgattcgccttcctttttcgaagagaaacccgaagaaccggttgtgttggcactggatcctaagggacacgaggacgactcctacgaggcccgaaagtcttttctgacgaagtacttcaacaaacagccctacccgactaggcgggaaatcgaaaagctggccgcgtccctgtggctgtggaagtcggacatcgcctcgcatttttcgaacaagagaaagaaatgcgtgagggattgtgaaaagtacaagcctggagtgctcctgggcttcaacatgaaagagttgaacaaggtgaaacacgagatggatttcgacgccgagtggctgtttgagaatcatgacgaaaaagactcacgcgtgaacgcaagcaaaaccgcggataagaagctcaacctcggaaaagaagatgactcctcttcggattcattcgaaaacttggaagaagagtccaatgaatcgggctccccgtttgatccggtgttcgaggtggagccgaagatcagcaatgacaaccctgaggagcatgtgcttaaggtgattccggaagatgcaagcgagtcagaggaaaaactcgaccagaaagaagatgggtccaagtacgaaactatccacctgactgaagaaccgaccaaacttatgcacaatgcatcggactcagaagtcgatcaggatgacgtggtcgaatggaaggacggagcatcgccctcggagtcaggaccgggaagccagcaggtgtccgacttcgaagataacacttgcgaaatgaaaccaggcacttggagcgatgaatcgtcccaatccgaggacgcgcggtcatcgaagcctgcagctaagaaaaaggcaaccatgcagggagatagagaacagcttaaatggaagaactcgagctacggtaaagtggagggattctggtcaaaggaccaaagccaatggaagaatgccagcgagaacgacgagcggctgagcaacccccagatcgaatggcagaactccaccatcgactcggaagatggtgaacagttcgataacatgaccgacggcgtcgcggagccaatgcatgggtccctcgcaggagtcaagctgtcgtcccagcaggcc

SEQ ID NO: 321418 - DNA, 3306 bp, Artificial Sequence
  derived and/or modified sequence
atgttccaactgccggtgaacaacttgggttcactgaggaaggcacggaaaaccgtcaaaaagatcctttccgacattggactggaatattgtaaggaacatatcgaggactttaagcagtttgaaccaaatgacttttaccttaagaatactacttgggaggacgtggggctctgggacccgtccttgactaagaaccaggattacagaaccaaacctttctgctgttcggcttgtccgttctcatctaagtttttcagcgcctacaagtcccatttcagaaacgtgcactcagaagatttcgaaaacagaattttgttgaactgtccgtactgcaccttcaatgcagacaagaaaactctcgagactcacattaagatctttcatgccccaaacgcgtcagccccttcaagctcgctgtccactttcaaggataagaacaagaatgatggactgaagccgaagcaagcggactcggtcgaacaggcggtgtactattgcaagaagtgcacttatagggatccgctgtacgagatcgtcagaaaacatatctaccgcgaacacttccagcatgtggcagccccgtacatagccaaggccggagaaaagagcctgaatggggctgtgcccctgggctcgaatgcccgcgaggagtcctcgattcactgcaaacggtgtctcttcatgccgaagagctacgaggctttggttcagcacgttatcgaagatcacgaacggatcggctaccaggtgaccgccatgataggacacactaacgtcgtggtgccgcgttcgaagccgctcatgctgatcgcccctaagccacaggacaagaagagcatgggcctccctccccgcatcggcagcctggcgtcgggcaacgtgcggtcactgcctagccagcaaatggtcaaccgcttgtccattccaaagccaaatttgaactcaacgggcgtcaacatgatgtcaagcgtgcacttgcaacagaacaactacggcgtgaagtcggtcggtcagggatactccgtggggcaatccatgagactgggacttggtggcaacgctccggtgtcgatccctcagcaatcccagtccgtgaagcagctgctgccatcagggaatggcagatcctacggcctgggatcggaacagcggtcccaagcccccgcccgctacagcctccaatctgcaaatgcctcgagcctgagctccggccagcttaagagcccaagcctgtcccagtcgcaagcatcccgggtgctcggacagtcctcatccaagccagcggccgcggctaccgggccgcccccgggaaatacgtcgtcgacccaaaaatggaaaatctgcacgatctgcaacgaactgttcccagagaacgtgtactcagtccatttcgaaaaagagcataaggccgaaaaggtgccggccgttgcgaactacatcatgaagatccacaacttcaccagcaagtgcctgtactgcaaccgatacctgcctactgacactctgctcaaccacatgctgattcatggactgtcatgcccctactgccggtcgaccttcaacgacgtggaaaagatggcagcccacatgcggatggtccacatcgacgaagagatgggcccgaaaaccgattcgaccctgtcattcgacctcaccctgcaacaaggctcacacactaacatccacctgctcgtcaccacttacaatctgagagatgctcctgccgaatcggtggcataccacgcccaaaacaacccacctgtgccgccgaagccgcagccgaaggtgcaagaaaaggctgacatccccgtgaaaagctcgccacaagctgccgtgccttataagaaagacgtcggaaagacgctttgtcctctgtgcttcagcatcctcaagggtccaatctcggatgcgctggcccatcatctgagagaaagacaccaggtgattcagaccgtgcacccagtcgaaaagaagctcacctacaaatgcatccactgccttggtgtgtacacgtcgaatatgaccgcctcaaccatcaccttgcacctcgtgcactgtcggggagtcggcaagacccagaacgggcaggataagaccaatgccccgtcgaggctgaaccagtcaccaagcctcgccccggtgaagcgcacctacgagcagatggaatttcccctcctcaaaaagcgcaaactggatgatgatagcgattcaccatcattcttcgaagagaagccagaggaaccagtggtgctggcccttgatccgaaaggacatgaagatgactcctacgaggcgcggaagagctttctgaccaagtacttcaacaagcagccatacccgactcggcgggaaatcgaaaaactggccgcctccctgtggctgtggaagagcgacatcgcgagccatttctccaacaagcgcaagaagtgtgtgagagattgcgagaagtacaagccaggagtcctcctgggcttcaatatgaaggagctgaataaggtgaaacacgaaatggacttcgatgcagagtggctgttcgaaaatcacgatgaaaaggacagccgggtgaacgcgtccaagacggctgacaagaaactgaacctgggcaaagaggacgatagctcctccgactcatttgagaatctggaggaagaatcgaacgaatcaggatccccgtttgaccctgtgttcgaagtggaaccaaagatcagcaacgacaacccagaggaacatgtgctgaaggtgattccggaagatgctagcgagagcgaagaaaagctggaccaaaaggaggatggctcgaaatacgaaaccattcacctcaccgaggaaccgaccaagctcatgcacaacgcgagcgacagcgaagtggaccaggacgatgtcgtggaatggaaggacggggcgtcaccatcggagtcagggccgggatcccaacaagtgtcagatttcgaggacaacacttgtgagatgaagccgggaacttggtcagacgagtcatctcaatcggaggacgcccgcagctccaagccggccgccaagaaaaaagccactatgcagggagatcgcgaacagctcaagtggaagaattcctcgtacggaaaagtcgagggcttctggagcaaggatcagtcgcagtggaagaatgcctcggagaatgatgagcgccttagcaacccgcaaatcgagtggcaaaactccaccatcgattccgaagatggagagcagtttgacaacatgaccgacggagtcgctgaaccaatgcatggctcgttggccggagtgaagctgagctcgcagcaggcg

SEQ ID NO: 321419 - DNA, 3306 bp, Artificial Sequence
  derived and/or modified sequence
atgttccagctcccggttaacaaccttggaagcctgaggaaagccaggaagacggtaaaaaagattctctccgatattggcctggagtattgcaaagaacacatcgaggattttaaacagtttgagcctaatgacttttatctcaaaaacactacatgggaggacgttggactttgggatcccagtcttacgaaaaatcaagattaccgaaccaagcccttctgttgctccgcctgcccatttagctccaaattcttctccgcctataagtctcatttcagaaatgtgcactccgaggacttcgagaaccgtatactgctgaattgcccatattgcactttcaacgccgataagaagacgcttgagactcatatcaagatctttcacgcccctaatgcgtcggcaccgtcctcttctctgagcacttttaaggacaaaaacaaaaatgatggtctgaagcccaaacaggctgacagtgttgaacaggctgtctactattgcaaaaagtgtacataccgggacccactgtatgagattgtgaggaaacatatctatagagagcactttcaacatgtcgcagctccgtatatcgctaaggccggagaaaaaagtctgaatggagccgtacccctagggtccaacgccagggaggagagtagtattcactgtaagcggtgcctctttatgcctaagagttacgaggcactcgtccaacatgtgatcgaggaccatgaaaggattgggtatcaggtgaccgccatgataggacacaccaatgtcgttgttccccgcagcaagccacttatgctgatcgccccgaaacctcaggataaaaaatcaatggggctccctccccggatcggctccttggccagcggtaatgtccggagcctgccatcccagcagatggtgaatcgcctctctatccccaaaccgaacttaaattccaccggggtcaacatgatgtcttctgtccacttgcaacagaataactatggcgtgaagtccgttggccagggttactcggttggacaatcaatgcgactggggttaggtgggaacgcccctgtcagtatcccccagcagagtcagtccgtgaagcaattgctaccctccggaaacgggaggtcctacgggctgggcagcgagcagagatctcaagcgcctgcgcgttattccctgcagagtgcaaacgctagctccctgagcagcgggcagctgaaaagcccttcattgtcgcagtcacaagccagcagggtgcttggccagagctcttctaagccagctgctgctgccacgggacccccgcccgggaacactagttcaactcagaaatggaaaatttgcactatatgtaacgagttgttccctgaaaatgtgtacagtgtacacttcgaaaaggagcataaagccgaaaaagtgcctgcggtagccaattatatcatgaagatacataacttcacctctaaatgcttatactgtaaccggtacctcccgacggacaccctgctcaatcacatgttgatacacggtcttagctgcccatactgccgatctactttcaacgacgtggaaaaaatggctgctcacatgcgcatggtgcacatcgatgaggaaatggggcccaagaccgattcaactctgagctttgatctgactctgcagcaggggtcccatacgaacatccatctgctcgttaccacctacaatctgcgcgatgcacccgcagaaagcgtggcgtaccatgcccaaaacaatcctccagtgcctcctaagccacagcccaaagtgcaggagaaggcagacatcccagtgaaaagctcccctcaggcagccgtaccctataaaaaggatgtgggaaagacattgtgtcccttgtgcttctccatcctgaagggacccatttctgatgctcttgcccatcacctgagggaacgacaccaagtcatccagactgtgcaccccgttgaaaagaaactcacttacaagtgtatacactgtctcggcgtgtacactagtaacatgacagccagtacaattaccctccatctggtgcactgtagaggagtcgggaagacacagaacggtcaagacaaaacaaatgcacctagtagacttaaccagtcgcccagcttggcgcccgtgaaacggacatacgagcaaatggagttccctttactcaagaagcggaagctcgatgatgattctgattccccaagtttcttcgaagagaagccagaggagccggttgtcctcgcattggacccaaaaggacacgaagatgactcttacgaagctagaaaaagcttcttgacgaagtatttcaataagcagccctaccccacacgccgcgaaatcgagaagctcgccgctagtttgtggctgtggaagtctgacattgcttcccatttttcaaacaagcggaagaagtgcgttagagactgtgagaagtacaagccaggggtgctattagggtttaatatgaaagaactaaacaaagtaaaacatgagatggattttgacgccgaatggctgtttgagaaccacgacgagaaagattccagagtgaacgcctccaagacggctgacaaaaaattaaaccttgggaaggaggatgattcttcctcagacagttttgagaatcttgaggaggagtccaatgagtccggcagcccttttgatccagtctttgaagtcgagccaaagatttccaacgacaatcctgaggagcatgtgttgaaggtcatcccagaagatgcatctgagtcggaggaaaagctggaccaaaaagaggatggcagcaagtacgaaacaatacatctgacagaagagcctacaaagctaatgcataatgccagcgactcagaagtggatcaggacgacgttgttgagtggaaagacggcgcttctccatcggagagcgggcctggatctcagcaggtgtcggactttgaagataacacctgcgaaatgaagccaggcacctggtccgacgagtcaagccagagtgaagatgctaggagctcgaagcctgcagccaagaaaaaagccactatgcagggagatagggagcagttgaagtggaaaaactcttcctacggcaaagtggagggcttctggtctaaggatcagtctcagtggaagaatgcatcagagaacgacgaacggctctctaacccacagattgaatggcagaacagcactatagattcggaggatggagagcagttcgataacatgaccgacggtgtagctgaacccatgcacggttcgctcgcaggcgtgaagctgtctagtcagcaggcc

SEQ ID NO: 321420 - DNA, 3306 bp, Artificial Sequence
  derived and/or modified sequence
atgtttcaactccccgtcaacaacctaggatcccttaggaaggcccggaaaacagtgaagaaaatcctgagtgacatcgggctcgaatactgcaaagaacacatcgaagatttcaagcagttcgaaccgaacgacttctacttgaagaacaccacatgggaggacgtcgggttgtgggaccccagcctcacaaaaaatcaagattatagaaccaaaccattctgctgctcagcttgccctttctctagcaaattcttttccgcatacaagagccacttccggaatgtgcatagcgaggacttcgagaaccgcatcttgttgaattgtccatactgtaccttcaacgctgacaaaaagacactagaaacccatattaagatatttcacgctcctaacgcttccgctccctcatcgtctctgtcaacattcaaggacaagaataagaatgacggactgaaacctaagcaagcggacagtgtggagcaagccgtgtattattgcaagaagtgtacctaccgcgaccctctctatgagattgtgcgaaagcacatctacagggaacacttccagcacgttgccgccccctatattgcgaaagccggagagaagtcacttaatggagccgttccactgggcagcaacgcaagagaggagtcctctattcattgtaagcggtgtctgttcatgcccaagtcatacgaagctctggtgcagcatgtgatagaggaccatgagaggatcgggtatcaagtgacggccatgatcggccacactaatgtcgtggttccacgatctaaaccgctgatgctgatcgcccctaagcctcaggataagaagagtatgggcctcccaccacgaattggttccctcgcgagcgggaacgtgcgctccttaccatctcaacagatggtcaaccgcctgtccatccctaagccgaacctaaactccaccggggtcaacatgatgagcagcgtacatcttcaacaaaataattatggtgtgaaatccgtggggcaaggatacagcgtcgggcaaagcatgagactggggctcggaggtaacgctccagtatcaatcccccaacagtcacagagtgtaaaacaactattgccctccggaaatggaaggagctatgggcttgggagtgagcagagaagccaagcccccgctaggtacagtttgcagtccgcaaatgcctccagcttatcaagtggtcagcttaaatctccttctctctcacagtcccaggcatcccgcgtgttggggcagtcatcctcaaaacccgctgccgctgctaccgggcccccacccggaaacacaagtagcactcagaaatggaaaatctgtaccatttgtaacgagctcttccctgaaaatgtgtattccgttcatttcgaaaaggagcataaggccgagaaagtgcccgcggtggcaaactacataatgaagatacataatttcaccagcaaatgcctgtattgtaatagatatttaccaaccgacaccttgctgaaccatatgcttatacacggcttgtcttgcccctattgtcggtcaaccttcaatgatgtggagaagatggccgcccatatgcgcatggtgcacatagacgaggaaatggggcccaaaaccgattccaccctgtcctttgacctgacactacagcagggctcacacaccaacatccatttgctggtgacaacatataatttacgggacgcccctgccgagtcagtcgcatatcatgcacagaacaaccccccagttccaccgaagccccagcctaaggtgcaagaaaaggccgatatccctgtgaaatcttctccccaggctgctgttccttataagaaggatgtgggaaaaacattgtgccctctctgttttagtatactcaaaggccccatctctgatgctctagctcaccacttacgggagcggcaccaggttatccagacagtgcaccccgtggagaagaaactgacctacaagtgcattcactgcttgggagtgtataccagtaatatgacagcctctacaattacactgcacctggtccactgccgcggcgtcggtaaaacgcagaacggacaggataaaacaaacgcccccagcagactgaaccagagccccagtctggcaccggtaaagaggacctacgagcagatggaattcccgctgctgaaaaagagaaagttggacgacgatagcgatagtccatcattctttgaggagaaaccagaagagcctgttgtgcttgctctcgaccctaaaggccatgaagatgattcatacgaggcgcgtaagtcctttctgaccaaatactttaataaacagccctacccgacacggcgggagatagaaaagttagcggcgtccctgtggctgtggaagtctgatatcgcctctcacttctctaataaacgtaagaaatgtgtgcgtgactgcgaaaaatacaaacctggagtgctcctgggatttaacatgaaagagctcaacaaggtgaaacacgaaatggacttcgacgcggagtggctcttcgagaaccacgacgagaaggactcccgagtgaatgccagtaaaactgcagacaagaaactcaatctcggtaaagaagacgacagttcatctgactctttcgagaatttagaggaggaatccaacgagagcggaagccctttcgaccctgtgtttgaagttgagcccaaaattagcaacgacaatccagaggagcacgttcttaaggtgatacctgaagacgcctccgagagtgaggagaaacttgaccagaaagaagacggttctaagtatgagaccattcatctgaccgaggagccgacgaagctcatgcataatgcctccgattcagaggtggaccaggacgatgtggtcgaatggaaagacggagcctctcccagtgaatccggccccggctctcagcaggtctcagacttcgaggataacacctgtgaaatgaaacccggtacttggagcgatgagtcctcccagagtgaagacgctagaagtagtaaacccgcggccaagaagaaggcaacgatgcagggcgacagggagcagcttaaatggaagaacagctcgtatggaaaagtggaagggttttggtccaaggatcagagccagtggaaaaacgcctctgagaatgacgaacgcttatccaatccccagatcgagtggcagaactcaactatcgatagcgaggacggagagcagtttgataatatgactgacggggtagcggaacctatgcatggctctttagccggggttaagctttccagtcagcaggct

SEQ ID NO: 321421 - DNA, 3306 bp, Artificial Sequence
  derived and/or modified sequence
atgtttcaacttcctgtcaacaatctggggtccctgaggaaagcacggaagacagtcaagaagattctgtctgatattggtctggaatattgcaaagaacatatcgaggatttcaagcagtttgagcccaatgacttctatctgaagaacacgacctgggaggacgtggggctttgggatcctagcctgaccaagaatcaggactacaggactaaacccttctgctgcagtgcctgtcccttcagctctaagtttttcagcgcctacaagagccacttccggaacgtgcattctgaagatttcgagaaccgaattctcctcaactgcccatactgtacatttaatgccgacaagaagaccttggaaacgcacattaagattttccatgcgcccaacgccagcgctcctagttcgtccctttcaacctttaaggataagaataagaatgatgggctgaagcctaaacaggcagacagcgtggagcaagccgtatactattgcaagaagtgcacatacagagatccgctctacgaaattgttcggaagcatatctacagagaacactttcagcatgtagcggccccctatatcgctaaagctggggagaaatcactgaatggagcggtccccctgggaagtaatgcgcgcgaagaaagtagtatccattgtaagaggtgcctgttcatgccgaaatcttacgaagcattggttcagcacgtgatcgaagaccacgaaagaatcgggtatcaggtgaccgccatgattgggcacactaacgtcgtggttcctcggtccaaaccactgatgctcatcgcgccaaaaccacaggataagaagagcatggggctcccaccccggattgggagcttggctagcgggaatgtgcgaagcctaccctcacagcagatggtgaatcgtctatcgatccccaagccaaatctcaatagcacaggggtcaatatgatgagcagtgtgcatctccagcagaataactacggagtgaaatctgtcggtcaaggatactccgtggggcaatcaatgcgattgggcctgggcgggaatgcaccagtgtcaatcccccagcagtcacagtcagtgaaacagctgcttccatcaggcaacggacggagttatggattaggctctgaacaacggtctcaggcccccgcaaggtactccttacagagcgcaaacgccagttccctgagctccggccagctgaagagtcccagtctgtcccaatcgcaggccagtagggtgctgggccagtccagctcaaaacctgccgctgccgccaccgggccccctcccggtaacactagctcgactcagaagtggaagatctgtactatttgtaatgagctctttcctgagaatgtctactccgtacatttcgagaaagaacacaaggccgagaaggtgcctgcagtggctaattacattatgaagatccataatttcacttccaagtgcctgtactgcaataggtatcttcccactgacacactattgaaccacatgcttatccacggcctgagttgtccctactgtcgctctacctttaatgatgtagagaaaatggctgcgcatatgagaatggtacacatagacgaagaaatgggacctaagacagactctactttatccttcgacctgacattgcaacagggctctcataccaacatacacctccttgtcacaacatataatttgcgtgatgctcctgctgaaagcgtagcttatcatgcccagaataatcctccagtgcctcccaagccgcagcccaaggtgcaggagaaggcagatattcctgtaaaatctagtccacaagctgctgtcccctataagaaggatgttggtaagaccctatgccccctgtgcttttcaatcctgaagggccctatttccgacgcgttggcacatcacctgcgggaacgacatcaggtgatccagaccgtccacccggtggagaaaaagctgacatataagtgtattcattgcctcggtgtctacacatccaacatgacagcatccacgattaccctacatctggtccattgcaggggcgtcggtaaaactcaaaacggacaagacaagaccaatgcgccttcgagacttaatcagtcaccatccctggctccagtaaagaggacatatgaacagatggagtttccccttctgaagaagagaaagttggatgacgactccgactctccatcgttcttcgaggagaaacctgaggaacctgttgttctcgccctggacccaaagggacacgaggatgacagctacgaggccagaaaatctttcttaacgaagtatttcaacaagcagccttatcccactcggcgtgagattgagaagctggcggcctccctgtggctatggaagtccgatattgcctctcacttttccaataaaaggaaaaaatgtgtgagagattgcgagaaatataagcccggagtgctcctgggattcaacatgaaagagctgaataaggtgaaacacgaaatggattttgatgctgagtggctgttcgaaaaccacgacgaaaaagattcgagggtcaatgcttcaaagaccgccgacaaaaagctcaacctgggaaaagaggacgacagttcctctgattcttttgagaatctggaagaggaaagtaacgagagcggctccccatttgatcctgtgttcgaggtggaacccaagatttctaatgataacccggaagaacatgtccttaaagtgatcccagaggacgcttccgagagcgaagagaaattggaccagaaggaggacgggagcaaatacgaaactatccatctaactgaagagcccaccaagctgatgcataacgcatccgattctgaggttgaccaggatgacgttgtggagtggaaggatggagcctccccttctgagtcgggtccagggagtcagcaggttagtgactttgaggacaatacctgtgagatgaagcccggaacatggtctgatgagtctagtcaaagtgaggacgcccggtcctctaaacctgcagccaagaaaaaggccacaatgcaaggcgaccgggagcagctcaagtggaagaactcctcgtacggcaaggtggagggcttttggtccaaggaccagagtcagtggaaaaacgctagcgaaaacgatgagcggctctcaaacccccagatcgaatggcaaaattcgacaatcgactccgaggacggcgagcagttcgacaatatgaccgacggggtggccgaacctatgcacgggtctctagccggcgttaagctgagctctcaacaggcc

SEQ ID NO: 321422 - DNA, 3306 bp, Artificial Sequence
  derived and/or modified sequence
atgttccagctccctgtcaataatcttggctcgctgagaaaagctcgcaagactgtgaaaaagatcctctcagatattgggctcgagtattgcaaggagcatatcgaggatttcaaacagttcgagccaaacgacttctacctgaagaatactacttgggaggacgttggactgtgggacccgagtctgactaagaatcaagattaccgcactaagcctttctgctgcagcgcctgcccattttcgtcgaagttcttctcagcatacaagtcccatttccggaacgtgcactcagaggactttgaaaatagaatcctgttgaactgcccctactgtactttcaacgcagacaagaaaaccctcgaaacccacattaagatattccacgccccaaatgcctcggctccctcctcatcactgtcaacgttcaaagataagaacaagaatgacgggctgaagccgaagcaagctgattcggtggaacaggcagtgtactactgcaaaaaatgtacgtaccgcgacccgctgtatgaaatcgtccgcaagcacatctaccgggagcatttccaacacgtcgctgctccatacatcgccaaagccggagaaaagtccctcaatggagccgtgccgctgggatccaacgcccgcgaggaaagctccatccactgcaagagatgcctcttcatgccaaagagctacgaggcgctggtccagcacgtcatcgaggaccatgagcgaatcgggtaccaggttactgcaatgatcggtcatactaacgtggtcgtgcccagatcgaagcccctcatgctgatcgcgccgaaaccgcaggataagaaatcgatgggccttcctccgcggatcggttcgcttgcgtcgggaaacgtgcggagcctgccgagccaacagatggtcaaccgcctgtcgatcccgaagcctaacctgaactccacgggcgtgaatatgatgagctccgtccacctccagcagaacaactacggggtcaagtccgtgggacagggctacagtgtgggacagagcatgcgcctgggactcggaggaaacgcgccggtgtcgattccacagcagtcgcagtcagtgaagcagctgttgccgtcgggcaatggacgctcgtacggactggggtccgaacagcgctcccaggcccctgcacggtacagcctgcaatctgccaacgcctcctccctctcctcgggacaactcaagtcgccgtcactgagccagagccaagcgtcaagggtgctgggacagtcctcgtcgaagcctgcagccgccgccaccggcccaccgccaggcaacacgagctcaactcaaaagtggaaaatttgcactatctgtaatgaattgttcccagaaaacgtctactcagtgcacttcgaaaaggaacataaggcggaaaaggtgccggctgtcgcgaactatatcatgaagatccacaactttacgtcaaaatgcctgtattgcaatcgctacctgccgactgacaccctcctgaaccatatgctgatccacggcctgtcctgtccatactgtcggtccaccttcaacgatgtggaaaagatggcggctcacatgcggatggttcatatcgatgaggaaatgggccccaagaccgactctaccctgtcctttgacctcaccttgcagcagggaagccacactaacatccacctcctggtgaccacctacaacctgcgggatgccccggcagaatccgtcgcctaccacgcgcagaataatccgcccgtgccacctaaaccgcaacccaaggtgcaggaaaaggccgacatcccagtgaagtcgtcgccgcaggccgcagtgccgtacaagaaagatgtgggtaagaccctgtgcccactttgcttctccatcctcaagggaccgatcagcgatgctctggcccatcatctgagggagagacaccaggtgattcagactgtgcacccagtcgaaaagaagctgacctacaagtgcattcattgcctcggagtgtacaccagcaatatgactgcgtcgactatcacgctgcacctcgtccactgtcggggagtgggaaagacccaaaacgggcaggacaaaactaatgcgccttcacgactcaaccagagccctagcctggcacctgtgaaacggacctacgagcagatggaattcccactgctgaaaaaacggaagctcgacgacgactcagattcaccgtcatttttcgaggaaaagccggaagaaccggtcgtgctggcattggaccctaagggtcacgaagatgactcttacgaggccagaaagtcgttcctgaccaaatactttaacaaacagccatacccgaccaggcgcgaaatcgagaagttggcagcgtcgctttggttgtggaagagcgacatcgcctcccatttctcgaataaaagaaagaaatgcgtgagggattgtgaaaagtacaaacccggggtgctccttggattcaacatgaaggaacttaacaaggtgaagcacgagatggactttgacgccgaatggctctttgagaatcatgacgaaaaggattctcgtgtgaacgcgagcaaaaccgccgataagaagttgaacctcggaaaagaagatgatagctccagcgactcgttcgagaacttggaagaagagtccaatgagtccggatcacccttcgatccggtgtttgaagtcgaacccaagatctcgaatgacaaccctgaagagcacgtacttaaggtgattccggaggatgcatctgagagcgaggaaaaactggaccaaaaggaggacgggtccaagtacgaaactatccatctcaccgaggaaccaaccaaacttatgcacaacgcctcagattcggaggtcgaccaggacgatgtggtggagtggaaagacggagcgagcccttccgaaagcggccctggaagccaacaagttagcgacttcgaagataacacttgcgagatgaaaccgggaacttggtccgacgagtcatcgcaatctgaggacgcgagatcctcgaagccggctgccaagaagaaggccaccatgcaaggcgaccgcgagcagctgaagtggaagaactcgtcctacggtaaagtcgaaggtttttggagtaaagaccagtcccaatggaagaacgcgtcagaaaacgatgaaaggctgagcaatccgcagatcgaatggcaaaattccaccatcgatagcgaggacggcgagcaattcgacaacatgaccgacggagtcgctgaaccaatgcatggctccctcgcaggtgtgaagctgtcgtcacaacaagct

SEQ ID NO: 321423 - DNA, 3306 bp, Artificial Sequence
  derived and/or modified sequence
atgttccagttgcccgtgaacaacctgggaagtctgaggaaagccaggaagacggtgaagaagatcctgagtgacatcggcctagagtattgcaaagagcatattgaggattttaagcagttcgagccaaacgacttctatctgaagaacacaacctgggaagacgttgggctgtgggatccgtcattgaccaagaatcaggactatcgtacgaagcctttctgctgctccgcttgcccctttagtagtaagttcttctcagcctacaaaagccacttccgcaacgtgcatagcgaagattttgaaaatcgcatcttgctgaactgcccctactgcaccttcaatgccgacaaaaaaacactcgagacccacataaaaatatttcacgctccaaatgcaagcgccccctcatcctcactgtccacctttaaagataaaaacaaaaacgatggcttaaagcctaaacaggccgattctgtggagcaggctgtgtactattgtaagaagtgtacttatcgggatccactgtatgagatcgtgcggaaacatatttaccgggagcattttcagcatgtggccgccccctatatagcaaaggctggagagaagagcctcaatggggctgtcccactggggtcgaatgcacgcgaggagagcagtatccactgcaagcgttgtctattcatgcctaagtcttacgaggctctggtgcagcacgtaatcgaggatcacgagcgcatcgggtaccaggtcactgccatgattggccatactaacgtggtcgttcccaggagcaaaccactaatgcttattgcccccaagccccaagataaaaagtcaatggggttgccgcctcgcatcggctctctcgcctctgggaacgtgcggtctttgccaagccagcagatggttaacagactgtccatacctaaacctaatttgaactccaccggagtcaacatgatgagctctgttcacctgcagcaaaacaattatggggtcaagtcagtgggtcagggctactctgtggggcagagcatgcggctcggcctgggagggaacgcccccgtttctatacctcagcaaagccagtcagtgaagcagctgctgcccagcggaaatggtcgcagctatggcctcgggagcgagcagcgttcccaagctcctgccagatacagcctccaaagcgcgaatgcgtcttcactgagcagtggtcaactaaagagcccatctctgtcccagtcgcaggcgagccgcgtgttagggcagtccagctccaagcccgccgccgcagctacagggccacccccagggaataccagcagcactcagaaatggaaaatctgcaccatatgtaatgagctcttcccagagaacgtgtattccgtgcactttgagaaggagcacaaggctgagaaggtgccagccgtggcgaactatataatgaagatacacaattttacgagcaagtgtctgtattgtaacagatacctccctacagacacactcctgaatcatatgctcatccacggccttagttgtccttactgccgttccactttcaatgatgtcgagaaaatggcagctcacatgcggatggtgcatattgatgaggaaatgggacccaagaccgacagcacattaagctttgacttgaccttacagcagggctcacataccaatatccacctgcttgtgacaacctacaacctgcgggacgctccggccgagagcgtcgcttatcatgcacagaacaatccccccgtacctcctaagcctcagcccaaagtacaggagaaggcagatattcctgtgaagagcagcccacaggctgcagtgccatacaaaaaggatgtcggtaagacactctgcccgttgtgctttagcatactgaaggggcctatatcagatgcgctggcccatcacctgagggaacgccatcaggtgatccagactgtgcatccagtggagaaaaaacttacctacaagtgtattcactgcttaggcgtctacaccagtaatatgaccgcctcaacaatcaccctgcacctggtgcattgcaggggcgtcgggaaaacacagaatggtcaggacaagaccaatgccccctctaggttaaatcaaagcccaagtctggccccagtgaagcggacctatgagcagatggaattccctcttctcaaaaaacgaaaacttgatgatgactcagattcgcccagtttcttcgaagaaaagccagaggagccagttgtgctcgccctcgatccaaaaggccacgaggacgacagctacgaagctcgtaagtcgttcttgaccaagtactttaataagcaaccttatcccactcgtcgagaaatcgaaaagttggccgctagcctgtggttgtggaagtcagacatcgcctcccatttcagcaacaagagaaaaaaatgcgtgcgcgactgtgagaagtataagcccggtgtactccttggattcaacatgaaagaactcaacaaagttaagcacgagatggattttgacgccgaatggttgttcgagaatcatgacgaaaaagacagcagggttaatgcttcaaagactgcggataaaaaactcaacctcggcaaggaagatgactcctcctccgatagctttgagaatctggaagaagaatccaacgaaagcggttctccatttgatcctgtgtttgaggtcgaaccgaagatctctaacgacaatcccgaagaacatgtgctgaaagttatcccggaagatgcatccgagtccgaggaaaagctcgaccagaaggaagatggaagcaaatatgagactatacacctcacggaggagcccactaaactgatgcacaacgcgagcgatagtgaggtggaccaagatgatgtcgttgagtggaaggacggcgccagcccttccgaatccggccccggaagccagcaagtctctgacttcgaggacaacacctgtgagatgaagcccggcacgtggtcagatgagtcttcccagtccgaggacgcccggagcagcaagccagctgcaaaaaaaaaggctacgatgcagggagatcgggaacagctgaagtggaaaaatagcagctatggtaaagtggagggtttctggtctaaggaccagagccagtggaagaacgcatccgagaacgacgagcgtctgtccaatccccaaatcgaatggcagaactcaacaatagattccgaggatggagagcagtttgacaacatgactgatggagtggccgagcccatgcacggctctttagctggcgttaagctgagtagccagcaggcc

SEQ ID NO: 321424 - DNA, 3306 bp, Artificial Sequence
  derived and/or modified sequence
atgtttcagttgcctgtgaataacctcgggtcactgaggaaagcgagaaaaaccgtcaaaaagattctgtcagacatcgggttagaatactgtaaggaacatatcgaagattttaagcagtttgagcctaatgatttctatctgaagaacaccacgtgggaggacgtggggttatgggatccatccttgactaagaaccaagattaccgaacaaagcccttctgttgcagcgcttgtcccttcagttcaaaattcttttctgcctacaagtctcactttcgtaacgttcacagcgaggattttgagaacaggatcttactcaactgcccttactgcacatttaacgctgacaaaaagactctcgagacacatatcaagatctttcacgctcctaatgctagcgcccctagcagcagcctctcgacgttcaaggacaaaaataagaacgatggtctcaaacccaagcaggctgattctgtggaacaggctgtgtactattgtaaaaagtgcacatacagagaccctctgtacgagatcgtgcggaagcacatctaccgcgagcatttccagcacgttgcggccccctatatcgctaaggcgggggaaaaatctttaaacggggccgtcccactgggaagtaacgctagggaagagtcatccatacattgcaagcgttgcctcttcatgcccaagagttacgaagccctggtgcagcacgtaatcgaagaccacgagaggatcgggtatcaggtgacggctatgattggacataccaacgttgtggtgcctaggagtaagccactgatgctaatagcacctaagcctcaggataaaaagagcatggggcttcccccaagaattggatctctggcgtcgggtaacgtgaggtcattgccgagccagcagatggtgaaccgacttagtataccaaagcctaacctcaactctactggagtgaatatgatgagctcagtgcatctccagcagaacaattacggcgttaagtcagttggacagggctattccgtaggtcagagcatgcggctcggtttgggcggcaacgctccggtgtccataccacagcaatcacagtccgtcaaacagttgttgccttccggtaatgggcggtcttacgggctcgggtcagagcaaagatcacaagctcctgcccggtatagtctccagagcgccaatgcatctagcctcagctcgggccaacttaaatccccgagcctttctcagagccaagcctcccgtgtgcttgggcaaagcagttcaaagcccgctgctgcagctactggccccccaccgggaaatacatctagtactcaaaagtggaagatctgtacaatttgcaatgagctgttccccgagaatgtgtatagcgtacacttcgaaaaagagcacaaagcagagaaggtcccagcagtcgccaattacatcatgaaaattcacaatttcacctcgaagtgcctgtactgcaaccgctacttgcctactgataccttgctgaatcatatgctcatccacggtctttcttgtccctattgccggtcaactttcaacgatgttgagaagatggctgctcacatgaggatggttcacattgacgaagagatgggaccaaaaacagactcaacactttcatttgacctaacactccagcagggatctcacacaaatattcatctccttgtcacaacatacaatttgcgagacgcacccgcagagtctgtggcttatcacgctcagaacaatccgcccgtgccgcctaaaccacagccaaaagtacaggaaaaggctgatatcccagtcaagagttcgccacaagcagctgttccttacaaaaaagatgtggggaagacactatgccctctgtgcttttccattttgaagggacctatttctgacgctttagcccaccacctgcgggagaggcatcaggtcattcagactgtgcaccccgtagagaaaaagttaacttacaaatgcattcactgtttgggggtgtatacgagcaatatgaccgcctctaccattacacttcacctcgtgcactgccggggcgtgggaaaaactcagaacggccaggacaaaactaatgccccttcgagactcaatcagtctccctccctagctccagtcaaaagaacttatgagcaaatggagtttccactgctcaaaaaaaggaagcttgacgacgatagtgacagtccctccttcttcgaagaaaaaccagaggaaccagtggtgttggctttggacccaaagggccatgaagatgacagctatgaggcccggaagtctttcctgacaaaatacttcaacaagcagccatatcctacacgcagggaaatcgaaaagcttgccgcttcgctatggctgtggaagtctgacatagcgtctcacttcagcaacaagaggaaaaagtgtgttcgggattgcgaaaaatataagccaggggtcctcctgggattcaatatgaaggaactgaataaggttaagcatgagatggacttcgatgctgaatggctgtttgaaaaccacgatgaaaaagattcacgagtgaatgcatccaagaccgccgacaagaagctaaacctgggaaaggaagacgacagcagttccgacagctttgaaaacctggaggaggagtccaacgagtcaggctccccttttgatcccgtgttcgaggttgaaccaaaaatttcgaatgacaacccagaggagcatgtgctgaaggttattcccgaggatgcctctgaatccgaagagaagctcgatcagaaggaggatggctcaaagtatgagaccatccatctgacggaggagccaaccaaactaatgcataacgcctccgatagtgaggtggaccaagatgatgtggtggagtggaaagatggcgcttcaccttctgagtccgggcccggaagccagcaggtttctgacttcgaggacaacacatgtgagatgaaaccgggaacctggagcgatgagagcagtcagtccgaggacgcacggtctagcaaaccagctgctaaaaagaaggccaccatgcaaggcgatcgggagcaattaaaatggaagaattctagttatgggaaagtggaaggattttggagcaaagatcagtcccagtggaaaaatgcttctgagaacgatgaacgtctttcaaaccctcagattgaatggcagaatagtaccatcgacagtgaagacggggaacagttcgacaacatgacagatggcgttgccgaacctatgcatggaagcctggccggggtaaagctgagctctcaacaggct

SEQ ID NO: 321425 - DNA, 3306 bp, Artificial Sequence
  derived and/or modified sequence
atgtttcagttgccggttaataacttgggcagcttgcgaaaggctagaaaaacggtaaaaaaaatcctgagcgatataggattggaatactgcaaggaacacatcgaggatttcaagcaatttgagcccaatgacttttacctgaaaaataccacctgggaagacgttggtctttgggatccctccctcaccaagaatcaagattacaggacgaagcccttttgttgtagtgcctgtccattcagtagcaagtttttcagcgcctataagtcccacttcaggaacgtgcacagcgaggacttcgagaataggatcttactgaactgtccctattgcacctttaacgctgacaagaagactctggagacgcacattaaaattttccatgcgcccaatgctagtgccccctcatcgtccctgtcgacctttaaagataagaataagaacgacggccttaaacccaagcaggctgacagcgtggagcaggcagtatactattgtaaaaaatgcacctatcgagaccccttgtacgagatcgtgcggaagcatatctacagggaacacttccaacacgtggccgccccgtacatagctaaggctggagagaagtctctcaatggggctgtgccgctcggctccaatgctagagaggaatcttcaatccactgcaaacgctgcctgtttatgccaaaaagctatgaggcgctggtacagcacgtgatagaggaccatgagaggatcggctaccaggtgaccgccatgatcggccataccaatgtcgtagtgccccggagcaagcccttgatgctgatcgctccaaaacctcaagataagaagagcatgggccttcccccacgaattggctctttggcttctggcaatgtgagaagcttgccctcccagcagatggtgaaccggctgtctatcccgaagcccaatctcaattccaccggcgttaacatgatgtcttctgtccatctgcaacagaataactacggcgtaaaatccgttggacagggctactccgtcggccagtcaatgagacttggccttggaggtaatgctccggtgtccatcccgcagcagtcacaatcagtgaagcagttgttaccctccggtaatggtcggtcatatggcctgggatcagagcaaagatcgcaggcacctgcccgttacagccttcaatctgcgaatgcctcctcactgagttccgggcaattaaagagcccctcactgtcacagagtcaggcctctcgcgtgctgggacagagtagttctaaacccgcagcagcagctactggtccccccccaggtaacacttcatccacccagaaatggaaaatctgcacgatatgcaatgagctttttcccgaaaatgtctactcagttcattttgagaaggaacacaaagccgagaaagtgcccgcagtggcaaactacataatgaagatccacaactttacatctaaatgcctgtactgtaaccgctatctaccaaccgacacactcttaaatcacatgcttatacatggcctgagttgtccatactgcaggtccaccttcaatgatgtggaaaaaatggctgcacatatgaggatggtacacattgacgaggagatgggccccaagaccgatagtaccttatcgttcgatctgacattgcagcagggtagccacacgaacatacacctgctggtgaccacctataacctgcgcgatgctcctgcagaaagtgtggcgtaccacgctcagaataatcctcctgtccctcctaaaccccagcctaaagtccaggagaaggctgatatccctgtgaaaagtagtcctcaggctgcagttccgtacaaaaaggacgtcggaaagaccctgtgtcccctgtgcttttcaatactgaaagggcctatcagcgatgctctggcccatcatttaagagagaggcaccaggtcatacagaccgttcaccctgtggagaagaaactcacttacaagtgcattcactgcctgggggtttacacttccaatatgacagcaagcaccattaccctccacctcgtgcattgccggggcgtcggcaaaacacaaaacggccaggacaaaactaacgccccgagccgattaaatcagagtcctagtttggcgcctgtaaaacggacatacgaacaaatggagtttccccttcttaaaaagcggaagttggatgacgacagcgactcaccgtcgttcttcgaagagaaaccagaggaacccgtggttttggctctggatccaaaggggcacgaagacgattcatacgaggcacgtaaatctttcttgaccaagtattttaataagcagccttacccaacgagaagggaaatcgagaaactggcggcctccctctggttatggaaatctgacatcgcctcccatttttcaaacaaaagaaagaagtgcgtccgtgactgcgaaaagtacaagcccggggtattactgggtttcaacatgaaagagttgaataaggtcaagcacgaaatggatttcgatgcagaatggctgttcgaaaaccacgacgagaaagactccagagttaatgccagtaagactgctgacaaaaagttaaatctgggtaaagaagacgattctagcagtgatagcttcgagaacctggaggaggaatcaaatgaaagcggttccccttttgaccctgtcttcgaagtggagcctaaaatatctaatgataacccagaggagcatgtgttaaaggtcattccagaggacgcatccgagtccgaagaaaagctggatcaaaaggaggacggttcaaagtacgaaacgatccatctgactgaagaaccgacaaaactgatgcacaacgcatcggactctgaggtggaccaggatgacgtggttgagtggaaagacggagctagccccagtgagtcaggcccaggctcccaacaagtgtccgattttgaggacaatacctgtgagatgaagccaggaacttggagcgatgaatctagccagagtgaggacgctaggtcatcaaagcccgcggctaaaaagaaggccaccatgcagggagatcgagaacagctgaaatggaaaaatagcagctatggcaaggtggagggattctggagcaaagaccaaagtcagtggaagaatgccagcgaaaacgacgagcgcctatccaatccccagattgaatggcagaattccacaatcgactccgaggacggagagcagtttgataatatgacggacggcgtggcggaacctatgcatggtagcctagctggcgtgaagttatcgagccagcaagct

SEQ ID NO: 321426 - DNA, 3306 bp, Artificial Sequence
  derived and/or modified sequence
atgttccaactcccagtgaacaatctgggatcgttgagaaaagcgagaaagaccgtcaaaaagatcctgtcggatattggtctggaatactgtaaggaacatatcgaggatttcaagcaattcgagccaaacgatttctacctgaagaacaccacctgggaggacgtcggactttgggatccgtcattgactaagaatcaagattaccgtactaagcctttttgttgctccgcttgtccgtttagctcgaagttctttagcgcctacaagtcacattttcgcaatgtgcactcagaagatttcgagaaccggatcctgcttaactgtccatattgcacgtttaacgcagacaaaaagacccttgaaactcacattaagattttccatgcacctaatgcatctgcaccgtctagttcgctgtccactttcaaagataagaataagaacgatgggctcaaaccaaagcaagcagattcagtggagcaggcagtgtattactgcaagaaatgcacctacagggatcccctgtacgaaatagtgcgaaagcatatctatcgtgagcattttcaacacgtggcagcaccctacatcgcaaaagccggagaaaagtccctgaacggtgcagtgccactcggaagcaacgcacgtgaggaatcgagcattcattgtaagcggtgtctgttcatgcctaagtcctacgaagccttggtgcaacacgtgattgaagatcatgaacgcatcggataccaggtcactgcgatgataggacatacgaacgtggtggtgccacgtagcaaaccgctgatgctcatagcaccaaagccacaagacaaaaagtcaatggggctccctcctagaattgggtcccttgcatcaggtaatgtcagatcgcttccctcccaacaaatggttaatagactttcgattccgaaaccaaacctcaactcaaccggggtcaacatgatgtcatccgtccacctccagcaaaacaactatggagtgaagtcggtggggcagggctactcggtcggtcagtctatgcgacttggactgggtgggaacgcaccagtttccatacctcaacaatcccaatcggtgaagcaacttctcccttcgggaaatggaagatcgtacggtcttgggtcggaacagcgttcgcaggcaccagctcgttactcactgcaatcggcgaatgcatcgtcactgtcctcgggccagctgaagtccccttcgttgagccaatcccaggcatcgagagtgcttggccagtcgtcaagcaaacccgccgcagcagcgaccggacctccaccaggtaacactagttccactcaaaagtggaagatatgcaccatttgtaatgagttgtttcccgaaaacgtgtactcggtgcatttcgaaaaagaacacaaggcagaaaaggtgccggcagtcgcaaattacatcatgaagattcataactttacgagcaagtgtctgtactgtaacagataccttcctaccgatactctgcttaatcatatgctgatccacggtctgtcatgtccatactgccggagcaccttcaatgacgtcgaaaagatggccgcacatatgagaatggtccatatcgatgaggaaatgggacccaagactgactcgactcttagctttgatctcactcttcaacaaggctctcataccaatattcacctgcttgtgacgacttacaacctgcgagatgcacctgcggagtccgtcgcgtaccacgcacagaataatccacctgtccctcccaagccacagccgaaggtgcaagaaaaggcagatattcctgtgaaaagctcgccccaggctgcagtgccatacaagaaggacgtgggaaagactctgtgccctctgtgtttttcgattctcaagggtcctatctcggatgccctcgctcatcatttgcgcgaaagacaccaggtgatccaaaccgtgcatccagtggaaaagaagctgacctacaaatgtattcactgccttggagtctacacttcaaatatgaccgcctcgaccatcaccctccatctggtgcactgtcgtggtgtgggcaagacccagaacggccaggataagaccaacgccccttccagacttaatcaatcgcccagcttggcacctgtgaagcgcacttacgagcaaatggagtttccactcttgaaaaaacgcaaacttgatgacgactcagacagccctagcttttttgaggaaaaacctgaagagccagtcgtgctggctctggacccaaaggggcacgaggacgacagttacgaagcacggaaatcctttttgaccaagtacttcaacaagcagccatacccaacccggcgcgaaatcgagaagctcgcagcgtcactgtggctctggaagtccgatattgcaagccactttagcaacaaacgcaagaagtgtgtgcgggattgtgaaaagtacaagcctggagtgcttctcggatttaacatgaaggagcttaacaaggtgaaacatgaaatggattttgacgccgagtggctgttcgaaaatcatgatgagaaggactcccgggtgaatgcgagcaagaccgcggacaaaaaactgaatcttggtaaagaggacgactcgagcagcgactcgtttgagaacctcgaagaagaatcgaatgagtccgggagccctttcgaccctgtgtttgaagtcgaacctaagatatccaatgacaacccggaggaacatgtgcttaaggtgattcccgaggacgcatccgaatcggaagaaaaactcgaccaaaaggaagatggctcaaagtacgagactatccaccttaccgaggagccaaccaaacttatgcataacgcatccgatagcgaagtggaccaagatgatgtggtggaatggaaggacggcgctagcccttctgagtcgggaccaggatcgcagcaggtgtccgacttcgaggataatacttgtgagatgaagcccggaacctggagcgatgaaagctcgcaatccgaggatgcacgatcatccaaaccagcagctaagaaaaaggcaaccatgcaaggagatcgtgaacagcttaagtggaaaaacagctcatacggaaaggttgaaggtttttggtcaaaggatcagtcacagtggaaaaatgcatcagaaaatgatgagagactctctaacccacaaattgagtggcaaaacagcaccattgacagcgaggacggagaacaatttgacaatatgaccgacggggtggctgaacctatgcatgggagccttgcaggtgtcaagctgagctcccagcaggca

SEQ ID NO: 321427 - DNA, 3306 bp, Artificial Sequence
  derived and/or modified sequence
atgttccagctgcctgtaaacaatctgggaagtctccgcaaagctaggaagaccgtaaagaagatcctgagcgatataggccttgagtactgtaaggaacacattgaggatttcaagcagttcgaaccgaacgatttttacctgaaaaatacaacttgggaggacgtgggcctgtgggacccatcactcactaaaaatcaagattacaggaccaagcccttctgctgttccgcttgtccctttagcagtaaatttttctctgcatacaaaagccacttccgcaacgtgcattccgaggactttgaaaacaggatcctcctgaactgtccatactgcacgttcaacgctgacaaaaagactttggagacccacattaagatcttccatgcgccgaatgcttccgcgccctcctcctctttgtcaaccttcaaagataaaaacaagaacgacggattgaagccaaaacaggccgacagtgtggagcaagctgtgtattattgtaaaaagtgtacctatagagatccactgtacgaaatcgtaagaaagcacatttatagagagcactttcagcacgtagccgccccttacatagcaaaggcgggcgagaagtccctcaacggcgccgtgcctctgggatctaacgcccgcgaagaaagtagcatccactgcaagcgctgcttgttcatgccgaagtcttacgaggcactggtccagcatgtgatagaggatcacgagcgcatcggctatcaagtgacagcgatgatcggacatactaatgtcgtcgttcctcgctctaaaccgttgatgctgatcgcccctaagccacaggataaaaaatccatgggactgcccccgagaattggatctctcgcaagtggtaatgttcgctcactgccttcccagcagatggtcaacagactcagtattcccaagcctaacctcaatagtaccggtgtgaacatgatgagttccgtccatctgcagcagaataactatggcgttaaatccgtcggccagggctactctgttggtcaatctatgagactcggattgggtggaaatgcccctgtgtctatcccccagcaatctcaatcagtcaaacagttgctgcccagcggtaatggcagatcctacggtctgggttccgaacaacgctctcaggcgccggcgagatactccctccaaagcgctaacgccagcagcctgagcagtggccaattgaagtccccatccctgagtcagtcccaggcctctcgcgtgttgggccagtctagctccaagcccgccgcggccgctaccggacccccaccaggcaacaccagcagcactcaaaagtggaagatatgcaccatctgtaatgagctgttccctgagaacgtgtactccgtgcactttgaaaaagaacataaagctgagaaggtacctgccgtcgcaaactatatcatgaagatccacaatttcacatccaagtgcctgtactgcaatcgctacctgcctaccgacacgcttctgaaccacatgttgatccatggacttagttgcccttattgcaggagcacctttaacgacgtcgaaaagatggcggctcatatgcgcatggtgcacatagatgaggaaatgggcccgaagaccgattctaccttgtcattcgacctgaccttgcagcagggatcacacaccaacatacatctgctcgtcacaacctacaacctccgcgatgctcccgctgagtctgtggcataccacgctcagaacaatccccctgtaccccctaagccccagccaaaagtgcaggagaaagcggacattccagtcaagtcttcaccacaagcggctgtcccgtacaagaaggatgtgggtaagactctctgtcctctttgcttttctatcctgaaaggacctatttcagatgcccttgcacaccatctgcgcgaaaggcatcaggttattcagactgttcatcctgtggagaaaaagcttacatacaagtgtattcactgtctcggtgtgtacacctcaaatatgacggcttccaccataactcttcacctcgtgcattgccgcggcgtcggtaagacccagaacggtcaagacaaaactaatgcaccatctaggctcaaccaaagcccatcccttgccccagttaagaggacttacgaacagatggaattccccctgctcaagaaaagaaagctggacgatgatagtgattctccttcttttttcgaagagaagcctgaggaaccagtagtgctggccctcgacccaaagggtcacgaggatgacagttatgaagcccgcaagtctttcctcaccaagtactttaacaaacagccataccccactagaagggaaatcgagaagctggcagcctctctgtggctgtggaagtccgatattgctagtcattttagtaataagagaaagaagtgtgtcagagattgcgagaagtacaagcctggagtgctgctcggctttaatatgaaggaacttaataaggttaagcacgaaatggattttgacgccgagtggctcttcgagaaccacgacgaaaaagactcccgcgtgaacgcctccaagaccgccgataaaaagctgaatctcggtaaggaggatgattcttcctcagactctttcgaaaatttggaagaggaaagcaacgaatctggctctcctttcgatcctgttttcgaggtggaaccgaagatctctaacgacaaccctgaagagcatgttctgaaggtgatccccgaagatgcaagtgagtcagaggagaagcttgatcaaaaggaggacggctccaaatacgaaacgatccacttgacagaagagccaacgaagctcatgcacaacgcctccgacagcgaagtcgatcaggacgacgtcgtcgagtggaaagatggtgctagtccctccgaatcaggcccaggctctcagcaagtgtcagatttcgaggacaacacctgcgaaatgaagcctggaacgtggtctgacgagtcctcacagtctgaagacgccagatcttccaaacccgcggcgaaaaagaaggcaacgatgcaaggtgaccgcgagcaactgaaatggaaaaacagctcttatggaaaggtggagggcttctggtctaaggaccagagccagtggaagaatgcttccgagaacgacgagaggctcagcaacccccagatcgagtggcagaacagcactatcgattctgaggacggagagcagtttgacaacatgacagacggtgtggctgagcctatgcacggaagtcttgccggagtgaagctgtcaagtcagcaggct

SEQ ID NO: 321428 - DNA, 3306 bp, Artificial Sequence
  derived and/or modified sequence
atgttccagctgcccgtaaataacctgggcagtctccgaaaagctagaaagacagtgaaaaagatcctctctgatataggattagagtactgtaaggagcacatagaagacttcaagcagtttgagcctaacgatttttatctgaaaaatacaacgtgggaagatgttgggctgtgggatccatctttgaccaaaaatcaggactataggaccaagccgttttgctgtagtgcgtgcccttttagttccaagtttttctccgcatacaagtcacacttcaggaatgttcactccgaggactttgaaaaccgaattctactaaactgtccttactgcaccttcaatgccgataagaagactctcgaaacccatatcaaaatattccatgctccaaatgcatccgcaccgtccagcagcctttcaacattcaaggacaagaacaagaatgatggcctgaagcccaaacaggcggactctgttgaacaggcagtgtattactgcaaaaagtgtacatatcgtgatcccctgtacgagatcgtcagaaagcatatatacagggagcattttcagcacgtggcagccccttatatagctaaggccggcgaaaagtcactgaatggagctgtgcccctgggcagcaacgcacgggaggaaagcagcatccactgtaagcgctgcctcttcatgccgaaatcttacgaggccctggtgcagcatgtgattgaagaccacgagaggataggataccaagttacagcaatgattggccataccaacgtggtagtacctagatccaagccattgatgctcatcgccccaaaaccccaggataaaaagtcaatggggctgcctccaaggatcggatctctggccagtgggaatgttcgttctctaccgtctcagcagatggtgaatcgtctaagcatacccaagccaaacttgaacagtaccggtgtcaacatgatgtccagcgtgcacttgcagcaaaacaactacggagttaaatccgtcggccagggctactctgtgggccagagcatgaggctcggcctaggtggcaacgctccagtgagtattccacaacaatcccagtctgtgaaacaactgctgcctagcggaaatgggagatcatatggtctgggctccgaacagagatcccaagcacctgcccgatactcacttcagtccgcaaacgcttccagccttagcagtgggcaactgaagtccccatcactgagccagtctcaagcatctagagtactggggcaaagctcatcaaaacccgcagccgccgctactggtcctcccccaggtaacacctcttccactcagaagtggaagatttgtaccatttgtaatgaacttttccccgagaacgtctattccgtgcactttgaaaaggagcacaaagctgagaaagttcccgctgtcgccaactacattatgaagatccacaatttcacgagcaaatgcctatattgcaatcggtatcttcccactgacacattgctcaaccacatgttaatccatggcctaagctgtccctactgtaggtctaccttcaatgacgtcgaaaagatggccgctcacatgaggatggtgcacattgacgaggaaatgggcccaaaaaccgatagcacactgtcctttgacctaacactccagcagggtagtcataccaacatacatctgttggtgaccacgtacaacctgcgggatgcaccagccgagtccgtcgcataccacgcgcagaataacccacccgtaccccccaaaccgcagccgaaagtccaagagaaggctgacattccggtcaaaagtagccctcaggccgcggtgccgtacaagaaggacgtcgggaagactctttgtccgttgtgtttctctattttgaaagggccgatctcagatgcgctggctcaccacctgcgggagcgtcaccaggtgatccaaacggtccatcccgtggagaagaagctgacctacaagtgtattcattgcctcggagtctacacctctaatatgacagcgtctactattaccctgcatctggtacattgccgcggagtgggcaagacccagaacggtcaggataaaaccaacgccccctcccggctaaatcagagtccatctctcgctcctgtcaagaggacatatgaacagatggagtttccactcctgaaaaagagaaaattagacgacgactccgatagcccatcttttttcgaggagaagccggaagaacctgtggtcttggcactggaccccaagggacacgaagatgacagctatgaggccaggaagtcctttttaacaaagtactttaacaagcaaccctatcccactcggagggaaatcgagaagctggcagcttcgctgtggctgtggaagtcagacattgcatcgcacttttctaacaagcggaaaaagtgtgtgcgagattgtgagaagtacaagcccggcgttttgttgggattcaacatgaaagagctaaataaagtaaagcatgagatggacttcgatgctgagtggcttttcgaaaatcatgacgaaaaggactctcgcgtcaacgcaagtaagactgcagacaaaaagctcaacctcggaaaagaagacgattcttcctcagactctttcgaaaatttggaggaggaaagcaatgaaagtgggagtccttttgaccccgtgtttgaagtagagcctaagatctccaatgacaacccagaagaacacgttctaaaagtcatccctgaagacgcatcagagagcgaagagaagctggatcagaaggaagacggttctaagtatgagactattcatttgaccgaagaacctacaaagttgatgcacaatgcatctgattccgaggtcgaccaggacgatgtcgtggagtggaaggatggggcctcaccttccgaaagtggcccagggtctcagcaggtatcagattttgaagacaacacctgcgagatgaagccgggcacgtggtccgacgagagtagtcaaagcgaggacgcccggtcctcaaaaccagctgcgaaaaagaaggctacaatgcaaggggatagagaacagctcaagtggaagaattcctcatacggaaaggtggagggattctggtccaaggaccagagtcaatggaagaacgcctcggaaaacgacgagagactctcaaatcctcagatagaatggcaaaatagcactattgactccgaggacggcgaacagttcgataacatgacagacggggtggcggaacccatgcacggaagcctggcaggtgtgaagctaagtagtcagcaggct

SEQ ID NO: 321429 - DNA, 3306 bp, Artificial Sequence
  derived and/or modified sequence
atgttccaactgccggtgaacaatctgggatccctcaggaaggctagaaagactgtgaagaagattctgtccgacatcggtctggaatactgcaaggaacacatcgaagatttcaagcaattcgagcccaacgacttctatctgaaaaacacgacttgggaggacgtggggctgtgggatccgtcactcactaagaatcaagattaccgcaccaagcctttctgctgcagcgcctgcccgttttcgagcaagttcttcagcgcctacaaatcccatttcaggaacgtgcactcagaggactttgaaaaccgcatcctgctgaactgcccttactgcaccttcaacgctgacaaaaagaccttggaaacccacatcaaaatcttccatgctccaaacgccagcgcaccgtctagctctctttccacctttaaagacaaaaacaagaacgacgggcttaagccgaaacaagccgattccgtggaacaggctgtctactattgcaaaaagtgtacttaccgagatcctctgtacgagatcgtgcggaagcatatctaccgggagcactttcagcatgtggccgcgccgtacatcgcgaaggcgggcgaaaagagcttgaatggcgcagtgccgcttggatctaatgcccgcgaagagtcgtccattcactgtaagcggtgtctcttcatgccaaagtcgtacgaagctctggtgcaacacgtgatcgaagatcatgaaaggatcggttaccaggtcactgctatgatcggccacaccaacgtggtggtcccaagatccaagccgttgatgctgatcgccccgaagcctcaggataagaagtcaatggggctgcctccacgcatcggatcgttggcctccggaaacgtgcgctcactgccgtcgcaacagatggtcaatcgcttgtccatcccgaagcctaacctgaatagcaccggagtgaatatgatgtcctctgtccaccttcagcagaataactacggcgtcaagagcgtgggacagggatacagcgtgggccaatccatgaggctgggcctcgggggtaatgctcctgtgtccattcctcagcagagccagtcggtgaagcagcttctgccatcaggaaatggaaggagctacggactgggatccgagcaacggtcacaggcccctgcccgctactccctgcagtccgcgaacgcgtccagcctgtcatcgggacagctgaagagcccgtcactgtcgcaaagccaggcgagccgggtcctggggcaaagctcatcgaaaccggcagccgccgccaccggacctccgcctgggaacacctccagcactcagaagtggaaaatctgcaccatctgcaacgagctcttcccagagaacgtgtactcggtgcacttcgagaaagagcacaaggccgaaaaggtcccagctgtggccaactacatcatgaagatccacaatttcacctccaagtgcctctactgtaaccggtaccttccaactgacaccttgctgaaccacatgttgatccacgggctgtcgtgtccgtattgccggtccaccttcaatgacgtggagaagatggcagcccatatgcgcatggtccacatcgacgaagaaatgggccccaagactgactcaaccctgtcctttgatctgactctgcagcaaggatcgcatactaatatccacctgctggtgactacttacaatctgcgggacgcgccagccgaatcagtggcataccatgcacagaacaaccctccagtgccaccaaagccacagccgaaggtgcaggaaaaggcggatatcccggtcaagagctccccgcaggcagcggtcccttacaaaaaggacgtgggaaaaactctgtgcccactctgcttctccatcctcaaaggtcccatctcggatgctctcgcacatcatctgcgggaacggcaccaggtgatccaaaccgtgcatcctgtcgagaagaagttgacctacaagtgcatccactgcctgggcgtgtacacctccaatatgactgcatccactatcaccctgcatcttgtgcattgccgcggagtcggaaagactcagaacggacaggacaagactaacgctccctcacggctcaatcagtccccctcgctggcgcccgtgaagcggacttacgaacagatggagtttcctctcctgaagaaaagaaaactggacgacgatagcgactcgccttccttcttcgaggagaagccggaagagcctgtggtcctggccctggacccgaagggacacgaagatgactcgtacgaggcacgcaagtcgttcctgaccaagtacttcaacaagcaaccctacccgactcgccgcgaaatcgagaagctcgcggcgtccctgtggctgtggaagagcgatatcgcgagccacttcagtaacaagagaaagaagtgcgtgagagactgcgagaaatacaagcctggcgtcctgctcggcttcaatatgaaggaattgaacaaagtcaagcatgagatggatttcgatgctgaatggcttttcgaaaaccacgacgagaaggacagcagagtgaatgcgtcaaagaccgccgataagaaactgaacctcggaaaggaggacgactcatcgtcggattccttcgaaaacttggaggaggaaagcaatgagtccgggtcgcctttcgacccggtgttcgaagtggaaccgaagatctcgaacgacaacccggaagagcatgtcctcaaagtgatcccagaggacgcttccgaatcagaagagaagctggatcagaaagaggacggatcaaagtacgaaacgatccacctcactgaggagccgaccaagctgatgcacaatgcctcagacagcgaagtggaccaagacgatgtggtggaatggaaggacggagcctcgccgagcgaatcgggccccggatcccagcaggtttcagattttgaggacaacacgtgtgaaatgaagcctggcacctggagcgacgagtcgtcccaatctgaggacgcgagatcgtccaagccggctgccaaaaagaaggcgaccatgcagggggatagagagcagttgaagtggaagaactcaagctatggaaaggtggaaggcttctggtctaaagatcaaagccagtggaaaaacgcaagcgaaaacgatgagcggttgagcaacccgcaaatcgagtggcaaaattcgactatcgactccgaagatggagagcagtttgacaatatgaccgacggggtggcagagccgatgcacggatcccttgcaggggtgaaactgtcgagccaacaggct

SEQ ID NO: 321430 - DNA, 3306 bp, Artificial Sequence
  derived and/or modified sequence
atgttccaattacccgtaaataacctcgggtccttgcgcaaggcccgcaagaccgttaagaaaattttgagcgacatcgggctggagtattgcaaggaacacattgaggatttcaagcaattcgaacctaacgacttttacctgaagaatacgacatgggaggacgtgggtctatgggacccaagtcttacgaaaaaccaggattatcgaacgaaacccttctgctgctctgcctgccctttctcgagcaagttcttctcagcttataagagccatttccgtaacgtccattccgaggatttcgagaaccggatactgttaaattgcccctactgcaccttcaatgctgacaagaaaactcttgagacgcatatcaagatcttccacgcgccaaatgcttcggccccgtcaagtagtcttagcactttcaaggacaagaataagaatgatggactgaagccgaagcaggccgactccgtggagcaagcagtttactattgtaagaaatgtacatatcgtgaccctttgtacgaaattgtgcggaagcatatttatcgcgagcactttcaacacgtcgccgcaccctacattgccaaagcgggcgaaaagtcccttaacggggccgtccctttaggatcaaatgcacgcgaggaatcgagcattcattgtaagcggtgcctgtttatgccgaagtcatacgaagcccttgtgcagcacgtcatcgaggatcatgaacggatcggttaccaagtcacggccatgatcggccatactaatgtcgtagttccacggtcgaagcccttaatgcttatcgccccgaagccccaggacaagaagtctatgggcctgcccccgcggataggaagccttgcgagtggaaatgttcgttcactcccaagccagcagatggtcaataggctgtccatccctaagccgaatctgaactcaactggagttaatatgatgagctccgttcaccttcagcagaataactatggggtcaagtcagtcgggcaagggtacagtgttggacagtcgatgcggctcggcctgggcggtaacgccccagtttccatccctcagcagagccaatcggtgaagcagctattgccgtccggaaatggtaggagttatggactaggcagcgaacaaagaagtcaggcacccgcgcgctactcattgcaatctgcgaacgcctctagcctctccagtggccagctgaagtctccatctctgtcccagagtcaggcgagccgcgttctcggacaaagttcatcgaaaccagcggcggcggctaccggtccaccacctggcaacacaagctccacacaaaagtggaagatctgtactatttgcaacgagctttttccagaaaatgtgtactccgtgcatttcgaaaaagagcacaaggcggagaaggtccctgctgtcgcgaactatattatgaagatccacaatttcacctcgaaatgcctatattgcaatcgctatcttcctactgacaccctcttgaaccatatgctcatacacggattatcttgcccttactgccgctcaacatttaatgatgtcgagaaaatggccgctcacatgcggatggttcacatagacgaggagatgggcccaaagacggactctaccctgagcttcgacctcaccctacaacagggatctcacacgaacatacacctgttggttactacgtataatctgcgtgatgccccagccgaaagtgtggcttatcacgcgcaaaataacccgcccgtcccccctaagccccaaccgaaagtgcaggaaaaggccgatattccagttaagagctccccccaggcagcggttccctataaaaaggacgttggaaagacgctttgtcctctttgcttctctatcctcaaggggccgatctccgatgctctcgcccaccacttacgtgaacgtcaccaggtgattcagaccgtccatcctgtagaaaagaaactgacgtacaaatgcatccattgcttgggtgtctacaccagcaacatgactgcctccacgattacactccacctggtccattgcagaggggtcggaaaaacccaaaacgggcaagataagactaacgcgccgtctcggttgaatcaatccccaagtcttgctccagttaaaagaacatatgagcaaatggagttcccacttctcaagaagaggaaacttgatgatgatagtgactcgccgtcattcttcgaggagaaaccagaagagccggttgttctggcgctcgatcctaaggggcacgaggatgattcgtatgaagcccgaaaatccttcctgacaaagtacttcaacaagcaaccctaccctacgaggagagagattgaaaagttggcagcctccctttggttgtggaagtcggacatcgcgagccatttctctaataaacgcaagaaatgtgtcagagattgtgagaagtataagcctggtgttttgctgggctttaatatgaaagaactgaacaaggtaaaacacgaaatggacttcgatgctgagtggcttttcgaaaatcacgacgagaaggactcacgcgtcaacgcaagtaaaacggcggacaagaagctcaacttaggtaaagaggatgatagttcctcggattccttcgaaaatttggaagaagagagtaatgaatctggcagcccatttgaccccgtcttcgaggtcgaaccgaaaatcagtaacgacaaccccgaggagcacgtgctgaaagtaattcctgaggacgcgtccgaaagcgaggagaagctggatcaaaaagaagatggcagtaaatacgaaacgatccatctcaccgaggaaccgaccaagctcatgcataatgcgagtgacagcgaggttgatcaggatgacgtcgtggaatggaaggacggcgcgagtccttccgaaagcggaccagggtctcaacaagtgtctgactttgaggataatacatgcgaaatgaagcctggcacatggagcgatgaatcttcacaatccgaagacgcgcgttcaagtaagcctgcggctaagaagaaagccaccatgcaaggtgaccgtgagcagttgaagtggaagaatagtagctacgggaaggtggagggcttctggagtaaggaccaaagccaatggaagaacgcgtcggaaaacgacgaaagattgtccaaccctcagattgagtggcaaaacagtacgatcgactctgaggacggagagcagttcgataacatgacagatggggtggccgagcctatgcatggctcgctcgcaggcgtcaaactgagtagccagcaagct

SEQ ID NO: 321431 - DNA, 3306 bp, Artificial Sequence
  derived and/or modified sequence
atgttccaactaccggtgaacaatctcgggagcctgcgcaaagccagaaaaacggtgaagaagatactttctgacatcggacttgagtactgcaaagagcacatagaagacttcaagcagttcgaaccaaacgacttctacctcaaaaataccacatgggaagacgtcggcctctgggatccgagcctcaccaaaaaccaggattaccgtaccaaacctttttgctgtagtgcttgcccgttcagttcaaagttcttcagcgcatacaagagtcacttccgcaacgtacattccgaggatttcgagaatcgaatcctgctcaactgcccatattgcactttcaacgctgacaagaagaccctggagacccacatcaaaatatttcacgccccaaatgcaagcgctccttcttcatctctgtcaacgtttaaggataaaaacaagaacgatggcctgaagcccaaacaggctgactccgtggagcaggccgtgtactattgtaaaaaatgcacttaccgcgatcccctttacgagattgtgagaaagcatatttatagagagcatttccagcacgtggccgccccatacatcgccaaggccggagaaaaatctctgaatggcgctgtccccctgggttccaatgcccgcgaagagtcgtctatacattgtaagcgctgtttatttatgcccaagagctatgaagctctcgttcagcacgtcatcgaggatcacgagcgtatcggatatcaggtcaccgctatgattggacacacaaatgttgtcgtgccacggagcaagcccctaatgctgatcgccccaaagcctcaggacaaaaagagcatgggactgccaccacgcatagggtctctagcttcaggtaacgttagatctcttcccagtcagcagatggtgaacaggctgtccattcctaagcccaacttgaactccaccggcgttaatatgatgagtagcgtccatctgcaacagaacaattacggagtcaaatctgtgggccagggatattcggtgggacagagcatgagactgggcttgggaggcaacgcccctgtgtcgattccccagcagtcccagtcagtcaagcaactgctcccctcagggaacggtcgctcctacggactgggctccgagcaacgcagccaagccccggctcgttattcccttcagtcagcaaatgcgagttccctgtcgtccggacagctgaagagtcccagcctcagtcagtcacaggcgagcagagtcctgggacaaagcagctccaaaccagcagccgctgcaaccggacctccccctggcaacacatcttctacccagaaatggaaaatttgtactatttgcaatgagctgttccctgagaatgtgtattcggtgcatttcgagaaggagcataaggccgagaaggtgccagccgtagccaactacattatgaagatccacaacttcactagcaagtgtctctactgtaatcgttatctcccaacagatacattgttgaatcatatgctgatccacggactgtcatgcccatattgtagatccacttttaacgacgtcgaaaagatggctgcccacatgcgcatggtgcacatcgacgaggagatgggtccaaaaactgattcgaccttgtcatttgacttgacattgcaacaagggagtcacaccaacattcacttgctggtgactacttataatctcagagacgccccggccgaatcagtcgcatatcatgcacagaataaccccccggttccgcctaaaccgcagcctaaggtccaagagaaggccgacattcccgtcaaaagttctccccaagccgccgtgccatacaagaaagatgtgggcaagactctctgccccctctgtttctctattctgaaaggccctattagcgatgccctggcccaccacttgcgcgagcgtcaccaggttatccaaaccgtccatccagttgaaaagaagttaacctataagtgcattcactgcttgggggtgtacaccagtaatatgacagcctccactataactttacatctggtccattgccggggagttggcaagacccagaacgggcaggataaaactaatgccccctcgcgcctgaatcagtctccaagcttagcaccagtgaagcggacgtatgagcagatggagtttcccctgctcaaaaagaggaagctagacgacgacagcgatagtccctcatttttcgaagagaagcctgaggagcctgtcgtgctggctttggatccaaagggccatgaagatgattcttatgaagctaggaaaagcttcctcaccaagtattttaacaagcagccctacccaacgcgtagagaaatcgagaagctcgcagcgtctctttggttgtggaagtcggatatcgcctcacacttcagtaataagagaaaaaagtgtgtgagggactgcgagaagtacaagcctggcgtgttgctcggctttaatatgaaagagctcaataaggttaagcacgagatggattttgacgcggagtggctgttcgaaaatcacgatgaaaaggactcacgcgtcaacgcatccaaaacagcggacaagaagttaaacttaggcaaggaggatgacagttccagcgattccttcgaaaacctggaggaagaaagcaacgaatctggctcccctttcgaccctgtgtttgaggttgagcccaagatttctaacgataatcctgaggaacacgtgctgaaggtgatcccggaggatgcaagtgagtccgaagaaaaactggaccagaaagaagacggttccaagtacgagactattcatctgaccgaggagccaactaagctgatgcacaatgccagtgactctgaagtggaccaggacgacgtcgtggagtggaaggatggcgcttcacctagcgaatctggtccaggctcccagcaggtgagcgatttcgaagataatacatgcgagatgaagccagggacttggtcagatgaatcgtctcagagtgaagacgccagatcatctaaacctgctgcaaagaagaaggccacgatgcagggcgaccgagaacagctgaagtggaagaattctagctacggcaaggtggaggggttctggtccaaagaccaatcccagtggaaaaacgctagcgagaatgacgaaagactgagtaatccccaaatcgagtggcagaatagtactattgactccgaagacggagagcagtttgacaatatgaccgacggtgtcgccgagcctatgcatggcagcctcgcaggggtcaaactctcctcccaacaagct

SEQ ID NO: 321432 - DNA, 3306 bp, Artificial Sequence
  derived and/or modified sequence
atgtttcaactgccagtaaataacctgggttcccttaggaaggcgaggaaaacagtgaaaaagatcctgagtgacattggcctggaatactgcaaagaacacatcgaggatttcaagcaattcgagcccaatgatttttacttaaagaacactacatgggaagatgtcgggctttgggacccctcgttgacgaagaatcaagattatcggacaaagcctttctgttgcagtgcctgtccattttctagtaaatttttttcagcatacaagagtcacttcaggaacgtacactccgaggactttgagaaccgtattctgctcaactgtccttattgcacctttaacgctgacaagaagactctggagacacacataaaaatcttccacgctccgaacgcttccgcccccagctcatctctgtcaacatttaaggacaagaataagaacgatggactcaagccgaaacaggccgattcggtggaacaggccgtttattactgcaaaaaatgtacatatcgtgatcctctttacgagatcgtcagaaagcatatctaccgcgagcattttcaacatgtggctgccccctacatagcaaaagccggcgaaaagtctttgaatggcgcggtcccactgggctctaacgctcgggaggaatcgtcaattcattgcaagaggtgtctctttatgcccaagagctacgaagcgctcgttcaacatgttattgaggaccacgagcggattggataccaggtcacagccatgatcggacacaccaacgtcgtggttcctcgatccaaacccctcatgttgattgccccaaagccacaggataagaagagcatgggacttccaccccgaatcggtagcctggcaagcgggaacgtgcgttccctgccctcccagcagatggtaaataggcttagtatccccaagccgaaccttaactctacgggcgtgaacatgatgagctctgtacacctgcagcagaataactatggggtcaagtctgtaggacaggggtatagcgtgggccagtccatgagattaggactgggaggaaatgcgcctgtgagcattccccaacagagccaaagcgtcaagcagctgttgccgagcggtaatggccggtcatacgggttgggaagcgagcagcgtagtcaagcccccgcacgctactccctgcagtcagcaaatgccagtagcttgtctagtggccaactcaaatccccatccctgagtcagtctcaggcgagtcgggtactggggcagagctcctctaaaccggctgcagcagctaccggacctcctcctggtaacacttcaagtacgcaaaaatggaaaatttgcacaatttgtaatgagttattccctgagaatgtctattcagtccacttcgagaaggaacacaaggcggaaaaagtgcctgccgtggccaattacattatgaaaatccataatttcacttccaagtgtctctactgcaaccgttacctgccaactgacactctgctaaaccacatgctcatacacgggctgtcatgcccatactgtcgcagcaccttcaatgacgtcgagaaaatggctgcccatatgagaatggtgcatatcgacgaagagatgggacctaagaccgattcaactctgagcttcgacctgacactccagcagggaagccacacaaacattcaccttctggtgacaacgtataatctgcgcgacgcgccggcagagagcgtcgcctaccacgcccaaaataatccacctgtcccccctaagcctcaacccaaggtgcaagaaaaggcagatatccccgtaaaaagtagccctcaggccgctgtcccatataagaaggatgtgggaaagacactgtgtccactgtgctttagcattctgaaggggcccatctcagatgcattagcccaccatctgagggaacgacatcaggtgatacagaccgtgcatcccgtcgagaagaaactcacttataagtgcatacattgtcttggagtctacaccagcaacatgacagctagtaccattactctccatctcgttcattgtcgcggggtgggtaaaactcagaacggtcaggacaaaaccaacgcaccttcgcggttgaatcagtcaccttcactggccccagtcaagcgcacgtatgagcaaatggaattcccattgctcaagaaacgtaaactggacgatgatagcgattctccctccttttttgaggagaaacctgaggagccagtggtgttggcactggaccccaagggccacgaggacgattcctacgaggcgaggaagtcatttctgacaaagtatttcaacaagcaaccatatcctactcggcgggaaattgaaaaacttgcggcatcactgtggctctggaaatctgacattgccagccacttttcgaacaagcgaaagaaatgtgtgcgcgattgtgagaaatacaagccgggagtgctgttaggttttaatatgaaggaattgaacaaagtgaaacacgagatggattttgacgctgagtggctctttgagaaccatgatgagaaggactctcgagtcaatgcttctaaaacagccgataagaaactgaacctcgggaaggaggacgacagctcgagcgactctttcgagaatctcgaggaggagtctaacgaaagtggtagcccttttgaccctgtcttcgaggtagagcctaagatctcaaacgacaaccccgaggaacatgtcctaaaggtcatccctgaagacgcttcagagtctgaggaaaaactagaccagaaggaggatggaagtaaatacgagactattcatcttaccgaggagccgactaagcttatgcataatgcgagtgactccgaggtggatcaggacgatgtagtggaatggaaagatggcgcatctcctagcgaatccggacctggatcccagcaagtgtcggacttcgaggataacacatgtgagatgaagcctgggacgtggtccgacgagagctcccaaagcgaagatgctcgctcctctaagccagcagccaagaagaaggccacaatgcagggcgatagggagcagctaaagtggaaaaactctagctacggcaaagtagagggcttttggtccaaagaccaatctcagtggaaaaacgcttctgagaatgacgaaagacttagcaacccccagatcgagtggcagaactccacaattgatagcgaggacggtgagcagttcgataatatgacagacggcgttgcagagccgatgcatggtagccttgctggcgtgaagctgagtagtcagcaggct

SEQ ID NO: 321433 - DNA, 3306 bp, Artificial Sequence
  derived and/or modified sequence
atgtttcagcttccggtgaacaacctgggttcactgagaaaggctcggaaaaccgtgaagaagattctgtcagacattggtctggaatactgtaaggaacacattgaggactttaagcagtttgaacctaacgacttttatctcaagaacacgacgtgggaagatgtcggtctttgggatcctagcttgaccaaaaaccaggactacagaacgaagcccttttgttgcagcgcatgtcccttttcaagcaagtttttctccgcatacaaatcacattttaggaatgtgcactcggaggactttgaaaaccgcatcctcctcaattgtccttactgtacgtttaatgcagacaagaaaactctcgagactcacattaagatctttcacgcgcctaacgcatcggccccgagctcatcattgtcaactttcaaagacaagaataagaacgatggccttaagcccaaacaggcagactcggtggagcaagccgtgtactactgtaagaagtgcacctaccgcgatcctctgtacgaaattgtgagaaagcacatttaccgagaacatttccagcatgtggccgcaccctacatcgcaaaagcgggtgaaaagtcccttaacggcgcggtgcctctgggaagcaatgcgcgtgaggaatcatcgatccattgcaagcgttgtctgttcatgcctaagtcgtacgaggcgcttgtccaacatgtgatcgaggatcatgaaagaatcggttaccaggtgactgctatgattggccacaccaacgttgtggtgcccagatcaaaaccccttatgctgatagcgccgaagcctcaagacaagaagtcaatgggcctgccccctcgaatcggttctctggccagcggtaatgtgcgctcgctgccctctcaacaaatggtgaaccgcctgtcgatcccaaagcctaaccttaactcgactggagtgaatatgatgtcgtcggtccatctccaacagaataactatggagtgaagagcgtgggtcaaggatattcggtcggtcagagtatgcggctggggctgggcggaaatgccccggtgagcattccccaacagtcacaatcggtgaaacaattgctgccatcagggaacggaagatcatacggactgggctccgagcaaagatcgcaggcacctgctaggtactcgttgcaaagcgcaaacgcctcgtccctttcctctggtcagctcaagtctcctagcctttcccagtcgcaagcaagccgcgtgctcggacagtcctcttcaaaaccggcggcagcagcgactggacccccacccggaaacacgtcgtcaacccaaaagtggaagatttgtaccatttgtaacgagctgtttccagaaaacgtgtactccgtccattttgaaaaggaacataaggcggagaaggtgccagcagtggcgaactacattatgaaaatccacaatttcacctcaaaatgtctctattgcaacagatatttgcctactgataccctgctgaatcatatgctcatccatggcctctcctgtccatactgtagatcgacttttaacgatgtggagaagatggccgcacacatgcgcatggtgcatattgatgaagaaatgggcccgaaaaccgattcaaccctttcgtttgatttgactctgcaacaaggatcccataccaacattcacctgctcgtgacgacctacaacctgagggatgcaccggccgaatcggttgcataccatgcccagaacaacccacctgtccctcccaagcctcaaccaaaggtgcaagaaaaggccgatatccccgtgaaaagctctcctcaggcagccgtcccctacaagaaagatgtgggaaagacgctttgtccactttgtttcagcatcctgaaggggccaatatcggacgccctggcccatcaccttagagagcgccatcaagtgattcagactgtgcatcctgtcgagaaaaaactgacttacaagtgtattcattgtctgggagtgtacacgtccaacatgaccgcctcgactatcaccctgcatctcgtgcactgtaggggggttggtaaaactcagaacggccaggataagactaacgctccttctcgacttaatcaaagcccatcgctggcacctgtgaaaaggacctacgaacaaatggaattcccacttttgaagaagaggaagctggatgatgattcggattcgcctagcttttttgaggaaaaaccagaagaacccgtggtgcttgctctggacccaaagggtcatgaggatgactcctacgaagcacgaaagtccttcctgactaagtactttaacaagcagccgtaccctactagaagagaaattgaaaagttggccgcaagcctctggctttggaagtccgacattgcctcgcatttcagcaacaagaggaaaaagtgcgtgcgcgattgtgagaaatacaagccaggtgtgcttctgggatttaacatgaaggaactgaacaaagtcaagcatgaaatggattttgatgcggaatggctgttcgaaaaccatgatgaaaaggactcacgggtgaatgcaagcaagaccgcagataagaagctcaacctcggaaaggaagatgatagctcatcagattcatttgagaacctggaagaagaatccaatgaatccggaagcccgtttgatccagtttttgaggtcgagccaaagatctccaacgataacccagaagagcacgtgcttaaggtcatccctgaggacgcctcggagtcggaggagaaacttgatcaaaaggaagatggttccaagtacgaaactattcatctgactgaggagccgaccaagttgatgcataacgccagcgattcagaagtggatcaagacgatgtcgtggaatggaaggacggagccagcccatccgaatccggacctggctcgcaacaagtttcggacttcgaagataacacttgcgaaatgaagcctgggacctggtcggatgaatcgtcacagagcgaggacgccagatcctcgaagcccgcagcaaagaaaaaggccaccatgcaaggtgatcgagagcaacttaagtggaaaaacagctcttacggaaaggtggaaggtttttggagcaaagaccagagccaatggaaaaatgcatcagaaaacgacgagcggctcagcaacccccaaatcgagtggcaaaacagcaccattgacagcgaagatggagaacagttcgataacatgaccgatggagtggcagagccaatgcacgggtccttggcaggtgtgaaacttagcagccagcaagcc

SEQ ID NO: 321434 - DNA, 3306 bp, Artificial Sequence
  derived and/or modified sequence
atgttccagctccctgtgaacaatcttgggtcgcttagaaaggcacgaaagactgtgaagaagatcctgtcagacattgggctcgagtattgcaaggaacacattgaagattttaagcagttcgaacccaacgacttctatctgaagaacacaacatgggaggatgtgggcttgtgggacccttctctgacaaagaaccaagactaccggaccaagccattctgctgttcagcgtgtccatttagctccaaatttttcagcgcttacaaaagtcatttccggaacgtccatagtgaagacttcgagaatcgtatcctgctgaactgcccctattgcacctttaacgctgacaagaaaaccctggagacccacatcaagatctttcatgcacctaacgcctccgcccccagcagctctttgtccacatttaaggacaagaacaagaacgacgggttgaaacctaagcaggcggactccgtggaacaggctgtgtattactgcaaaaagtgtacctatcgagaccctctgtacgagatcgttcgcaaacacatctatagggagcatttccagcacgtggccgccccatatatcgcaaaagcgggagagaagtcgctgaatggggccgtccccctcggatctaacgcccgagaggaaagttctattcactgcaaacgatgccttttcatgcctaagtcctacgaggccctcgtccagcacgtgattgaagaccacgaacgcatcgggtatcaagtgaccgccatgatcggtcatactaacgtggtagtcccacggtctaagccgctgatgttaatcgcacccaagcctcaagacaaaaagagtatgggcctaccgcccagaataggaagcttagcatccggcaatgtgagaagcctgccctcacagcaaatggtcaataggcttagcattcccaaaccaaatcttaatagtactggagtgaacatgatgagctcggtgcacttgcagcagaataactacggggtgaaatccgtcggtcagggctatagtgtgggtcagagcatgagactggggttgggagggaatgctccagtgagtattccccagcagtctcagagcgtgaaacaattgctaccttcgggcaatggacggagttacggcctggggtctgaacagcgctctcaggctcctgctcgatactccctgcaatcagcaaacgctagctctctgtcgagtgggcagctcaagtcaccttcactgagccagagccaggcctccagggtgctcggccagagtagctctaagccagcggccgcagctacgggccccccaccaggcaataccagctcaacccagaagtggaaaatttgcacaatctgtaatgaactgttcccggaaaatgtgtacagtgttcacttcgagaaggagcataaagcagaaaaagttcctgctgtggccaactacatcatgaaaattcataatttcacgtcgaagtgtctgtactgtaaccggtatctgccgactgacaccttgcttaaccatatgttgattcacggcctgagctgcccctattgtcggtccacgttcaatgacgtcgagaaaatggccgcccatatgagaatggtgcacatcgacgaagagatgggtcccaaaaccgatagcacgctatcattcgaccttaccctccagcaaggctcacatacgaacatccacctccttgtaactacctacaatctccgcgacgccccagcagaatccgtggcttaccacgcccagaataacccgcctgtgccgcccaagccccagccaaaagttcaagagaaggccgatatcccggtcaagtcctctccgcaggcagctgtcccttataaaaaggatgtgggcaagaccctctgtccactgtgtttttcgattttgaagggccccatcagcgacgctcttgcccaccacctcagggagcgccatcaagtaattcagaccgttcatcctgtggaaaagaagttgacctacaagtgtattcactgtcttggggtgtatacctccaacatgactgcgagcactattacgctgcacctggtccattgcagaggcgtgggtaagacacagaacggccaggacaaaacgaacgctccctccagattaaatcagtccccaagtctagcccctgtgaaacggacttatgagcagatggagttcccactgttgaaaaagaggaagctcgatgacgactctgatagcccgtcctttttcgaggaaaagcctgaagagccagtcgtgctcgctttggatcctaagggccacgaagatgacagctacgaagcccgtaaatcatttctgacgaaatactttaacaagcaaccgtatcctacccgccgggaaatcgagaagctcgccgcttccttatggttatggaagtcagatattgctagccacttctccaacaagcggaagaagtgcgtccgagactgtgagaagtataaaccgggtgtacttctggggtttaatatgaaggaactgaataaggttaagcacgagatggacttcgatgctgagtggcttttcgaaaatcacgacgaaaaggattccagagtcaatgcttctaagaccgcagacaaaaaactgaacctgggcaaagaagatgattcctcaagcgacagtttcgaaaatctggaggaagagtctaacgagtccggctcaccttttgatcctgtattcgaggtggagcctaaaatctcaaacgataaccctgaggagcacgtcttgaaggtgatccccgaagacgccagcgagagtgaggagaaacttgaccagaaggaagacgggtcaaagtacgaaactatacatcttaccgaagagcctacgaaactcatgcataatgccagcgacagtgaggtggatcaggacgatgtggtggagtggaaggacggggcaagtccttcggagtccggacccgggagccagcaagtgtcagatttcgaggataatacctgcgagatgaagcccggcacatggagcgatgagagctcccagtctgaggacgccagatcgagtaagcccgctgctaagaagaaagccacgatgcagggagatagagagcagctgaagtggaaaaatagtagctacggcaaggtggagggtttctggagcaaggaccagagccagtggaagaacgctagcgaaaacgatgagcgacttagtaacccacagatcgagtggcagaactctaccattgactcagaggacggagagcagttcgacaatatgacggatggcgtcgctgagccaatgcacggtagtctggcgggcgtcaaactgtcctcccagcaagca

SEQ ID NO: 321435 - DNA, 3306 bp, Artificial Sequence
  derived and/or modified sequence
atgttccaactgccggtcaacaaccttggcagcctgcgcaaggcgcgcaaaactgtcaaaaaaatcctctcagacattggcttggagtattgcaaagaacatatagaagatttcaaacagtttgaacctaacgatttttatttgaaaaacactacatgggaggatgtcggtttgtgggatccgtcactaacaaaaaatcaagattacagaacgaagccattttgctgctcagcatgtcctttctctagcaagttttttagcgcctataaatcccacttcaggaacgttcatagtgaggattttgaaaatcgcattcttctcaattgtccgtactgtacgttcaacgcggacaaaaaaactctcgagactcatataaaaattttccatgccccaaatgcgtctgctccatcttctagcctgtccacatttaaggacaaaaataaaaatgacggccttaagccgaaacaggcagattctgtagaacaagcagtatattactgcaaaaaatgcacgtaccgggacccgttgtatgaaatcgtacgcaaacacatttacagagaacattttcaacatgtggcagcgccgtatattgcaaaagccggcgaaaaaagcctaaatggagcagttccgttgggaagtaatgctcgggaggaatcaagcattcattgtaaacgctgcctttttatgccgaaaagttatgaagctctagtacagcatgtgatcgaagatcatgaacgtattggttatcaggtcacagcaatgattggacatacaaacgtcgtagtaccgagatctaagcctttgatgctcattgccccaaagccccaggataagaaatccatgggtctccctcctagaattggtagccttgcttcaggaaatgtgcgctctcttcctagtcagcaaatggtaaatcgactcagcattccgaaacccaatcttaattcaacaggcgtaaacatgatgagtagcgtccacttacagcagaataattatggagtgaaatctgtcgggcaaggctacagtgtaggacagtctatgagactgggtttagggggcaatgctcctgtaagtattccacaacagtcccagagcgtcaaacagttactgccttcaggcaatggccgatcctatggcctgggttctgagcagagatcacaggctcctgctcgctattctctacagtcagccaatgctagctcattgtccagtggtcagttgaagtccccttctttatctcagtcacaggcttctagagtgcttgggcaaagcagctctaaaccggcagccgcagccaccggtccgcccccggggaatacgagttcaacgcagaaatggaagatttgtacaatctgtaatgaactgtttcctgaaaacgtgtattcagtgcattttgaaaaggaacataaggctgaaaaagtgccggcagtagcgaactatattatgaaaatccacaattttacatctaaatgtttatactgcaataggtatttaccgacagatacacttctcaatcacatgttaattcacgggctgtcatgcccgtactgccgctccacctttaatgatgtagagaaaatggcagcgcatatgcggatggttcatattgatgaagaaatgggaccgaaaacagacagcactttgtcttttgacttaactttgcagcagggctctcatacaaatatccacctgctggtgacaacgtataatctgagagatgcaccggcagagtccgtggcttatcatgcacagaacaatcctccagttccaccaaagccgcagccgaaagttcaagaaaaagctgatatcccggtcaagtcaagcccacaagctgccgttccatacaagaaggatgttgggaaaacgctgtgtccattatgcttttctattcttaagggaccgatcagtgacgctcttgcgcaccatctgcgggaacgccatcaagtcattcaaacagtacatcctgtcgagaagaagcttacttataagtgtatccactgcctcggagtttatacttcaaacatgacagctagcactataacgcttcacttagtacactgccgaggagtggggaaaactcaaaatgggcaggacaaaacaaacgctcctagccggcttaatcagagcccttcactcgcgcctgttaaaaggacgtatgaacagatggaatttcccctgcttaagaaaagaaaattagatgacgattctgactctccaagtttttttgaagaaaaaccggaagaaccggtggttcttgctttggatcccaagggacatgaagatgactcttatgaagccagaaaatcttttcttacaaaatatttcaacaaacagccttaccctactcgtcgtgaaattgagaaactggcagcaagcctctggttgtggaaatcggatatcgcctcgcatttttcgaataaacgtaaaaaatgtgtgcgggactgtgaaaaatataagccgggtgtgttgcttggcttcaatatgaaagagttaaataaggtcaaacatgaaatggattttgatgcagaatggttatttgagaatcatgacgaaaaggactcacgggttaacgcctcaaaaacagcggataaaaaactaaatctcggcaaagaagacgactcctctagcgatagcttcgaaaacctagaggaagaatcgaacgaatcaggatcaccttttgatccggtgtttgaagtcgaaccgaagatatcaaatgataaccctgaagagcacgtgttgaaagttattcccgaggatgctagcgaatcagaggaaaaattggatcagaaagaagacggctctaaatacgagactattcatcttaccgaagaaccgacgaagctgatgcataacgcgtcggacagcgaagtagatcaagatgacgtcgtcgaatggaaagatggggctagtccgtctgaatcgggcccgggatctcaacaagtgagcgatttcgaagacaatacctgtgaaatgaaaccgggtacgtggagcgatgaatcttcccaaagtgaggatgctcggagttcaaaaccggctgccaaaaagaaagcgactatgcagggagaccgcgagcaactgaaatggaaaaattcatcctacggaaaagtagaaggattttggagtaaagaccagtctcagtggaagaacgcttcagagaacgatgaaagattgtcaaatccacagatcgaatggcaaaattcaaccatagatagtgaagacggtgaacaatttgataacatgacagacggtgtcgcggaacctatgcatggcagtcttgcgggcgtaaagttatcttcacaacaggct

SEQ ID NO: 321436 - DNA, 3306 bp, Artificial Sequence
  derived and/or modified sequence
atgttccagctccccgtgaataacctggggtcactgcgcaaggctcggaaaaccgtgaagaagattctgtcggacatcgggctcgaatactgcaaggaacacattgaggactttaaacagttcgagccaaacgacttctaccttaagaacaccacttgggaagatgtgggactctgggatccgtcgctgaccaagaaccaggattaccggaccaagcccttttgctgctcggcttgtccgttctcgagcaaattcttctcagcatacaagtcgcacttccggaacgtccactccgaggacttcgagaaccggatcctgttgaactgcccatattgcaccttcaacgccgacaaaaagaccctggaaacccacatcaaaatctttcatgctccaaacgcgtcagccccttcctcctcactgtcgacgttcaaagataagaacaaaaacgacggactgaagcctaaacaagccgactccgtcgagcaggccgtgtactactgcaagaagtgtacgtatcgtgatccgctctacgaaatcgtgcggaagcatatctaccgggagcacttccagcatgtggccgccccttacatcgctaaggcgggcgagaaatcccttaatggagcagtcccactggggtcgaacgcacgggaagagtccagcatccattgcaagcgttgcctcttcatgcccaaatcctacgaagcgctggtccaacatgtgattgaggaccatgaaagaatcggataccaagtgactgccatgattggacacactaacgtggtggtgcctagatccaaaccactcatgcttatcgcccctaagccccaggataagaagtcaatgggcctgcctccgcgcatcggctcactcgcgtccgggaacgtcaggtccctcccatcacaacaaatggtcaatcggctgtccatcccgaaaccgaacctcaactcgactggtgtgaacatgatgagctctgtgcacttgcagcaaaacaactacggagtgaagtctgtggggcagggttactcggtgggccagtcgatgagattgggtctgggcggaaacgcgccagtgtcgataccgcaacagtcccaatccgtgaaacaactgctgccatcaggaaatggacgcagctatggtctgggaagcgaacagcgctcgcaggcgccagcccgctactcgctgcagtcggctaacgcatcgtcgctgtcgtccgggcaactgaagtcaccaagcctgtcccagtcacaggcctcaagagtgctgggacagtcatcctcgaagccagccgccgccgccactggtcctccgccaggaaacaccagctcaactcagaaatggaaaatctgcactatttgtaatgaactttttcctgagaatgtctattccgtgcacttcgaaaaggaacacaaggccgaaaaggtgccggcggtggccaactacattatgaagatccacaatttcacttccaagtgcttgtactgcaacagatacttgcctactgatactctcctcaaccatatgttgatccatggcctgtcttgtccgtactgtcgctcaactttcaatgatgtggagaaaatggcggctcacatgaggatggtgcatatcgatgaggagatgggcccgaaaacggatagcaccctcagtttcgatctgacgctccaacagggatcgcacaccaacatccatttgctcgtgactacttacaacctccgcgatgccccggccgagtcggttgcctaccatgcacagaacaaccccccggtgccgcccaagccgcagccaaaagtccaagaaaaggcagacatcccagtgaagtcgtcaccccaggctgcagtgccatacaagaaggacgtcggaaagaccctctgccctctgtgtttctccatcctgaagggtccgatctcggatgctctggcccatcatctccgggagcgccatcaagtgatccaaactgtccatcctgtggagaagaagctgacttacaaatgtatccattgtctcggggtgtacacgtcgaacatgactgcctccactatcaccctgcatctggtgcattgccgcggcgtcggcaaaacccaaaatggccaggacaaaaccaacgcgccgagcagactgaatcagtcaccgagccttgccccggtgaagcgcacctacgaacagatggaatttccactgttgaaaaagcgaaaactcgatgacgactccgattccccgtcgttttttgaggaaaagccagaagagccggttgtgttggccctggacccgaagggacacgaggatgactcgtatgaggctcgcaaatccttcctgaccaagtacttcaataagcagccatacccgaccagacgcgagatcgaaaaactggcggcgagcctgtggctctggaagtccgacatcgcttcccacttcagcaacaaaagaaaaaagtgcgtacgagactgcgagaaatacaagcccggtgtgctgttggggtttaacatgaaggagctcaacaaagtcaagcacgagatggactttgacgcggaatggctctttgagaatcacgacgagaaggactcccgggtgaatgcgtccaagacggctgataagaaactgaacctcgggaaggaggatgatagctcttcggacagcttcgagaacctggaggaggaatcgaacgagtcgggatccccgttcgacccggtgtttgaagtggagccgaaaatcagcaatgacaacccggaggaacatgtgctcaaggttatcccggaggacgcgagcgaatcggaggagaagctggatcagaaagaagatggcagcaagtacgagactatccatctgaccgaagagcctactaagttgatgcacaacgcttccgattccgaagtcgatcaggacgacgtggtcgaatggaaggatggagcctcaccttccgagtccggtcctggttcccagcaggtgtcagactttgaggacaacacgtgcgagatgaaaccaggaacctggtccgatgaaagctcgcagtctgaagatgcccggtcaagcaaaccggccgcgaagaagaaagcaactatgcagggagatagggaacagctgaaatggaagaactcatcttatggcaaggtggagggattctggtccaaagaccagtcccagtggaagaatgcctcggagaacgatgagcggctgtccaatccacagattgagtggcagaactcaactatcgactcagaggatggagagcagttcgacaacatgaccgatggggtggctgagcctatgcatggctcgctcgccggggtcaaactgtcgtcacaacaagcg

SEQ ID NO: 321437 - DNA, 3306 bp, Artificial Sequence
  derived and/or modified sequence
atgttccagttgcccgtgaacaatctcggctcccttagaaaggctagaaaaacggttaagaaaatcctgtcggatatcggcctggaatactgcaaggagcatattgaggactttaaacagtttgaaccaaacgatttctaccttaagaacactacttgggaagatgttggtctgtgggatccgtcgctgacgaagaatcaggactaccggaccaaacccttctgttgctcggcatgcccattctcgtcgaagttcttctccgcttacaaatcgcacttccggaatgtgcactcggaagattttgagaacaggattctgctcaattgcccgtactgtaccttcaacgctgataagaaaaccttggaaactcacattaagatcttccacgcgccaaatgcctccgcgccgtccagctcgctcagcaccttcaaagacaagaataagaacgatggattgaaaccgaagcaagcagactcagtcgaacaggccgtgtattactgcaagaaatgcacctaccgggacccattgtacgaaattgtgcggaaacacatctatcgggagcatttccaacacgtggcggccccatacatcgctaaggcgggagaaaaaagcctgaatggagccgtgcctttgggaagcaatgctagggaagaatcctcgatacattgtaagcggtgcctgtttatgccaaaatcctacgaggccctcgtgcagcatgtcatcgaggaccacgaacgcatcggataccaggtgactgccatgatcggacataccaacgttgtggtcccacgcagcaaaccgctcatgttgatcgcccctaagccgcaggacaagaagagcatgggcctgcctccgcgcatcggcagcctcgcatcaggaaatgttagaagcctgcccagccaacagatggtcaaccgcctgtcgatcccaaagccgaaccttaactcgaccggcgtgaatatgatgtcgagcgtccaccttcagcagaataactacggagtcaagtcggtcggccaggggtactcggtcggacaatcaatgagactgggtctgggaggcaatgctccggtgtccattccgcagcagtcacaaagcgtgaagcaactgctcccgtcaggaaatggcaggtcgtatgggctggggagcgaacagaggtcccaagcccctgctaggtactcacttcagtccgctaacgcctcgtcgctgtcgtcgggacaactgaagtcaccgtcgctctcccaatcgcaagcgtcaagagtcctggggcagtcatccagcaaaccagcggcggctgcaactggaccgccgcctggtaacacctcgtctacccagaagtggaagatctgcactatctgcaacgaattgtttccagagaacgtgtacagcgtgcattttgagaaggagcataaggcggaaaaagtcccggcagtggccaactacatcatgaagatccataactttacttcgaagtgtctgtactgcaacaggtacctgccgactgataccctgcttaaccatatgctgatccacggcctcagctgcccgtactgcagaagcaccttcaacgacgtggaaaagatggcagcacacatgcgcatggtgcacatcgacgaagaaatgggccccaagaccgactccaccctgtcgttcgacctcactctgcagcaaggatcccacactaacatccatctgttggtcacgacctacaacctgcgtgatgctccggcagagtccgtcgcttaccacgctcaaaacaacccacccgtcccgccgaaacctcaaccaaaggtgcaagaaaaggcagatatccctgtcaagtcatccccgcaagccgccgtgccttacaaaaaggacgtgggcaaaactctgtgcccgctctgcttttcgatcttgaaggggccaatctcggacgctctggcccatcatctgcgggagcggcaccaagtgatccagacggtgcacccggtggagaaaaagctcacctacaagtgcatccactgtctgggggtgtacacttcgaacatgactgcctccaccattactctgcatctcgtgcattgtcggggcgtcggaaagactcagaacgggcaagacaaaaccaatgccccatcgaggctgaatcaatccccctcactggctccggttaagcgcacctacgaacagatggagttcccccttctgaagaaacggaagctcgacgacgactccgattcgcccagctttttcgaggaaaaacccgaagagccagtggtgctcgcccttgacccgaagggacacgaggacgattcgtacgaggctagaaagtcctttttgactaaatacttcaataagcagccataccctacgcgacgagaaattgaaaagttggcggcatccctctggctctggaaatccgacattgcgtcacacttctcgaacaagaggaagaaatgcgtgcgagactgcgaaaagtacaagccaggtgtcctgctgggatttaacatgaaggaactgaataaggtgaagcacgagatggacttcgatgctgaatggctcttcgaaaaccacgatgaaaaggactcccgcgttaatgcatcaaagactgctgataagaagctcaacctcgggaaggaagatgacagcagctccgactccttcgagaatcttgaagaagaatctaacgaatctggctcgccatttgacccagtttttgaagtcgagccaaagatctcaaatgacaacccggaagaacacgtgctgaaggtgatcccggaggacgcttccgagtccgaggagaagctggatcagaaagaagatggatcgaaatatgaaaccatccacttgaccgaagagcccaccaagctcatgcataacgcatccgattcagaggtggaccaggacgacgtggtggaatggaaagacggtgcctccccttctgagtccggcccgggatcccagcaagtgtcagacttcgaagataatacttgtgagatgaagccgggcacttggagcgatgaatcgagccagagcgaagatgctcggtcaagcaagcctgccgctaagaaaaaagcaacgatgcagggagacagagagcagctcaaatggaagaactcctcatatggaaaggtggagggtttttggtcaaaggatcagtcccagtggaagaacgcctcagagaacgacgagcgtctgagcaatccgcaaatcgagtggcagaactccactatcgatagcgaggacggtgaacagttcgataacatgaccgatggagtcgccgagccaatgcacggaagcctcgccggggtgaaactgtcctcacagcaggcc

SEQ ID NO: 321438 - DNA, 3306 bp, Artificial Sequence
  derived and/or modified sequence
atgttccagttacccgtgaacaacctgggctctttgaggaaggcccgaaaaaccgtgaagaaaattctgtccgacattgggttggaatactgcaaggaacatattgaggatttcaagcagttcgaaccaaatgatttctacctaaagaataccacctgggaggatgtcggcctgtgggatccgagcttgacaaaaaatcaggactatcgtaccaagccgttttgttgctcggcatgccctttcagctctaagtttttttctgcttacaaatcccatttcagaaatgtgcattccgaggacttcgaaaatcgcatcttactcaattgcccttactgtacctttaacgcagataaaaagacgctcgagacacatatcaagatattccatgcaccaaacgcttccgccccctctagcagcctgagcacattcaaagataagaacaagaatgatggtctcaaaccaaaacaagccgactcagtagagcaggctgtgtattattgcaaaaaatgtacctacagagaccccttatacgagatcgtaaggaagcacatctaccgcgagcacttccagcacgttgccgccccctacatagcaaaggccggcgagaaaagcttgaatggagcagtgccgctgggcagcaatgcaagagaggaatccagcattcattgcaagaggtgcctgtttatgccaaagtcttatgaggctctcgttcagcatgtgatcgaggatcacgaaaggattggataccaggtaactgccatgataggccacactaatgtagtcgtgcccaggagcaagcccctgatgctgatcgcacctaaacctcaggataaaaagagcatgggtctccccccccgcatcgggtctctcgcatccgggaacgtgcgctcattgccgtcacagcagatggtgaacaggttgagtatcccaaagccaaatctaaactcaaccggtgtaaatatgatgagtagcgtgcatttgcagcaaaataactacggtgttaagagcgtgggtcaaggttattcagtagggcaatcaatgagactgggactgggtggtaatgctccagtctctattccccagcagagccagtccgtcaaacagctgttgcctagtgggaacggacggtcatacgggctggggagcgagcagcggtcccaggcccctgcccgctacagtctgcagtccgcaaacgcatccagcctgtcctcgggtcagctgaagtccccttcacttagccagtcgcaggccagccgcgtgctcggccagagcagctcgaaacctgctgcggcagcgactggaccgccgccaggaaacacaagctccacacagaagtggaagatttgtactatttgcaacgagctcttcccggagaacgtgtatagcgtgcactttgaaaaggagcataaagctgagaaggttcctgcggtagctaattatataatgaagattcacaatttcacctcgaaatgtttatattgtaacagatacctgcctaccgacacgttacttaaccatatgttgatccacggattgagctgcccctactgtagatcgacttttaatgatgtggagaagatggcggcacacatgagaatggtgcatattgacgaggaaatggggccaaaaacagacagtacccttagtttcgaccttacactgcagcagggctcccataccaatatccacctgctagtgacaacatacaacttacgcgatgctcccgccgaaagcgtggcttaccatgctcagaacaacccaccagtgcctcctaagccccagcccaaggtccaggaaaaggcagatatcccggtgaagtctagcccgcaggcagctgtgccgtataagaaagatgtgggaaagacactttgtcctctgtgctttagtattctgaaaggcccaatttctgatgctctagcacaccaccttagggagcgccaccaagtgattcagacggtgcatcccgtcgaaaaaaagctcacgtacaaatgtatccattgcttgggcgtgtacacgagcaatatgaccgcttccactataactctccacctggtgcactgtcggggcgtgggtaagactcaaaatgggcaggataagaccaacgcaccaagccgcctgaatcaaagtccttcactggcccccgtgaagaggacctatgagcagatggaatttccactcctgaaaaaaaggaaattggacgacgattcagattctccttcctttttcgaagaaaagccagaagagcctgtggtcctggcccttgaccctaagggccatgaggatgacagttatgaggcccgtaagtcgtttctgacaaaatacttcaataagcagccctatcctacccgtcgcgaaattgaaaaactggccgcctcactctggctgtggaagtcagatatagcatcacattttagcaataaaaggaaaaagtgcgttcgcgattgcgagaagtataaacccggggtgctgctcggcttcaacatgaaggaactgaacaaagtgaagcatgaaatggatttcgacgctgaatggctattcgaaaaccacgatgagaaggactcccgcgtaaacgcctcgaagaccgccgacaaaaagctgaatctcgggaaggaagacgacagttcttcagactcctttgagaatcttgaagaagaatcaaacgagtccggttcaccattcgatccagtgttcgaggtagagccaaaaatttccaatgataacccagaggagcatgtgctgaaagtgatccctgaagacgcctcagagtctgaggagaaattggaccaaaaagaggatggatccaaatatgagactattcatctaactgaggaacctacaaaactgatgcacaacgcatcagactccgaggtagatcaggacgacgtcgtggaatggaaagacggcgcctccccgtccgaatctggcccagggtctcaacaggtgagtgactttgaggacaacacttgtgaaatgaagccaggtacatggtcagatgagtcatcccagtccgaagacgcccggagttccaagcctgcggccaagaaaaaggctacaatgcagggagaccgcgagcaactaaaatggaagaactccagctatggcaaagtggagggtttctggtccaaagaccaaagtcaatggaaaaatgccagtgaaaatgatgagcgcctttccaaccctcagatcgagtggcagaattctacaattgactccgaggacggcgagcagttcgacaacatgacagacggggttgccgagccgatgcacggcagccttgccggcgttaagctctcttcacagcaggca

SEQ ID NO: 321439 - DNA, 3306 bp, Artificial Sequence
  derived and/or modified sequence
atgttccaactcccagtgaataacctaggctccctaaggaaagctaggaagacggtgaagaaaattctcagcgacatcggtctcgaatactgcaaggaacacatcgaagacttcaaacaattcgagcctaacgacttttacctgaagaacaccacgtgggaggacgtaggactgtgggatccatctctcacgaagaaccaggactatcgcactaagccattctgttgctccgcgtgccctttcagcagtaaattttttagtgcgtataagtcccacttccgcaatgtgcactcggaggatttcgagaaccgtatcctgctgaactgtccctactgtacgtttaacgccgacaagaaaacactggaaacgcacataaaaatctttcacgctcctaatgcaagcgcgccctcgtcatctctcagcacttttaaagataaaaataagaatgatggcctgaaacctaaacaggctgatagtgttgagcaggccgtatattactgcaagaagtgtacgtaccgtgacccattatacgagattgttcgtaaacacatatatcgagagcacttccagcatgtggccgccccgtatattgccaaggctggcgaaaaatcgttaaacggagccgtcccactggggtccaatgctcgagaagaaagctctattcactgcaagcgctgcctgtttatgcccaagagctatgaagctttggttcagcacgtgatagaagatcacgagcgtattgggtaccaggtcaccgcgatgatcggccataccaacgtggtggtgccccgatcgaaacccctgatgctgattgcacctaaaccccaggataagaaatctatgggactgccgccgagaattggctccctggcatctggaaacgtgcgttctcttccatctcaacagatggtcaaccgcctctctatccctaagccaaatctaaactcaaccggcgtaaacatgatgtcatcagttcatctccagcagaataactacggcgtgaaaagtgtcggtcagggctactcagtagggcagagcatgagactgggcctaggcggtaatgcacctgtatcaatcccacaacagtcacagtctgtgaagcagttgcttccttccgggaatggccgttcatacggtctgggaagtgagcagcggtctcaggccccagcgcgctactctctgcaatccgcaaacgcctctagtttgagctccggccagttgaagtcgccaagcctttcccagtcccaggcatcacgcgtgctcggacaaagctcgagcaagcccgccgctgctgcaacaggaccgccgcctgggaacacctcttctacccagaagtggaaaatatgcactatctgcaatgagctgtttccggagaacgtatattccgtccattttgaaaaggagcacaaggccgagaaagtgcctgctgttgctaattatatcatgaagatccacaatttcacaagcaaatgcctgtattgtaataggtatctacccacggataccctgctgaaccatatgttgatacacgggctcagctgtccatactgccggtccaccttcaacgatgtggaaaagatggccgcgcacatgcgcatggtacacattgacgaggagatgggaccgaagactgactcaaccctgagcttcgacctaactttacagcaggggagccatactaatatacacctcctcgtcaccacctacaacctgagggatgccccggccgaatccgttgcatatcacgcccagaataaccccccagtgcctcccaaaccacagccgaaagtccaggagaaagccgacattccggtgaagtcttctcctcaggccgctgtcccctacaaaaaggatgttggcaagaccctgtgtccattgtgtttctcaatccttaagggtccaatcagtgacgcactggcacaccacttaagagagaggcatcaggtgatacaaacagtccaccccgtggagaaaaaacttacatacaagtgcatccattgtctgggcgtgtacacttccaacatgacggcgagcaccataaccctccacctcgtccattgccgaggcgtgggcaaaacgcagaatgggcaggacaagacaaacgcaccttccaggctgaaccagagccctagcctggcccctgttaaacggacctatgagcaaatggagtttccgctgcttaagaaaaggaaactggacgatgatagcgactctcctagtttctttgaagaaaaaccagaggagccagtggtcctggccctagacccgaaggggcacgaagacgacagctacgaggcaaggaaatcctttcttacaaagtattttaacaaacagccttatccaactcggcgagagattgagaagctcgcggcgagcctttggctatggaaatcagacattgccagccacttttctaacaaacgaaaaaagtgtgtgagggactgtgagaagtacaaaccaggagtcttgctgggcttcaatatgaaagaactaaataaagttaagcatgagatggatttcgatgcggagtggctgttcgagaatcatgacgagaaggactcacgtgtcaatgctagtaaaacagccgacaagaagctaaatctcggaaaagaagacgacagcagctccgatagtttcgaaaacctcgaagaggagtcgaacgaatctggctctcctttcgatccagtgttcgaggtggagccaaagatatcaaacgacaacccagaagaacacgtgctcaaggttatccctgaagatgctagtgagagcgaggagaagcttgatcagaaagaggatgggtcaaagtacgagacgatccatctgaccgaagaacccacaaaactgatgcataatgcttctgattccgaagttgaccaggacgacgtggtggaatggaaggatggggcctctccctccgagtccggacctggaagtcagcaggtgtctgacttcgaagacaacacctgtgagatgaagcctggaacatggtctgatgaatccagtcagagcgaagacgcacggtccagcaaacctgccgcgaaaaaaaaagcaacaatgcagggggatcgcgaacagctgaaatggaagaatagctcctatgggaaggttgaaggcttttggagcaaggatcagagtcaatggaagaatgcttcagaaaacgacgagagactgtctaacccacaaatcgagtggcagaattcgactatagattctgaggatggagaacaatttgacaacatgaccgatggcgtggcagagccaatgcatggcagcttagcaggcgtgaagctgtcgtcccagcaagcc

SEQ ID NO: 321440 - DNA, 3306 bp, Artificial Sequence
  derived and/or modified sequence
atgtttcagctgcctgtaaataacttaggcagcttgcgcaaggccagaaagactgtcaagaagatcctctccgacatcggactggagtactgcaaggaacatatagaagatttcaagcagttcgagccgaacgacttctatctaaagaacaccacctgggaagacgtgggactgtgggacccttccctgactaaaaatcaggactataggaccaaaccattctgctgctcagcatgtccattttcttccaagttcttttccgcgtataagagccacttcaggaatgtgcactccgaagacttcgagaataggattctgctcaactgcccctattgcactttcaatgccgataaaaaaactctggaaacccacatcaagatctttcacgcaccaaatgcctctgcccccagctcttccttgtcaacctttaaagacaaaaacaagaacgatgggttgaagccaaagcaggccgatagtgtggaacaggccgtttattattgtaagaaatgtacgtatcgggaccctctctatgagattgtccgcaaacacatttaccgcgaacattttcaacacgtggcggctccctatatagctaaagccggggaaaaaagtttaaatggtgctgtgccactcgggtctaatgccagggaggagtctagcatccattgtaagcggtgtctgtttatgccaaaatcctacgaagctttagtgcaacacgtcattgaagatcacgagagaattggatatcaggtgactgccatgatcggtcatacaaacgtagttgtcccccggtctaagccgctcatgctgattgctcccaaacctcaggacaagaagagcatggggctcccaccccgtatcgggagcctggcaagtggaaacgtcaggtctctgccaagccagcaaatggtgaatcgcctaagcataccgaaacccaatttaaacagtaccggcgtgaatatgatgagcagcgttcacttgcagcaaaataactacggcgtcaaatcagtgggccagggatatagcgttggccagtcgatgcgactcggtcttgggggaaacgctccagtgtccataccccagcaatctcagagtgtgaaacaacttctgccaagcggaaacggcagaagttacggactgggctctgagcagcgctcgcaagctccagcgcgctattccctgcagtctgctaacgcaagtagtctttcgagtggacaactgaagtctccaagtttgagccaatctcaggccagccgggtgttgggacagtcctcatctaagccagccgctgctgccaccgggccgccgcccggcaatacatccagcactcaaaagtggaagatttgcactatctgcaacgaactgttccccgagaatgtttactccgtgcactttgagaaggaacataaagccgagaaagtgcctgctgtggccaactacatcatgaagattcataatttcaccagtaaatgtctttactgcaaccgatacctgcctactgatacccttctgaaccatatgctgatccatggtctgagctgcccttattgcagatcaacttttaacgatgtcgagaaaatggccgcgcacatgcggatggtccacatagatgaggagatgggtccgaagactgactcaaccttaagcttcgacttaaccctgcagcaagggtcccataccaacattcacctcctggttactacttataacctgcgggacgcaccagcagagtcagtggcataccacgctcagaacaacccccctgttcctccaaagcctcagcctaaggttcaggagaaagctgatatacctgtgaaaagtagccctcaggccgctgtgccttataaaaaggacgtgggaaaaacactgtgccccctgtgtttctcaatcctcaagggacccatttctgacgcactcgctcatcatctgcgtgaacgtcatcaggtgattcagacagtgcaccccgtggagaagaaactcacttacaagtgtatccattgcctgggggtgtacactagtaatatgacggcctccacaataacgctgcatctcgtacattgtagaggagtggggaaaacacagaatggtcaggataagacgaatgccccttcacggctcaaccagtccccctctttggcccctgtaaaaagaacctatgaacagatggaatttcctttgctgaagaagagaaagctggacgacgactccgacagcccttctttcttcgaggagaaaccagaggagccagtcgtgctggccctggaccctaaagggcacgaggacgactcctacgaggcccgcaagtcctttctcacgaaatactttaacaagcagccctatccgacaagacgggagatcgaaaaacttgccgccagcctttggctgtggaagagtgatattgcttcccactttagcaacaagagaaaaaagtgtgtgcgggactgtgagaagtacaagcccggcgtactgcttggattcaacatgaaggaactgaacaaagtgaaacatgaaatggatttcgacgcagagtggctgttcgaaaaccacgacgagaaagattcaagagtgaatgccagcaagaccgcagataagaaacttaatttgggcaaagaagatgactcttcctccgattctttcgagaatttggaggaagagtcaaacgagtcaggtagtccatttgatcctgtgtttgaggtggagcctaagatcagcaacgacaatcccgaagagcacgtgttgaaagtgattcctgaggatgcaagtgagagcgaggagaagttggatcagaaagaggatggtagtaaatatgaaacgattcacctgaccgaggagcctaccaaactgatgcataatgcatccgatagtgaggtggaccaggacgatgtcgtcgagtggaaagacggtgctagtccgagtgaatccggccctggctcccagcaggtgtccgatttcgaggacaacacttgcgagatgaagccaggaacctggtcagacgagtcatcccaaagtgaggacgccaggtcctctaagcccgccgctaagaaaaaggcaaccatgcagggggacagagaacagctgaagtggaagaattctagctacggcaaagtcgaaggcttctggagcaaggaccagagccagtggaagaatgcgtccgagaacgatgagagattaagcaatccacagatcgaatggcagaatagcacaattgactctgaagacggcgagcaatttgataacatgaccgatggagtcgcggagcctatgcacggctcactggcgggagttaagctgtcgtctcagcaggcg

SEQ ID NO: 321441 - DNA, 3306 bp, Artificial Sequence
  derived and/or modified sequence
atgtttcagcttccagtgaataatctgggcagcctgcgtaaggcaagaaaaactgtgaagaagattctgtcagatataggacttgaatactgtaaagaacatatcgaggactttaagcaattcgagccgaacgatttctacctcaagaacactacctgggaggacgtcggtctgtgggacccatccttgaccaaaaatcaagactatcggactaagccattttgttgctccgcatgtccattctcatcgaaattctttagcgcttacaagtcgcattttagaaacgtgcacagcgaagatttcgaaaacagaatcctgctcaattgtccctactgcacctttaacgcagacaaaaagaccctcgagactcatatcaagatctttcatgctccaaacgcatcggcaccatcctcttccctttccaccttcaaagacaaaaacaaaaatgacggccttaagcctaagcaagcagactcagtggaacaggccgtgtactactgcaagaagtgtacgtacagggaccctctttatgagattgtgcggaagcatatctatcgcgagcatttccagcatgtcgcggcgccctacattgcaaaggcaggtgagaaatcgcttaacggtgcggtgccccttggaagtaacgcaagagaggaatcatccatccattgtaagaggtgtcttttcatgccaaagagctacgaagcactggtgcagcacgtgatagaagatcacgagaggataggttatcaagtgactgccatgatcgggcataccaacgtggtggtcccaaggtcaaaacctttgatgctgatcgcacctaagcctcaggacaagaagagcatggggcttcctccaagaatcggtagcctggcaagcggtaacgtcagatccctcccaagccagcagatggtgaacagactgtccatccctaaacctaacctgaattccaccggagtgaatatgatgtcatcagtccatcttcagcaaaacaactacggagtgaagtcagtcggtcaaggttactcggtcggtcaatcaatgcgcctggggctgggaggaaatgcacctgtgtccattcctcaacaatcgcaatcggtgaaacaactgctcccatccggaaacgggagaagctacggtctgggatcagagcagagaagccaggcacctgcacgttacagcctgcagtccgcaaacgcatcgagcctttcgtcgggtcagctcaagtcaccctcactcagccagagccaagcctcccgagtgttgggtcagtcatcgtccaagcctgcagccgcagccaccggtccgccaccaggaaacaccagctcgactcaaaagtggaagatatgtactatctgtaatgagctgtttcctgagaacgtgtactcggtgcattttgaaaaggaacataaggccgaaaaggtgcccgctgtggcaaactacatcatgaagatccataactttacctccaagtgcctgtactgtaaccgctaccttccgaccgatacccttttgaatcatatgcttattcacggtctttcctgtccgtattgtcgctccactttcaatgacgtggaaaagatggccgcccatatgcgcatggtccatatagatgaggaaatgggacctaagaccgactcgaccctgagcttcgatctgaccttgcaacagggtagccataccaatattcaccttctggtgacgacctacaacctgcgagatgcacctgctgagtccgtcgcataccatgcacaaaacaatcctcccgtgccaccaaaaccacagcctaaggtccaagaaaaggcggatattccggtgaagtcctcacctcaggcagccgtgccatacaagaaggatgtcgggaaaacgctctgtcccctgtgttttagcattctgaagggacctatctccgacgcccttgcacatcatcttcgggaaagacaccaagtcatccagactgtgcatcctgtcgagaagaagctcacctacaaatgtattcactgtcttggcgtctatacctcgaacatgactgcctcgacgatcaccttgcaccttgtccattgtagaggagtcggaaagacccagaatggccaagataagaccaacgcaccctcgagattgaatcaaagtccttcgctggcaccagttaagcggacctacgaacaaatggaattcccactccttaagaaaaggaagctggacgacgattctgattcccctagcttctttgaagaaaaaccagaggaacctgtcgtcctggccctggacccaaagggccatgaagatgattcctacgaggcccggaagtccttcctgactaagtacttcaataaacaaccttaccctactcgccgtgaaattgaaaagctcgctgcctccctttggctgtggaagtccgacatcgcctcgcacttttcaaataagaggaaaaagtgtgtccgggactgtgaaaagtataaaccaggagtccttcttggctttaacatgaaggaacttaacaaggtcaagcacgagatggactttgatgcagaatggctttttgaaaaccacgacgagaaggattccagggtgaacgcaagcaaaaccgccgataagaagttgaatctgggtaaggaggacgattccagctccgacagctttgagaacctcgaagaagaatccaacgaatctgggtcaccctttgatcctgtgtttgaagtcgagcctaagatttcaaacgataacccagaagagcacgtgctgaaggtgattcctgaggatgcatcggaatctgaagagaaacttgatcagaaggaggatggatcgaaatacgagacgatccatcttactgaagaacctaccaagctgatgcacaacgcatccgattcggaagtggatcaggatgatgtcgtggaatggaaggatggggcatcaccatctgagtcgggacctggatcgcaacaagtctccgatttcgaagataacacctgcgaaatgaagcctggtacttggtcggatgagtcgtcgcaaagcgaagatgctaggtccagcaaacctgctgcgaagaaaaaggccaccatgcaaggagatagggagcaactgaagtggaagaattcgtcatacgggaaagtcgaagggttttggtccaaggatcagtctcagtggaaaaatgcgtccgaaaacgacgagcgtctgtcaaacccacaaatcgagtggcaaaattcgacgattgattctgaagatggagaacagttcgataacatgaccgacggagtggcagaacccatgcacggctcactggcaggtgtgaaactttcgtcgcagcaggca

SEQ ID NO: 321442 - DNA, 3306 bp, Artificial Sequence
  derived and/or modified sequence
atgttccagctgccagtcaataatctgggtagcctccgcaaggcccggaaaaccgtgaagaaaatcttgtcagatatcggactcgagtactgtaaagaacatatcgaggacttcaagcagttcgaacccaacgatttttaccttaagaacacgacttgggaggacgtggggctgtgggatccgtccctgaccaagaatcaagactaccggactaagccgttttgttgctccgcatgcccgtttagctcgaagttcttttccgcgtacaagtcccacttcaggaacgtgcactctgaggacttcgagaaccggatcctcctcaactgcccgtactgtacttttaacgctgataagaagacccttgagactcacatcaagatcttccacgcaccgaacgcctctgccccgagctcgtccctgtcaacttttaaggacaaaaacaaaaacgatggcttgaagcctaaacaggccgactcggtggaacaggcagtgtactactgcaagaaatgcacctacagagatccgctctacgagatcgtgcgaaagcatatctaccgggagcactttcagcatgtggcagcaccctacatcgccaaggccggagagaagtccctcaatggagctgtgcctctgggatccaacgctcgcgaggaatcctccatccactgcaagagatgtctgtttatgccaaagtcctacgaagcgctggtgcaacacgtgatcgaagaccacgagcggatcgggtaccaggtgacggccatgatcggacacacgaatgtggtggtcccgcgcagcaagcccctgatgctcattgcgccaaagccgcaggataagaagtccatggggctcccgccacgcatcgggagcctggcttccggcaacgtgagatccctcccctcgcagcagatggtcaaccgcctttccatccccaagcccaacctcaactcaaccggtgtgaacatgatgtccagcgtgcatctgcagcagaacaattacggagtcaagtcagtgggtcagggctactcagtgggacagtccatgaggctgggactgggaggaaacgcaccggttagcatccctcagcagtcgcagtcggtgaagcaactgttgccgagcggaaatggaaggtcctacggactgggatcggaacaacggtcacaagcacctgcgcggtactcgctgcaatcggcgaacgcgtcctctctcagcagcggccaactgaagtccccgtcgctctcgcaatcgcaggcctcgcgcgtgctcggacagagctcgtccaagccagcagcggccgccaccggacctccgcctggaaacacgagtagcactcagaaatggaagatctgcactatttgcaatgagttgttcccagaaaacgtgtactccgtacacttcgaaaaagagcacaaggcggaaaaagtccctgcagtcgcaaactacatcatgaagatccacaactttacctcaaagtgcctgtactgtaaccgctacctgcccaccgacaccctgctcaatcatatgttgatccacggcctgtcttgtccgtactgcaggtccaccttcaacgacgtggaaaagatggccgcccacatgcgcatggtccatatcgacgaagaaatgggccccaagacggatagcaccttgagcttcgacttgacccttcagcagggttcacataccaatattcatctgttggtgaccacttacaacctgagagacgccccggcggagtccgtggcctaccatgctcagaacaatcctcctgtgccaccgaagcctcaacctaaggtccaagaaaaggcggatatcccagtcaaaagctcccctcaagctgcggtcccatacaagaaggacgtcgggaaaaccctttgtccgctctgtttctccatccttaaggggccaatctcggacgcccttgcccatcatttgcgggaacggcaccaagtgattcaaaccgtgcaccctgtggagaagaaattgacttacaaatgcatccattgcctcggggtctacacctcgaatatgacggccagcactatcaccctccacctggtgcactgtcggggagtcggaaagactcagaacgggcaggataagaccaacgccccctcccggctgaaccagagcccaagcctggccccagtcaaacgcacttacgagcaaatggaattccccctgctgaagaagcggaagctcgacgatgactctgactcgccatcattctttgaagagaagccggaggaaccggtggtgctcgcgctcgaccctaagggccacgaggacgactcatacgaagccaggaagtcgttccttactaaatacttcaataaacagccttacccgactcggcgcgagatcgagaagctggccgcctccctgtggctgtggaaatcggacatcgcctcacacttctccaataagcggaagaagtgcgtccgggactgcgaaaagtacaagccgggggtcctcttgggcttcaacatgaaagaactcaacaaggtgaagcatgaaatggattttgacgccgagtggctgttcgagaatcatgacgaaaaggactcccgcgtcaatgcgtccaagaccgccgacaaaaagctgaacctcgggaaagaagatgactcctcgtctgactcattcgaaaacctggaagaagaatccaatgaaagcggtagtccgttcgatcccgtgttcgaggtcgaacccaagatcagcaatgacaacccggaggaacatgtgctgaaggtgatcccagaagacgcatccgaatcagaagaaaagctggaccaaaaggaagacggaagcaaatacgaaacgatccatctcaccgaagaacctaccaagctgatgcataacgcaagcgactcggaagtcgaccaggacgacgtcgtggagtggaaggacggggcctccccatcggagtccggacctggatcacaacaggttagcgatttcgaggataacacttgtgaaatgaagccgggaacctggtccgacgagagctcgcaatccgaggatgcgcgctcgtcgaaaccggcagcgaagaagaaggccactatgcagggggacagagaacaactcaagtggaagaattcctcatacggaaaagtggaaggcttctggtcaaaggatcagtcgcagtggaagaacgcctcggaaaatgatgaacgactgagcaatccgcaaatcgaatggcagaactcaaccatcgattccgaagatggtgagcagttcgataacatgactgacggtgtcgcggaaccgatgcacgggtccctggccggagtcaagctctcaagccaacaagct

SEQ ID NO: 321443 - DNA, 3306 bp, Artificial Sequence
  derived and/or modified sequence
atgttccagttgcctgtgaataacctggggagcctgcgcaaggctaggaagactgtgaaaaagatcctcagcgatatcggcctggagtactgcaaggagcatattgaagattttaaacagtttgagccaaacgatttctacctcaaaaacaccacctgggaagatgtgggcctctgggatcccagcctaacaaaaaaccaggattatcggaccaagcctttttgctgctctgcttgtcctttcagctctaaatttttctccgcatacaagtcccattttaggaatgtacactcggaggacttcgagaaccgcattctcctgaattgcccttactgcacatttaatgctgataagaaaaccctggagacccatataaagatttttcacgcccctaacgcctccgctcctagcagctcactcagcacttttaaggacaaaaataaaaatgatggactcaaacccaagcaggctgactcagtcgagcaggcggtgtactactgcaaaaagtgcacatatcgcgaccctttgtacgaaatcgttagaaagcatatttatagagagcattttcaacatgtggctgccccatacatagccaaggcgggagagaagtctctgaatggcgcggtccccctcggatcaaatgctcgcgaggagtctagcatacactgtaagagatgtctgttcatgcccaaatcttatgaagcattggttcagcacgtaatagaggaccatgagcgcatcggatatcaagtgacagcaatgatcgggcataccaatgtggtagtgcccaggtccaagccactcatgctgatcgcgccaaagccccaggataaaaagtctatgggactgccccccaggattggcagcctcgcaagcggaaacgtgcggagccttcccagccaacaaatggtcaaccgcctgagtatccctaaaccaaacctgaatagcacgggcgtgaatatgatgagcagcgtccacttacagcagaacaactatggagttaaatctgtaggtcaaggttacagtgttggccagagtatgcgtctggggttaggtggcaacgccccagtttccattccgcagcaatcgcagtctgtgaagcagctccttccttccggcaatggccgttcatacggcctgggaagcgagcaacggagccaggcaccagcccgctacagtctgcaaagcgcaaacgcttcttctctaagtagcggccagctgaaaagtccatctctatcacagtcccaagcttcacgggttcttgggcagtccagctctaaacctgctgcggccgccaccggaccacctcctggcaatactagctccacacagaagtggaagatttgcaccatttgcaacgagctgttcccagaaaacgtttactcggtccatttcgagaaggaacataaggcggaaaaggtgcccgccgtcgcaaactacatcatgaagatccacaactttaccagtaagtgcctctattgcaacagataccttccaacagacaccctgctcaatcatatgctcattcacggactatcctgtccatactgtagaagcactttcaacgatgtcgaaaaaatggccgcccacatgcggatggtgcacatagacgaggaaatgggccccaaaacagacagcactctcagtttcgatttgactctgcaacaaggatctcacactaacatacacctgcttgtgaccacttacaacttgagagatgccccagctgagtcagtggcctatcacgcccagaacaaccctcccgttcccccaaaacctcagccaaaggttcaggaaaaagctgatattcctgtcaagtcttcccctcaggctgccgttccatataaaaaggacgtcggaaaaacactttgtcccctctgtttctcaatcttgaaggggccaattagtgacgctctcgcacaccacctgagggaaagacaccaggtaattcagacggtgcacccagtggaaaaaaagctgacctataaatgcattcattgtctgggagtctataccagcaatatgaccgcaagcaccattacgctccaccttgtgcattgcaggggcgtcggaaaaactcagaacggacaggataaaacgaatgctcccagccggctcaatcaatcaccatctttggctcctgtcaagcggacctacgaacaaatggaattccctctgcttaagaaaagaaaactggatgatgactccgactcaccttcttttttcgaggaaaaaccagaagaaccagtggtgctcgccttggatcctaaagggcacgaggacgatagctatgaggctcggaagtccttcctgaccaagtacttcaataagcaaccctacccgacgcgccgggaaatcgaaaaactggctgccagcctgtggctgtggaaatctgatatcgctagccattttagcaacaagcgcaagaaatgcgtcagagattgcgaaaaatacaagccaggcgtcctccttggcttcaacatgaaggaacttaacaaagtgaagcacgaaatggattttgacgctgaatggctgttcgagaaccatgatgagaaggactcccgagttaacgcatccaagacggcagataagaaactcaacttgggaaaggaggatgacagcagctcggacagtttcgaaaacctggaggaagaatccaacgagagcggtagccccttcgatcctgtgttcgaggtcgaacctaaaatttcaaacgataacccagaggagcatgtgctgaaggtgattccagaagatgcaagcgaatccgaggagaagttggatcagaaagaggatggcagtaaatacgagacaattcatctgacagaagaacctacaaagcttatgcataacgccagcgacagcgaggtcgatcaagacgacgtagtggaatggaaggatggcgcaagtcctagtgagtccggacccggatcccaacaggtcagcgacttcgaagacaatacctgcgagatgaagcctggaacctggagcgatgaaagttctcaaagtgaagatgcacgctcctccaagcctgccgcaaaaaagaaagctaccatgcaaggagaccgggaacagctgaaatggaaaaattcgtcttacggaaaggtggagggtttctggtcaaaggaccagtcacaatggaagaacgcatcagagaatgacgagagactgagcaaccctcagatcgaatggcaaaactctacaatcgacagcgaggacggtgaacagttcgacaatatgactgatggagtggccgagcctatgcacggatctttggctggcgtcaagctctccagccagcaggca

SEQ ID NO: 321444 - DNA, 3306 bp, Artificial Sequence
  derived and/or modified sequence
atgttccaactcccagtcaacaatctcggatcgctgcggaaggcgcgcaagactgtcaagaagatcctttccgatatcggtctggaatactgtaaagaacatattgaagatttcaagcaattcgaaccaaacgacttttatctgaaaaacactacttgggaagatgtcggactgtgggatccatctcttaccaagaatcaagattaccgtaccaagcccttttgctgttcggcctgcccattctcctcgaagtttttctccgcatacaagtcacatttcagaaatgtccacagcgaggatttcgaaaatagaatcctcctcaactgtccatactgtacgtttaacgcagataagaaaactcttgagactcacataaagatattccatgcaccaaacgcatctgcaccgtcgagctcgctgtcgaccttcaaggataagaacaagaatgatggtctgaagcctaaacaggcagattccgtcgaacaagctgtgtactactgtaagaagtgtacgtatcgcgacccgctctacgagattgtcagaaagcacatttaccgggaacacttccaacatgttgcagcgccatacattgcgaaggcaggtgaaaagtcgcttaacggagccgtgccactgggttccaatgcaagagaagagtcatcgattcactgcaagcgctgccttttcatgccgaaatcctacgaggcgctcgtccaacatgtgattgaagatcatgagaggatcggataccaggtgacggccatgatcggacatactaacgtcgtggtgccacggtcgaaacctcttatgctgattgctcctaaaccccaagataagaaaagcatggggctgcctcctcgtattgggagcctcgcctcaggcaatgtgcgttcgttgccttcccagcagatggtgaataggttgtccatacccaagcccaacctgaactccacgggcgtgaatatgatgtcgtccgtgcatcttcagcagaacaattacggtgtcaagagcgtcgggcagggttacagcgtgggccaatcaatgcgcttgggtctgggtggtaatgcaccagtgtccataccgcagcagtcacagtctgtgaaacagcttcttccatccggaaacggccgatcctacggactgggctcggaacagcgctcgcaagcgcctgcgcgatacagccttcaatcggcgaacgcttcgtcacttagcagcggacagctcaagtcccccagcctctcacagtcgcaggcctcgagagtgctgggccagtcgtcctccaagcctgcggcagccgcaacgggtcccccgcctggcaatacctcctcgacccagaagtggaagatttgtactatttgtaacgaactctttccggagaatgtttactcggtgcattttgaaaaggaacataaggctgaaaaagtgcctgcagtggccaactacatcatgaagattcacaatttcacttcgaaatgcctctactgcaaccggtacctccctactgacaccctccttaatcacatgcttattcatggactgtcatgtccgtactgccgctcgacctttaacgatgtcgagaagatggcagcgcatatgcgaatggtccatatagacgaagaaatggggccaaagaccgactcaactctgagcttcgatctcaccctgcaacaaggatcgcataccaatatacatctccttgtcaccacttacaacttgcgcgacgcccccgcagaatctgtggcgtatcatgcgcaaaacaatccaccagtgcctcctaaaccacagccaaaggtgcaggaaaaggcggacattcctgtcaaaagctcgccccaggcagccgttccttacaagaaggacgtcggaaagaccctgtgcccactctgtttttccatcttgaagggaccgatttcggatgcgcttgcccatcacttgcgggaaaggcatcaggtgattcagactgtgcatccagtggaaaagaaactcacttacaagtgcattcactgtctcggcgtgtacacctccaatatgacggccagcactatcacccttcatctggtgcattgtcgaggtgtgggcaaaactcaaaacggacaagataaaaccaatgcaccgagcaggcttaatcaatccccttcgcttgcaccagtgaaacggacttatgaacaaatggagtttccccttctgaaaaagagaaagctcgatgatgatagcgactcccctagcttttttgaagaaaagccggaggagcccgtggtgcttgcactggatcccaagggtcatgaggatgatagctacgaggcacgcaagtctttcctgactaagtacttcaacaaacaaccctacccaacccggcgtgaaattgaaaaactggcggcatcgctctggctctggaagtctgatattgcttcacacttttcaaacaagcggaagaaatgtgtgagagattgtgaaaagtacaagccgggtgtgctcctgggttttaacatgaaggaactcaataaggtcaaacacgagatggattttgacgcagagtggctttttgaaaaccacgacgagaaagacagcagagtgaatgcatccaaaaccgccgacaaaaaactgaatctggggaaggaagatgatagctcctcagattcctttgaaaatctggaagaggaatcgaacgaatccggatcaccttttgaccctgtctttgaggtcgagcctaaaatcagcaatgataaccccgaggaacacgtgctgaaggtgatcccagaagatgcatcagaatcggaggaaaaactggaccaaaaggaggatggctccaaatacgagactatacaccttactgaagaaccaaccaaactcatgcataacgcatcagactccgaggtggaccaagatgacgtggtggaatggaaggatggggcaagcccctcggagtcagggcctggttcgcaacaagtctcagactttgaagataatacttgtgagatgaaacccggtacctggagcgacgagtcctcccaatcggaggatgcgcgctcttcgaaacctgcagcaaagaagaaggcaactatgcaaggagatcgagagcagcttaaatggaagaactcgtcatacggaaaggtcgagggcttttggtcgaaagaccagagccaatggaagaacgcaagcgaaaacgatgaacgcctctcaaaccctcaaattgaatggcaaaactccactatcgactcggaagatggagaacaattcgataacatgactgacggagtggctgaaccaatgcacggcagcttggcgggcgtgaagctgtcatcccagcaggca

SEQ ID NO: 321445 - DNA, 3306 bp, Artificial Sequence
  derived and/or modified sequence
atgttccaactgcctgtgaacaatctcgggtcccttcgcaaagctaggaaaactgtgaagaagatcctgtcagacatcggccttgagtactgcaaggagcatatcgaagatttcaagcaattcgaacctaatgatttctatttgaaaaacacgacttgggaggacgtgggtctgtgggacccttcgttgactaaaaaccaggattacagaactaaacctttttgttgcagcgcctgccccttttcgtccaagttcttctcggcctacaagagccacttcagaaacgtgcactccgaagatttcgagaaccgcatcctgctgaattgcccatattgcactttcaacgcggacaaaaagacgctggaaactcacatcaaaatctttcacgcaccgaatgccagcgccccgtcctcgtccctttccactttcaaggacaagaacaagaatgacggtcttaagccaaagcaagccgacagcgtggagcaggcagtctactactgcaagaaatgcacctaccgcgaccctctctacgaaatagtccgcaagcacatctaccgcgagcatttccaacatgtcgccgcgccgtacatcgccaaagccggagaaaaatcactcaacggagctgtgccgctcggctcgaatgctagagaagaatcctccatccactgcaagcggtgcttgttcatgccgaagtcgtacgaagccttggttcagcatgtcattgaggaccatgagcgcatcggttaccaagtgactgctatgatcggtcatactaatgtcgtggtgccaagatcgaagccgttgatgctgatcgcccccaagccgcaagataagaagtcaatgggcctgccgccgcggatcggatcgctggcgtccggcaacgtgaggtcgctgccgagccaacagatggtcaatcgcctttcaatcccgaagccgaacttgaactcgactggagtgaacatgatgtcctccgtgcacctccagcagaacaactatggagtgaagtctgtgggacagggatacagcgtgggacagtctatgcgcctgggcttgggaggaaatgcaccagtttccatcccccagcaaagccagtcggtgaagcagcttctcccgagcggcaacggtcggtcgtacgggctcggatcggagcaacggtcacaggcgccagctcggtattcgttgcagtccgcaaacgcttcttccctgtccagcggacagctgaaatccccatcactgtcacagagccaggcttctcgcgtcctcggacaaagctcatctaagcctgctgcggctgccactgggccaccgccaggcaacaccagcagcacccaaaagtggaagatctgtaccatctgcaacgaactctttccagaaaacgtgtactcggtccactttgagaaggaacacaaagccgaaaaggtccctgccgtggcgaactacatcatgaagatccacaacttcacctccaaatgcctgtactgcaaccgttaccttccaactgacaccctcctgaaccacatgctcattcacggactgagctgcccgtactgtcgctcgactttcaatgatgtggaaaagatggccgctcatatgagaatggtgcatatcgacgaggagatgggaccgaaaacggacagcaccctctcttttgacctgaccctgcaacaaggctctcataccaacattcacttgctcgtcaccacctacaatctgagagatgcccctgccgaatcggtggcttaccacgcccagaataatccgcctgtgccgcctaaaccacagccaaaagtgcaggagaaggccgacatccccgtgaagtcctcgcctcaggcagccgtcccatacaagaaagacgtgggaaagaccctgtgccctctgtgcttcagcatcctgaaggggcctatttcggatgcacttgcacaccacctgcgcgagagacaccaggtgatccagaccgtgcacccagttgagaaaaagctcacgtacaagtgcatccattgtctgggtgtgtatacgtcaaacatgaccgcctcgactatcaccttgcacttggtgcactgcagaggagtgggaaaaacccaaaacggacaggataaaactaacgccccgtcgcggttgaaccagagcccatccctggctccggtgaaacggacctacgaacagatggagtttcccctcctgaagaaacggaagctcgatgacgacagcgattcgccgtccttcttcgaagagaagcctgaagaaccggtggtgctggccttggacccgaagggccacgaagatgacagctacgaggccagaaaatccttccttaccaagtacttcaacaagcagccgtaccccactcggcgagaaatcgagaagctcgccgcgtcactgtggttgtggaagtcggatatcgcgtcgcacttcagcaacaagcgcaagaagtgtgtgcgggattgcgaaaagtacaagccgggagtcttgctcggcttcaacatgaaggaacttaacaaggtcaagcatgaaatggacttcgacgcggagtggttgtttgagaaccatgacgagaaagactcgagagtgaatgcttcgaaaacggcagataagaagctgaatctgggaaaggaggacgattcgtcatccgattccttcgagaacctcgaagaagaatcaaacgaatcaggttcgccgttcgacccggtctttgaagtggagcccaagatttcaaacgataacccggaagagcacgttctgaaggtcatcccggaagatgccagcgagtccgaggagaagctcgaccagaaggaagatggttccaagtacgaaacgatccatctgaccgaggaaccgactaagttgatgcacaacgcctcagactctgaagtggaccaagatgatgtggtggaatggaaggacggagccagcccctcagaatccgggccggggtcacaacaagtttcggatttcgaggataacacctgtgagatgaagccaggcacctggtccgacgagtcctcgcagagcgaggacgccagatcctccaagccagccgcaaagaagaaagccaccatgcagggagacagggaacagctcaaatggaaaaacagctcgtacggcaaggtcgaaggcttctggtcgaaagatcaatcccaatggaagaacgcaagcgaaaatgacgaacgcctctcgaatcctcagatcgagtggcagaactccaccatcgactccgaagatggggagcagtttgacaacatgaccgacggtgtggcagaacccatgcacggttcgctggcaggagtcaagctcagctcgcagcaggcc

SEQ ID NO: 321446 - DNA, 3306 bp, Artificial Sequence
  derived and/or modified sequence
atgttccagttgccggtgaataacctcgggtcattgaggaaggcccgaaagactgtcaagaagattctttcagatattggtctggagtactgcaaagagcatatcgaggatttcaagcagtttgagccaaacgacttttaccttaagaatactacttgggaagatgtgggtctgtgggacccatcactcacgaagaaccaggactacagaactaaacctttctgctgttcagcatgtcccttctccagcaaattctttagcgcgtacaagtcccattttcggaatgtccactcagaagattttgagaatcgaatcctgctcaattgtccttactgtacctttaatgccgacaaaaagactctggaaacccacatcaagatctttcacgctcctaacgcttcagcaccctcatccagcctgagcaccttcaaggataagaataagaacgatggactgaagcctaagcaagccgattccgtcgaacaagcagtgtactactgtaagaagtgcacttacagggaccctctttacgaaatcgtgcgtaagcatatctatcgggaacattttcagcacgtggcggctccatacatagccaaggcaggtgaaaagtcactgaacggagcagtgcccctcgggtcaaacgccagagaagaatcctccattcattgcaagagatgcctctttatgccaaaaagctacgaagcactggtgcagcatgtgattgaagatcacgaaaggattggttaccaagtgaccgcaatgattggtcataccaatgtggttgtcccaagatccaagcctctgatgcttattgctccgaaacctcaagataagaagtccatgggtttgccccctcgaatcggctcgcttgcctccggaaacgtgagatcccttccatcgcaacagatggtcaataggctgtccattccgaaaccaaatctgaatagcactggagtgaacatgatgtctagcgtccacctgcaacaaaacaattacggagtgaagtcagtgggccagggctactccgttggacaatcgatgcgtcttgggctgggcggtaatgcaccagtctcgattccccaacagtcccaatcggtgaagcagcttctcccttccggtaatgggcgctcctacgggttggggtccgagcagaggtcgcaagcaccagctcggtactctcttcaaagcgcgaatgcctcctcccttagctcagggcagcttaagtctccttcgctgagccaatcacaggcttcgcgcgtcctggggcaatcgtcatcaaaacctgcggcagccgcaactggccctccccctggcaatacctcgtcgacccagaagtggaagatttgtactatttgtaatgaacttttcccagagaacgtctactccgtccattttgaaaaggagcacaaggcagagaaagtgccggccgtggccaactacattatgaagattcacaactttaccagcaagtgcctgtactgtaatagataccttcctaccgacaccctgctgaaccatatgctcatccacggacttagctgcccatactgtagatccactttcaacgacgtcgagaaaatggcagcacatatgagaatggtgcatatcgatgaagagatgggtcccaagacggatagcacgctgtcctttgatctgacccttcaacaaggatcgcataccaacattcatctgcttgtcactacttacaacctgcgagatgccccggctgaatccgtggcctaccatgcacaaaacaacccgcctgtccctccaaagcctcaaccaaaggtgcaggaaaaagcagatatccccgtcaagagctcaccacaagcagcagtcccttacaagaaggatgtgggaaagaccctttgcccgctgtgtttctcgatattgaaaggtcctatttcagatgcgctggcgcaccatcttagagagagacatcaagtgattcaaaccgtgcatcctgtcgaaaagaagctgacttacaagtgcatccactgtcttggagtgtacacgtcgaacatgacggcatctactatcacccttcaccttgtgcattgcaggggagtgggaaaaacccagaatggtcaagacaagactaatgcaccctcacggctgaatcaatcgccatcactcgcgccagtgaaacgcacctacgaacaaatggagttccccctcctcaagaagaggaaattggatgacgactccgatagcccttctttctttgaagaaaagccagaagaaccagtcgtcctggcactggatccaaagggtcatgaagatgactcgtacgaggcccgcaagtccttcctcacgaagtacttcaacaaacaaccttacccaacccgcagagaaattgagaagctcgcagcatccctgtggctttggaagtctgacattgcgtcccatttttcgaacaagagaaaaaagtgcgtgagagactgtgaaaagtacaagcctggggtgctgctcggtttcaatatgaaggagttgaataaagtgaagcacgagatggattttgacgcagaatggctttttgaaaaccacgatgagaaggacagccgggtcaacgcgagcaagaccgccgacaagaaattgaatcttggaaaggaagatgacagcagctcggacagcttcgaaaatctcgaagaggagtccaacgagagcggcagccccttcgaccctgtgttcgaagtcgagccaaagatatccaacgacaatccagaggaacacgtcttgaaggtgattcccgaggatgcgagcgaatccgaagaaaaacttgaccagaaggaggacggatcgaaatacgaaaccattcacctcaccgaggaaccaactaaacttatgcataacgcttccgactcagaagtggatcaggacgacgtggtggagtggaaggatggggcctccccgtcagaatcaggaccgggttcacaacaagtgtcggattttgaagataatacgtgtgagatgaaacctggtacgtggtcggatgaatcgagtcagtccgaggacgccagatcaagtaagccagcagctaaaaagaaggccaccatgcagggggacagagaacaactgaaatggaagaactcatcctacggcaaggtggaaggattctggtcgaaggatcaaagccagtggaaaaatgcatctgagaacgatgagaggctttccaatccacagatcgaatggcaaaattcgacgattgactcggaggacggggaacagttcgataacatgactgatggtgtggcagaacccatgcacggtagcctggcaggtgtcaagctcagctcgcagcaagca

SEQ ID NO: 321447 - DNA, 3306 bp, Artificial Sequence
  derived and/or modified sequence
atgtttcagcttccggtcaataatcttggcagccttcgaaaggcacgtaagaccgtcaagaagatcctttcggacatagggctcgagtactgtaaggaacatatcgaggatttcaaacagtttgaacctaatgacttctaccttaagaatactacctgggaagatgtgggtttgtgggatccctccctcaccaagaatcaggattaccgtaccaaaccattctgctgctcggcttgcccattttcttcgaaattcttttccgcatacaaatcacactttagaaacgtgcatagcgaagatttcgaaaaccgcattctcttgaactgcccttattgtacctttaacgccgataagaaaactttggagacgcacatcaagatctttcacgcccccaacgcatccgccccatcctccagcctgtcgaccttcaaggacaagaataagaacgacggactcaaacccaaacaagcagattccgtcgaacaggcagtgtattactgtaagaagtgtacgtaccgtgatcctctttacgaaattgtgagaaagcatatctacagggagcattttcaacatgtggcagcaccatacattgccaaggcaggagaaaagtcgctgaatggggctgtgcccctgggctcgaacgcgcgagaggaatcctcaatccattgtaaacgatgccttttcatgcctaagtcctacgaggcgctggtgcagcatgtcatcgaggatcatgaacgcattggataccaggtgactgcgatgatcggccacactaacgtggtggtacctcgttcaaagccactgatgcttattgcacctaagccacaagataagaagtcaatgggtctgccccctcgcattgggtcgctcgcatccggaaacgttaggtcgctgccctcccagcaaatggtgaatagactgtcaatccctaaaccgaatctcaacagcactggagtgaatatgatgtcgagcgtgcacctgcaacaaaacaattatggggtgaagtcggtcggacagggttactcggtgggccagtccatgcgtctcgggttggggggaaatgcgcctgtgtcgatcccacaacagtcgcagtccgtgaagcaacttcttccttcaggaaatggccgttcatacggacttggtagcgaacagaggtcgcaagcgccagcgcggtacagcctccaatcagctaacgcctcatccctgtcgtcaggtcaactcaagtcgccttccctgtcgcaaagccaggcctccagggtcctggggcagtcgtcgtccaaaccagccgcagccgccaccggtccaccccctggaaatactagctcaactcaaaagtggaaaatctgtaccatttgtaatgaactgtttcctgaaaacgtgtactccgtgcatttcgagaaggaacataaggcagagaaggtcccagcagtcgcaaactacattatgaagattcacaactttacttcgaaatgtctttactgtaatcggtatctcccaaccgacaccctgcttaaccatatgctcattcacggcttgagctgtccatattgtcggtcaacctttaatgatgtggaaaagatggcagcacacatgcggatggtgcatattgatgaagaaatgggacctaaaaccgattcaaccctttcctttgacctgactcttcaacaaggtagccatacgaacatacaccttctggtgactacttacaaccttagagacgcgcccgctgaatctgtggcataccacgcacaaaacaaccctccagtcccgcctaagcctcaacccaaagtccaagaaaaggcggatataccagtgaaatcctccccacaagccgctgtgccttacaagaaggatgtgggaaagactctctgtccactgtgttttagtattttgaaggggcccatttcggatgcattggcacatcacctccgggagaggcatcaggtgattcagactgtccatccggtggagaagaagctgacttataagtgcattcactgcctgggtgtgtacaccagcaacatgaccgcatccactatcaccctgcatcttgtccattgtagaggcgtcggcaaaactcaaaacggtcaggataagactaatgcaccctcccgcctgaatcagtccccatcactggcaccggtcaaacgaacttacgaacagatggaatttccactgctgaagaaaagaaaacttgatgatgacagcgattcgccgtcattcttcgaggaaaaacccgaggaaccagtggtcctggcactggatcctaagggacatgaagatgactcgtacgaggcacgtaagtcatttcttaccaagtactttaacaagcaaccataccctactagacgagagatcgaaaagctggcagcgtccctgtggctttggaagagcgatattgcgtcccattttagcaataagcgtaagaaatgtgtgagagattgcgaaaagtacaaacccggagtgttgctgggcttcaatatgaaagagttgaataaagtgaagcacgaaatggatttcgatgcagagtggttgtttgaaaaccatgacgaaaaggatagccgagtcaacgcatccaagaccgcagacaaaaaactgaaccttggaaaggaagatgattcttcgtccgactccttcgagaacctggaagaagaaagcaacgagtcgggctcaccatttgatcctgtgtttgaggtggagccaaaaatcagcaacgataatccagaggaacacgtacttaaggtgatacctgaggatgcatcagaaagcgaagagaaattggaccagaaagaggacggatccaagtacgaaactatccatctgaccgaagagccaactaaactgatgcacaacgcctccgactccgaggtggaccaagacgacgtggtggaatggaaagatggggcatcaccatccgaatcgggtcctggatcacaacaagtctccgatttcgaggacaacacctgtgaaatgaaaccggggacgtggtcggatgaatcttcccagtctgaggatgcaagatcctctaagcctgcagccaagaaaaaggccaccatgcaaggagatcgggaacaactgaagtggaaaaactccagctacggtaaagtggaaggcttttggtcaaaagatcagtcccaatggaagaacgcaagtgaaaacgatgaaagactgtccaacccgcaaatcgaatggcaaaattcaaccatagattccgaagatggcgaacaatttgacaatatgactgatggcgtggcagagccaatgcatggttcccttgctggggtgaagctgagctctcaacaggca
